United States Patent Application Publication US 2017/0114356 A1 - sequence listing, part 21

SEQ ID NO: 27092 - DNA, 2626 bp, Zea Mays
gccactttgagcgtgcctctggagacggtgttgtagatggagtacatatcccctgagagaaatctggaggggacttgtggagatcctgggccgttatttgccgaccaaggtggcagcttgttggaccacttgggttatcaagggggaggaattccacaacatgagtctccaacactggatcatggacttttggttgatccagctggtgcaattccgtatttatctacagattctccgcccttcatgaatgatcaaatcacttgcaatgttataaaatctgcttcagctagtccagaatcttgtacaaaacaacctcaagaacctcttaatgtagaatctgatgtacagaatgacgcagctgaacaaaatgttcacaatagtaactctgaagaacagatcacttctctgggctgtgatgtacagcagaacacagaagtaattgatgaactgttgcctccaaagcttcctgaaagcagtggtaatgatatatcaaactttcaaccggaaactacatattctgatgcctaccatggtgactctttgttaactgaaaatagttgtaatagttatcagcttaacaatagtggtgctcctgctgctgatattccaaactctcctgcacttcagatggaaaatgaggagatgggaaagttacatgagacttctcacaatgaaaacagtgggtcagaggatgatcaaatgaatggtaggaagccttgccccattagtggtcgagacaatgagaagtttaacacttcagctgtacctccctcttgggaacagacaaaacaaaaaaatcctggtaccagaaatggaagttcaactccagacgatcaatttgattctcctccagacaggtttgcaagattggaaagggacacaccatctccagatgggagagtatcccctgaaaggtttgcaagactggaaagggataccccacctccagacggggatatatctcgtccaggtgaaagttcacatgtccattctgagacgatggagatggagccagaatatcgcgccaatgatgataccccacctccagacgggaggatgtctcctccagttgaaagttcacatgtccattctaagaagatggagtcacaacaccatgccaaagatgttggtgagttagctcgttttgaaagcccacaggtaagacatcggtcccgatcttctgaaaaacatgaccccagccgcaaaagaacctcttcaggggagttgtctccacatgcgcgtcagaattctcctgtagaaaggaaaagacggagagagtctcgccatggtgatgggtcacctcgacagagatctgcatctccccgaagaagatctacaccccctcgaagaagatctatatcccctcgaagatcctcacacaagaggagggaatcaccaagaaggggagactcacctaggaggaggcactcacctaggaggagggagtcaccaaggaagagagactcaccaaggaggagagactcaccaaggaggagggattcaccaaagaggaggagggactccccaaggaggagggataggtcaaaatcaaggtcaccttcaagaaaacatgacacttctagacataaaaaagaacatgacagatctcggtccaggtctccccactcaagggatcatcacagacgatctccaaggcattcaccaagacgcagatcacccccagccagtcatcgccatcattcaccaagaagacattggtcaccacctgccaacaggaagactggattgggtaagcctggaaagaatctctttattgcaggatttagctatgccaccactgagcgagatttggagaagaaattttgcaagtttggacgtgtaacaagtgcacgtgttgttcgtgataaacgaactggagattcccgtggctttggattcttatccttggataaggatgaggatgctgatgcagcaatccgtgcttgtgacgagactgagtggaatggaaggatcattcttgtggagaagtcaaaagcacctgcatggtgaatcttccgctttgggggcgcacacgccattgttcgagagggatttcattgcttcacctttcacagattttaccattcagaaaaaaagaaactaccggtatgacatactcggtacatgtcaaagttcacccgaacctggcttttgatgctgtactaggaggccctgctgctgataagagggacttacgacttagtggtacttttagtgtctgcaacctctacacgtgaaatgtgatacgtgcctgttcgtgagctgtcagttctcttcttcaccttcatctcgcgcccactgaatactgatggcatgaacggattccgggagactcaagctttatggtgttgttgcgactcaagggttatgttagcagttcaataatctgcatattagcttttcaatgttgtgcatcctctgaatgagggtttggaaaatgtcctatatagtttgtgttttggattccagatgttgtttaattatggtcacgacacgatacctatgccccatctgttgactgttggtgatgttttttttcctgatgacatgtcttttcatcctgtgttcttgaatctagagttgtctgtctattggcgcaatattagtgagatggaaactgagcgtg

SEQ ID NO: 27093 - DNA, 2147 bp, Zea Mays
ccgggcaccgggccaccacaccacgtgacatccgtttcgtacggcctcccccaaaaatctcagcccgtctctctctcctaacgaagaggagagggggcagaagaaaacctcgcgcgggggaggcgcgagaggaatcgcgggggccggaggagcagcggccggtggaggtggcgcgcgcggtggccgtccgagatggagtacatatcccctgagagaaatctggaggggacttgtggagatcctgggccgttatttgccgaccaaggtggcagcttgttggaccacttgggttatcaagggggaggaattccacaacatgagtctccaacactggatcatggacttttggttgatccagctggtgcaattccgtatttatctacagattctccgcccttcatgaatgatcaaatcacttgcaatgttataaaatctgcttcagctagtccagaatcttgtacaaaacaacctcaagaacctcttaatgtagaatctgatgtacagaatgacgcagctgaacaaaatgttcacaatagtaactctgaagaacagatcacttctctgggctgtgatgtacagcagaacacagaagtaattgatgaactgttgcctccaaagcttcctgaaagcagtggtaatgatatatcaaactttcaaccggaaactacatattctgatgcctaccatggtgactctttgttaactgaaaatagttgtaatagttatcagcttaacaatagtggtgctcctgctgctgatattccaaactctcctgcacttcagatggaaaatgaggagatgggaaagttacatgagacttctcacaatgaaaacagtgggtcagaggatgatcaaatgaatggtaggaagccttgccccattagtggtcgagacaatgagaagtttaacacttcagctgtacctccctcttgggaacagacaaaacaaaaaaatcctggtaccagaaatggaagttcaactccagacgatcaatttgattctcctccagacaggtttgcaagattggaaagggacacaccatctccagatgggagagtatcccctgaaaggtttgcaagactggaaagggataccccacctccagacggggatatatctcgtccaggtgaaagttcacatgtccattctgagacgatggagatggagccagaatatcgcgccaatgatgataccccacctccagacgggaggatgtctcctccagttgaaagttcacatgtccattctaagaagatggagtcacaacaccatgccaaagatgttggtgagttagctcgttttgaaagcccacaggtaagacatcggtcccgatcttctgaaaaacatgaccccagccgcaaaagaacctcttcaggggagttgtctccacatgcgcgtcagaattctcctgtagaaaggaaaagacggagagagtctcgccatggtgatgggtcacctcgacagagatctgcatctccccgaagaagatctacaccccctcgaagaagatctatatcccctcgaagatcctcacacaagaggagggaatcaccaagaaggggagactcacctaggaggaggcactcacctaggaggagggagtcaccaaggaagagagactcaccaaggaggagagactcaccaaggaggagggattcaccaaagaggaggagggactccccaaggaggagggataggtcaaaatcaaggtcaccttcaagaaaacatgacacttctagacataaaaaagaacatgacagatctcggtccaggtctccccactcaagggatcatcacagacgatctccaaggcattcaccaagacgcagatcacccccagccagtcatcgccatcattcaccaagaagacattggtcaccacctgccaacaggaagactggattgggtaagcctggaaagaatctctttattgcaggatttagctatgccaccactgagcgagatttggagaagaaattttgcaagtttggacgtgtaacaagtgcacgtgttgttcgtgataaacgcacttttacttctggtttctgcacttttagtatagttgcttcatagtgctgtgtcatcattggacgagacctcttttcatgtaactcgtgctcatcttttgtttatgttttttcctttca

SEQ ID NO: 27094 - DNA, 1417 bp, Zea Mays
tttgggtctaaacgtgattttacttctatttaagggctaaaatacaaaaaattcgggcaaaattcaagaacacgctggtgaactccgtccagcgacaactcggtataaatattaaataaacagcccagagactgcgcggtaaacatctgcagctgaggttactataactataataagttcccggccggcggcgacggtacgtggagaagtacgtggatcgagctcgatcaagctgaccagggaagacatggcctctctgcagcaacgcaagcaacgcaaggatgagagcggcggcgcccacgcggttgctgatgaggcggtgcgcgggacgggaaaaggcaagagcgaggcggcgccggggcgccggaaggtgacgtacgggttccacctggtggagggccggatgccgcacggcatggaggaccgccacgtggccgagttccggaagctggacgacggcaacgaggtcggcctcttcgcggtcttcgacggacactccggcgccgacgtcgccacctacctccgcgagcacctcttcgacaacatactcatggaccaagggacgtgcctcgcgtagacgcgcagctggccatggcgcgcgcgttcggggaccggtcgctcaaggagcacatcagctcggaccccgacgtggccatcgaggacgtcggagacggcgccgagctgctcgtgctggcgagcgacgggctgtggaaggtcatgtcgaaccaggaggcggtcgacgaggctcggggcatcgaggacgcccggaaggcggcggtcaggctcgtcgacgaggcggtgcggcggggcagcaaggacgacatctcttgcatcgtcgtgcgactgcactagctagtgaacatctgctcggtcgccgggcgaatgtgtgcactgttttagcatcatatgtgcaagtttacatgaaactatggaagattacatgtcaaagcccccaagagtccgtttctttgcttggctgccttcaaaagacaaactctaaactcttgtgaatttgcacaagagaaaaattctagataatgaaatctgtgaagcctgttctatagcgcctgaaattacctctaatattctctttcacttcccatattctctttcactgttgttttatattctcttccactgttgttttgccatagctttttggatatctgctagcattgtcatcctctctgatatacactgcgctctcgttttcatcagtttgcctgtccccggctcttaaagatcggtttaacgatttcattttgctttgctttgacgatttcattttgctttgctgctggtatctggaaacgccggaacgctagataattatcgcgtgcaagttggacactcgtctgttggcgcaaccgcaatcgcttccgcccccacaacacgtcatcaatcttcgctcaaaatg

SEQ ID NO: 27095 - DNA, 1736 bp, Zea Mays
ttttttgggtctaaacgtgattttacttctatttaagggctaaaatacaaaaaattcgggcaaaattcaagaacacgctggtgaactccgtccagcgacaactcggtataaatattaaataaacagcccagagactgcgcggtaaacatctgcagctgaggttactataactataataagttcccggccggcggcgacggtacgtggagaagtacgtggatcgagctcgatcaagctgaccagggaagacatggcctctctgcagcaacgcaagcaacgcaaggatgagagcggcggcgcccacgcggttgctgatgaggcggtgcgcgggacgggaaaaggcaagagcgaggcggcgccggggcgccggaaggtgacgtacgggttccacctggtggagggccggatgccgcacggcatggaggaccgccacgtggccgagttccggaagctggacgacggcaacgaggtcggcctcttcgcggtcttcgacggacactccggcgccgacgtcgccacctacctccgcgagcacctcttcgacaacatactcatggaccaatcgggctccgatttctggacggacccgacggaggcgatccggcgcgcgtaccaccgcacggaccggaagctgctgaagaaaacggcgggcgacgacagcggcgaggggatgaagaagggcaggcggcgcggcgggtcgacggcggtcacggcgatcctgatcaacggagaggatctcgtggtcgccaacgtgggcgactcccgcgccgtgctgtgcgacgcgggcggcagggccaggcagctgtccgtggaccacgagccgctccgggagcgccgcgccatcgaggcccgcggcggcttcgtcaccgagatccacggggacgtgcctcgcgtagacgcgcagctggccatggcgcgcgcgttcggggaccggtcgctcaaggagcacatcagctcggaccccgacgtggccatcgaggacgtcggagacggcgccgagctgctcgtgctggcgagcgacgggctgtggaaggtcatgtcgaaccaggaggcggtcgacgaggctcggggcatcgaggacgcccggaaggcggcggtcaggctcgtcgacgaggcggtgcggcggggcagcaaggacgacatctcttgcatcgtcgtgcgactgcactagctagtgaacatctgctcggtcgccgggcgaatgtgtgcactgttttagcatcatatgtgcaagtttacatgaaactatggaagattacatgtcaaagcccccaagagtccgtttctttgcttggctgccttcaaaagacaaactctaaactcttgtgaatttgcacaagagaaaaattctagataatgaaatctgtgaagcctgttctatagcgcctgaaattacctctaatattctctttcacttcccatattctctttcactgttgttttatattctcttccactgttgttttgccatagctttttggatatctgctagcattgtcatcctctctgatatacactgcgctctcgttttcatcagtttgcctgtccccggctcttaaagatcggtttaacgatttcattttgctttgctttgacgatttcattttgctttgctgctggtatctggaaacgccggaacgctagataattatcgcgtgcaagttggacactcgtctgttggcgcaaccgcaatcgcttccgcccccacaacacgtcatcaatcttcgctcaaaatg

SEQ ID NO: 27096 - DNA, 2290 bp, Zea Mays
cttgtgtctagctcaatcataattccatcttattgagaagctgtatagagagagatggggtccagaggatggtgtgggctgcattattctctccccgacaaatgatttggctgggcagatttttgaggtgatcaagaaagtggggcagttccataactttagtggtggcgtcattgttggtaagcgcaagggtatcgagatagagaaggaacgtgtgaacagcttgaatatcttagtgtgcacgccagggcggttagtccagcacttcaacgaaactgccaattttgattgttcacagctccaactgttggtgcttgacgaggcagatcaaattcttgatcacggattcagaaaccaggttgatgctatcatttctcagattcccaaagttagacaaactttactgttttctgctacacaaacgaagtcagttaaggaccttgcaagggttagcttaagggatcctgaatatataagtgtgcacgaggaggccagaacagccacaccggatacccttgagcagtatgccatgattgtacctcttgagcagaagttaaatatgctctggagcttcattaaaaggcatctaaattcaaagacgatagtcttcttatctagtgtcaagcaggtcaaatttgtttatgaaatttttaagaaacttcgtcctggtattcctttgaaatgtatgcatggacggatgaaacatgtggtacagcaggccatagttgcagatttcaatgaagctacctcagttcttttctcaactgatataacatctcgaggactagatataaagaatgtggattgggtggtgcaggttgattgcccagaaaacattgataattacatccacagagttggccgtacagctcgttacaataagaaaggaaaatcacttatattcctttgtcctgaagaagaagcaatgcttgaaaaattgaaggcaaccgaaagtaaaatacctatacatattcgaaagccaaaggcagaacaactggagcagatatcgcagagtatagcctcagtgctggttaaatttcccaatcttcaggaattgggtaaaagggcttttgttacctatcttaaggcagtatacctccagaaagacaaaaaagtgttcaacctgagcaggttctctgcagagcagtttgctgcatatgctgcttcgcttggtctgcctgttacccccaagatccgcttcataagccacaagaagaatgtgtcgaagaaggatatggaggacattgatatgaaacagatgaaatccagtttggaacatgaagttaccatcactccaaagatcaacattgatttaactttgtgtgatggagatgatgatatcctttatcccaagaagcccactgcagatgctaatatggatgacagacttgatgatgtccttcatcccaaggagtctgccacagatacaaatgtgactggacttgaaagacccttcaaaaagaagaaactgaagataaacgtgaacaggccatcaggaacaagggtcaagtatgatgatgagggcaacgccatcccacctcttgcatctgtcgctgaagaagtatctttagaacctgtggttcacaaggataaaatttcccagcggtatgcagagatgttgagagaaatgcagaaacacgacaaggaggacaagcttgaacacaagaagaccttgcgggagaagaagctgcagaagaagatgaagcttaagcgcaagaggcaggaagacactggagcagggtcagaggaggatagtggatctgaatcagacagaggccaagacacagccaacaaaggtaaaaagaggtacttcaatagcgacgatgaagacaatgacgcagcaaaggacggtgatgttctcgcccagcaggaggcgttggcactgaagctcctgagtaatatgcacagttagctttgggatctgatggtataggttacccttgaatgggggtttgcctattagcgctccagccaggaaggggctgaaattttgaacgtgtcgcggttttttttttctgataaccgggagttaattcccactttcaggcatacgttcatggatgtatgagaaatcagtgtggccgtattaccccaagaaatcggacttagatgaggttttaagtaaaatgcctttgattttaaaattctaaaattgcgtaaaatgattgttacagcatcttgaggactccgatgaaatttactgacaggtgaaaattgcgtggtcatggttccctcggatgtgctcctgaggacagaaatgtgaatggattgttggggacactctgcaatc

SEQ ID NO: 27097 - DNA, 2486 bp, Zea Mays
aaaacacctggctccgactccggccctagtgccctacttcccggtatcctaaaccctagccgacatgcgccgcccgcagcgccgcgtcgcggcgaagcagactcgcctgcgggaggtcgacgagatacgcctcctcaacgaatggatcgacgccggcaagcccctcccgcgcaccaaacttctgcccccgtcgaaatcagctggaccggttccgaccgccggggagcacccggagtacggcgcgtgcacactgttcgacgagctgccgctgtcgcagaagaccaaggacgggctgcggaaggcggggttcactgagatgagtgagatccagcgcgccgctctgccccacgcgctgtgtggccgcgacatcctcggcgcggccaagaccggctccggcaagacccttgcctttgtcatcccgcttattgagaagctgtatagagagagatggggtccagaggatggtgtgggctgcattattctctccccgacaaatgatttggctgggcagatttttgaggtgatcaagaaagtggggcagttccataactttagtggtggcgtcattgttgctgttggtgcttgacgaggcagatcaaattcttgatcacggattcagaaaccaggttgatgctatcatttctcagattcccaaagttagacaaactttactgttttctgctacacaaacgaagtcagttaaggaccttgcaagggttagcttaagggatcctgaatatataagtgtgcacgaggaggccagaacagccacaccggatacccttgagcagtatgccatgattgtacctcttgagcagaagttaaatatgctctggagcttcattaaaaggcatctaaattcaaagacgatagtcttcttatctagtgtcaagcaggtcaaatttgtttatgaaatttttaagaaacttcgtcctggtattcctttgaaatgtatgcatggacggatgaaacatgtggtacagcaggccatagttgcagatttcaatgaagctacctcagttcttttctcaactgatataacatctcgaggactagatataaagaatgtggattgggtggtgcaggttgattgcccagaaaacattgataattacatccacagagttggccgtacagctcgttacaataagaaaggaaaatcacttatattcctttgtcctgaagaagaagcaatgcttgaaaaattgaaggcaaccgaaagtaaaatacctatacatattcgaaaggaattgggtaaaagggcttttgttacctatcttaaggcagtatacctccagaaagacaaaaaagtgttcaacctgagcaggttctctgcagagcagtttgctgcatatgctgcttcgcttggtctgcctgttacccccaagatccgcttcataagccacaagaagaatgtgtcgaagaaggatatggaggacattgatatgaaacagatgaaatccagtttggaacatgaagttaccatcactccaaagatcaacattgatttaactttgtgtgatggagatgatgatatcctttatcccaagaagcccactgcagatgctaatatggatgacagacttgatgatgtccttcatcccaaggagtctgccacagatacaaatgtgactggacttgaaagacccttcaaaaagaagaaactgaagataaacgtgaacaggccatcaggaacaagggtcaagtatgatgatgagggcaacgccatcccacctcttgcatctgtcgctgaagaagtatctttagaacctgtggttcacaaggataaaatttcccagcggtatgcagagatgttgagagaaatgcagaaacacgacaaggaggacaagcttgaacacaagaagaccttgcgggagaagaagctgcagaagaagatgaagcttaagcgcaagaggcaggaagacactggagcagggtcagaggaggatagtggatctgaatcagacagaggccaagacacagccaacaaaggtaaaaagaggtacttcaatagcgacgatgaagacaatgacgcagcaaaggacggtgatgttctcgcccagcaggaggcgttggcactgaagctcctgagtaatatgcacagttagctttgggatctgatggtataggttacccttgaatgggggtttgcctattagcgctccagccaggaaggggctgaaattttgaacgtgtcgcggttttttttttctgataaccgggagttaattcccactttcaggcatacgttcatggatgtatgagaaatcagtgtggccgtattaccccaagaaatcggacttagatgaggttttaagtaaaatgcctttgattttaaaattctaaaattgcgtaaaatgattgttacagcatcttgaggactccgatgaaatttactgacaggtgaaaattgcgtggtcatggttccctcggatgtgctcctgaggacagaaatgtgaatggattgttggggacactctgcaatc

SEQ ID NO: 27098 - DNA, 2532 bp, Zea Mays
aaaacacctggctccgactccggccctagtgccctacttcccggtatcctaaaccctagccgacatgcgccgcccgcagcgccgcgtcgcggcgaagcagactcgcctgcgggaggtcgacgagatacgcctcctcaacgaatggatcgacgccggcaagcccctcccgcgcaccaaacttctgcccccgtcgaaatcagctggaccggttccgaccgccggggagcacccggagtacggcgcgtgcacactgttcgacgagctgccgctgtcgcagaagaccaaggacgggctgcggaaggcggggttcactgagatgagtgagatccagcgcgccgctctgccccacgcgctgtgtggccgcgacatcctcggcgcggccaagaccggctccggcaagacccttgcctttgtcatcccgcttattgagaagctgtatagagagagatggggtccagaggatggtgtgggctgcattattctctccccgacaaatgatttggctgggcagatttttgaggtgatcaagaaagtggggcagttccataactttagtggtggcgtcattgttgctgttggtgcttgacgaggcagatcaaattcttgatcacggattcagaaaccaggttgatgctatcatttctcagattcccaaagttagacaaactttactgttttctgctacacaaacgaagtcagttaaggaccttgcaagggttagcttaagggatcctgaatatataagtgtgcacgaggaggccagaacagccacaccggatacccttgagcagtatgccatgattgtacctcttgagcagaagttaaatatgctctggagcttcattaaaaggcatctaaattcaaagacgatagtcttcttatctagtgtcaagcaggtcaaatttgtttatgaaatttttaagaaacttcgtcctggtattcctttgaaatgtatgcatggacggatgaaacatgtggtacagcaggccatagttgcagatttcaatgaagctacctcagttcttttctcaactgatataacatctcgaggactagatataaagaatgtggattgggtggtgcaggttgattgcccagaaaacattgataattacatccacagagttggccgtacagctcgttacaataagaaaggaaaatcacttatattcctttgtcctgaagaagaagcaatgcttgaaaaattgaaggcaaccgaaaccaaaggcagaacaactggagcagatatcgcagagtatagcctcagtgctggttaaatttcccaatcttcaggaattgggtaaaagggcttttgttacctatcttaaggcagtatacctccagaaagacaaaaaagtgttcaacctgagcaggttctctgcagagcagtttgctgcatatgctgcttcgcttggtctgcctgttacccccaagatccgcttcataagccacaagaagaatgtgtcgaagaaggatatggaggacattgatatgaaacagatgaaatccagtttggaacatgaagttaccatcactccaaagatcaacattgatttaactttgtgtgatggagatgatgatatcctttatcccaagaagcccactgcagatgctaatatggatgacagacttgatgatgtccttcatcccaaggagtctgccacagatacaaatgtgactggacttgaaagacccttcaaaaagaagaaactgaagataaacgtgaacaggccatcaggaacaagggtcaagtatgatgatgagggcaacgccatcccacctcttgcatctgtcgctgaagaagtatctttagaacctgtggttcacaaggataaaatttcccagcggtatgcagagatgttgagagaaatgcagaaacacgacaaggaggacaagcttgaacacaagaagaccttgcgggagaagaagctgcagaagaagatgaagcttaagcgcaagaggcaggaagacactggagcagggtcagaggaggatagtggatctgaatcagacagaggccaagacacagccaacaaaggtaaaaagaggtacttcaatagcgacgatgaagacaatgacgcagcaaaggacggtgatgttctcgcccagcaggaggcgttggcactgaagctcctgagtaatatgcacagttagctttgggatctgatggtataggttacccttgaatgggggtttgcctattagcgctccagccaggaaggggctgaaattttgaacgtgtcgcggttttttttttctgataaccgggagttaattcccactttcaggcatacgttcatggatgtatgagaaatcagtgtggccgtattaccccaagaaatcggacttagatgaggttttaagtaaaatgcctttgattttaaaattctaaaattgcgtaaaatgattgttacagcatcttgaggactccgatgaaatttactgacaggtgaaaattgcgtggtcatggttccctcggatgtgctcctgaggacagaaatgtgaatggattgttggggacactctgcaatc

SEQ ID NO: 27099 - DNA, 2545 bp, Zea Mays
aaaacacctggctccgactccggccctagtgccctacttcccggtatcctaaaccctagccgacatgcgccgcccgcagcgccgcgtcgcggcgaagcagactcgcctgcgggaggtcgacgagatacgcctcctcaacgaatggatcgacgccggcaagcccctcccgcgcaccaaacttctgcccccgtcgaaatcagctggaccggttccgaccgccggggagcacccggagtacggcgcgtgcacactgttcgacgagctgccgctgtcgcagaagaccaaggacgggctgcggaaggcggggttcactgagatgagtgagatccagcgcgccgctctgccccacgcgctgtgtggccgcgacatcctcggcgcggccaagaccggctccggcaagacccttgcctttgtcatcccgcttattgagaagctgtatagagagagatggggtccagaggatggtgtgggctgcattattctctccccgacaaatgatttggctgggcagatttttgaggtgatcaagaaagtggggcagttccataactttagtggtggcgtcattgttgctgttggtgcttgacgaggcagatcaaattcttgatcacggattcagaaaccaggttgatgctatcatttctcagattcccaaagttagacaaactttactgttttctgctacacaaacgaagtcagttaaggaccttgcaagggttagcttaagggatcctgaatatataagtgtgcacgaggaggccagaacagccacaccggatacccttgagcagtatgccatgattgtacctcttgagcagaagttaaatatgctctggagcttcattaaaaggcatctaaattcaaagacgatagtcttcttatctagtgtcaagcaggtcaaatttgtttatgaaatttttaagaaacttcgtcctggtattcctttgaaatgtatgcatggacggatgaaacatgtggtacagcaggccatagttgcagatttcaatgaagctacctcagttcttttctcaactgatataacatctcgaggactagatataaagaatgtggattgggtggtgcagaaaacattgataattacatccacagagttggccgtacagctcgttacaataagaaaggaaaatcacttatattcctttgtcctgaagaagaagcaatgcttgaaaaattgaaggcaaccgaaagtaaaatacctatacatattcgaaagccaaaggcagaacaactggagcagatatcgcagagtatagcctcagtgctggttaaatttcccaatcttcaggaattgggtaaaagggcttttgttacctatcttaaggcagtatacctccagaaagacaaaaaagtgttcaacctgagcaggttctctgcagagcagtttgctgcatatgctgcttcgcttggtctgcctgttacccccaagatccgcttcataagccacaagaagaatgtgtcgaagaaggatatggaggacattgatatgaaacagatgaaatccagtttggaacatgaagttaccatcactccaaagatcaacattgatttaactttgtgtgatggagatgatgatatcctttatcccaagaagcccactgcagatgctaatatggatgacagacttgatgatgtccttcatcccaaggagtctgccacagatacaaatgtgactggacttgaaagacccttcaaaaagaagaaactgaagataaacgtgaacaggccatcaggaacaagggtcaagtatgatgatgagggcaacgccatcccacctcttgcatctgtcgctgaagaagtatctttagaacctgtggttcacaaggataaaatttcccagcggtatgcagagatgttgagagaaatgcagaaacacgacaaggaggacaagcttgaacacaagaagaccttgcgggagaagaagctgcagaagaagatgaagcttaagcgcaagaggcaggaagacactggagcagggtcagaggaggatagtggatctgaatcagacagaggccaagacacagccaacaaaggtaaaaagaggtacttcaatagcgacgatgaagacaatgacgcagcaaaggacggtgatgttctcgcccagcaggaggcgttggcactgaagctcctgagtaatatgcacagttagctttgggatctgatggtataggttacccttgaatgggggtttgcctattagcgctccagccaggaaggggctgaaattttgaacgtgtcgcggttttttttttctgataaccgggagttaattcccactttcaggcatacgttcatggatgtatgagaaatcagtgtggccgtattaccccaagaaatcggacttagatgaggttttaagtaaaatgcctttgattttaaaattctaaaattgcgtaaaatgattgttacagcatcttgaggactccgatgaaatttactgacaggtgaaaattgcgtggtcatggttccctcggatgtgctcctgaggacagaaatgtgaatggattgttggggacactctgcaatc

SEQ ID NO: 27100 - DNA, 2533 bp, Zea Mays
gctaaaacacctggctccgactccggccctagtgccctacttcccggtatcctaaaccctagccgacatgcgccgcccgcagcgccgcgtcgcggcgaagcagactcgcctgcgggaggtcgacgagatacgcctcctcaacgaatggatcgacgccggcaagcccctcccgcgcaccaaacttctgcccccgtcgaaatcagctggaccggttccgaccgccggggagcacccggagtacggcgcgtgcacactgttcgacgagctgccgctgtcgcagaagaccaaggacgggctgcggaaggcggggttcactgagatgagtgagatccagcgcgccgctctgccccacgcgctgtgtggccgcgacatcctcggcgcggccaagaccggctccggcaagacccttgcctttgtcatcccgcttattgagaagctgtatagagagagatggggtccagaggatggtgtgggctgcattattctctccccgacaaatgatttggctgggcagatttttgaggtgatcaagaaagtggggcagttccataactttagtggtggcgtcattgttgggcggttagtccagcacttcaacgaaactgccaattttgattgttcacagctccaactgttggtgcttgacgaggcagatcaaattcttgatcacggattcagaaaccaggttgatgctatcatttctcagattcccaaagttagacaaactttactgttttctgctacacaaacgaagtcagttaaggaccttgcaagggttagcttaagggatcctgaatatataagtgtgcacgaggaggccagaacagccacaccggatacccttgagcagtatgccatgattgtacctcttgagcagaagttaaatatgctctggagcttcattaaaaggcatctaaattcaaagacgatagtcttcttatctagtgtcaagcaggtcaaatttgtttatgaaatttttaagaaacttcgtcctggtattcctttgaaatgtatgcatggacggatgaaacatgtggtacagcaggccatagttgcagatttcaatgaagctacctcagttcttttctcaactgatataacatctcgaggactagatataaagaatgtggattgggtggtgcaggttgattgcccagaaaacattgataattacatccacagagttggccgtacagctcgttacaataagaaaggaaaatcacttatattcctttgtcctgaagaagaagcaatgcttgaaaaattgaaggcaaccgaaagtaaaatacctatacatattcgaaagccaaaggcagaacaactggagcagatatcgcagagtatagcctcagtgctggttaaatttcccaatcttcaggaattggagcagtttgctgcatatgctgcttcgcttggtctgcctgttacccccaagatccgcttcataagccacaagaagaatgtgtcgaagaaggatatggaggacattgatatgaaacagatgaaatccagtttggaacatgaagttaccatcactccaaagatcaacattgatttaactttgtgtgatggagatgatgatatcctttatcccaagaagcccactgcagatgctaatatggatgacagacttgatgatgtccttcatcccaaggagtctgccacagatacaaatgtgactggacttgaaagacccttcaaaaagaagaaactgaagataaacgtgaacaggccatcaggaacaagggtcaagtatgatgatgagggcaacgccatcccacctcttgcatctgtcgctgaagaagtatctttagaacctgtggttcacaaggataaaatttcccagcggtatgcagagatgttgagagaaatgcagaaacacgacaaggaggacaagcttgaacacaagaagaccttgcgggagaagaagctgcagaagaagatgaagcttaagcgcaagaggcaggaagacactggagcagggtcagaggaggatagtggatctgaatcagacagaggccaagacacagccaacaaaggtaaaaagaggtacttcaatagcgacgatgaagacaatgacgcagcaaaggacggtgatgttctcgcccagcaggaggcgttggcactgaagctcctgagtaatatgcacagttagctttgggatctgatggtataggttacccttgaatgggggtttgcctattagcgctccagccaggaaggggctgaaattttgaacgtgtcgcggttttttttttctgataaccgggagttaattcccactttcaggcatacgttcatggatgtatgagaaatcagtgtggccgtattaccccaagaaatcggacttagatgaggttttaagtaaaatgcctttgattttaaaattctaaaattgcgtaaaatgattgttacagcatcttgaggactccgatgaaatttactgacaggtgaaaattgcgtggtcatggttccctcggatgtgctcctgaggacagaaatgtgaatggattgttggggacactctgcaatc

SEQ ID NO: 27101 - DNA, 2724 bp, Zea Mays
gctaaaacacctggctccgactccggccctagtgccctacttcccggtatcctaaaccctagccgacatgcgccgcccgcagcgccgcgtcgcggcgaagcagactcgcctgcgggaggtcgacgagatacgcctcctcaacgaatggatcgacgccggcaagcccctcccgcgcaccaaacttctgcccccgtcgaaatcagctggaccggttccgaccgccggggagcacccggagtacggcgcgtgcacactgttcgacgagctgccgctgtcgcagaagaccaaggacgggctgcggaaggcggggttcactgagatgagtgagatccagcgcgccgctctgccccacgcgctgtgtggccgcgacatcctcggcgcggccaagaccggctccggcaagacccttgcctttgtcatcccgcttattgagaagctgtatagagagagatggggtccagaggatggtgtgggctgcattattctctccccgacaaatgatttggctgggcagatttttgaggtgatcaagaaagtggggcagttccataactttagtggtggcgtcattgttggtaagcgcaagggtatcgagatagagaaggaacgtgtgaacagcttgaatatcttagtgtgcacgccagggcggttagtccagcacttcaacgaaactgccaattttgattgttcacagctccaataccactgtttcatttttctctccttatgggaaaacagctgttggtgcttgacgaggcagatcaaattcttgatcacggattcagaaaccaggttgatgctatcatttctcagattcccaaagttagacaaactttactgttttctgctacacaaacgaagtcagttaaggaccttgcaagggttagcttaagggatcctgaatatataagtgtgcacgaggaggccagaacagccacaccggatacccttgagcagtatgccatgattgtacctcttgagcagaagttaaatatgctctggagcttcattaaaaggcatctaaattcaaagacgatagtcttcttatctagtgtcaagcaggtcaaatttgtttatgaaatttttaagaaacttcgtcctggtattcctttgaaatgtatgcatggacggatgaaacatgtggtacagcaggccatagttgcagatttcaatgaagctacctcagttcttttctcaactgatataacatctcgaggactagatataaagaatgtggattgggtggtgcaggttgattgcccagaaaacattgataattacatccacagagttggccgtacagctcgttacaataagaaaggaaaatcacttatattcctttgtcctgaagaagaagcaatgcttgaaaaattgaaggcaaccgaaagtaaaatacctatacatattcgaaagccaaaggcagaacaactggagcagatatcgcagagtatagcctcagtgctggttaaatttcccaatcttcaggaattgggtaaaagggcttttgttacctatcttaaggcagtatacctccagaaagacaaaaaagtgttcaacctgagcaggttctctgcagagcagtttgctgcatatgctgcttcgcttggtctgcctgttacccccaagatccgcttcataagccacaagaagaatgtgtcgaagaaggatatggaggacattgatatgaaacagatgaaatccagtttggaacatgaagttaccatcactccaaagatcaacattgatttaactttgtgtgatggagatgatgatatcctttatcccaagaagcccactgcagatgctaatatggatgacagacttgatgatgtccttcatcccaaggagtctgccacagatacaaatgtgactggacttgaaagacccttcaaaaagaagaaactgaagataaacgtgaacaggccatcaggaacaagggtcaagtatgatgatgagggcaacgccatcccacctcttgcatctgtcgctgaagaagtatctttagaacctgtggttcacaaggataaaatttcccagcggtatgcagagatgttgagagaaatgcagaaacacgacaaggaggacaagcttgaacacaagaagaccttgcgggagaagaagctgcagaagaagatgaagcttaagcgcaagaggcaggaagacactggagcagggtcagaggaggatagtggatctgaatcagacagaggccaagacacagccaacaaaggtaaaaagaggtacttcaatagcgacgatgaagacaatgacgcagcaaaggacggtgatgttctcgcccagcaggaggcgttggcactgaagctcctgagtaatatgcacagttagctttgggatctgatggtataggttacccttgaatgggggtttgcctattagcgctccagccaggaaggggctgaaattttgaacgtgtcgcggttttttttttctgataaccgggagttaattcccactttcaggcatacgttcatggatgtatgagaaatcagtgtggccgtattaccccaagaaatcggacttagatgaggttttaagtaaaatgcctttgattttaaaattctaaaattgcgtaaaatgattgttacagcatcttgaggactccgatgaaatttactgacaggtgaaaattgcgtggtcatggttccctcggatgtgctcctgaggacagaaatgtgaatggattgttggggacactctgcaatc

SEQ ID NO: 27102 - DNA, 2745 bp, Zea Mays
gtgacttttatatagctcatgctacccgaaatcctgtccgagctaaaacacctggctccgactccggccctagtgccctacttcccggtatcctaaaccctagccgacatgcgccgcccgcagcgccgcgtcgcggcgaagcagactcgcctgcgggaggtcgacgagatacgcctcctcaacgaatggatcgacgccggcaagcccctcccgcgcaccaaacttctgcccccgtcgaaatcagctggaccggttccgaccgccggggagcacccggagtacggcgcgtgcacactgttcgacgagctgccgctgtcgcagaagaccaaggacgggctgcggaaggcggggttcactgagatgagtgagatccagcgcgccgctctgccccacgcgctgtgtggccgcgacatcctcggcgcggccaagaccggctccggcaagacccttgcctttgtcatcccgcttattgagaagctgtatagagagagatggggtccagaggatggtgtgggctgcattattctctccccgacaaatgatttggctgggcagatttttgagctgttggtgcttgacgaggcagatcaaattcttgatcacggattcagaaaccaggttgatgctatcatttctcagattcccaaagttagacaaactttactgttttctgctacacaaacgaagtcagttaaggaccttgcaagggttagcttaagggatcctgaatatataagtgtgcacgaggaggccagaacagccacaccggatacccttgagcagtatgccatgattgtacctcttgagcagaagttaaatatgctctggagcttcattaaaaggcatctaaattcaaagacgatagtcttcttatctagtgtcaagcaggtcaaatttgtttatgaaatttttaagaaacttcgtcctggtattcctttgaaatgtatgcatggacggatgaaacatgtggtacagcaggccatagttgcagatttcaatgaagctacctcagttcttttctcaactgatataacatctcgaggactagatataaagaatgtggattgggtggtgcaggttgattgcccagaaaacattgataattacatccacagagttggccgtacagctcgttacaataagaaaggaaaatcacttatattcctttgtcctgaagaagaagcaatgcttgaaaaattgaaggcaaccgaaagtaaaatacctatacatattcgaaaggttagcagcaggattttctgtttttagtgcttatttgattatggttgatctatgttgctgagacaagcgtttagaatggttattcggtctcaagtgacagaaaatttgacagttgtttatatcatagaactgccactggttcttgcatttcttcttttttattgttgcctactgttcttaatttctttaatgtagccaaaggcagaacaactggagcagatatcgcagagtatagcctcagtgctggttaaatttcccaatcttcaggaattgggtaaaagggcttttgttacctatcttaaggcagtatacctccagaaagacaaaaaagtgttcaacctgagcaggttctctgcagagcagtttgctgcatatgctgcttcgcttggtctgcctgttacccccaagatccgcttcataagccacaagaagaatgtgtcgaagaaggatatggaggacattgatatgaaacagatgaaatccagtttggaacatgaagttaccatcactccaaagatcaacattgatttaactttgtgtgatggagatgatgatatcctttatcccaagaagcccactgcagatgctaatatggatgacagacttgatgatgtccttcatcccaaggagtctgccacagatacaaatgtgactggacttgaaagacccttcaaaaagaagaaactgaagataaacgtgaacaggccatcaggaacaagggtcaagtatgatgatgagggcaacgccatcccacctcttgcatctgtcgctgaagaagtatctttagaacctgtggttcacaaggataaaatttcccagcggtatgcagagatgttgagagaaatgcagaaacacgacaaggaggacaagcttgaacacaagaagaccttgcgggagaagaagctgcagaagaagatgaagcttaagcgcaagaggcaggaagacactggagcagggtcagaggaggatagtggatctgaatcagacagaggccaagacacagccaacaaaggtaaaaagaggtacttcaatagcgacgatgaagacaatgacgcagcaaaggacggtgatgttctcgcccagcaggaggcgttggcactgaagctcctgagtaatatgcacagttagctttgggatctgatggtataggttacccttgaatgggggtttgcctattagcgctccagccaggaaggggctgaaattttgaacgtgtcgcggttttttttttctgataaccgggagttaattcccactttcaggcatacgttcatggatgtatgagaaatcagtgtggccgtattaccccaagaaatcggacttagatgaggttttaagtaaaatgcctttgattttaaaattctaaaattgcgtaaaatgattgttacagcatcttgaggactccgatgaaatttactgacaggtgaaaattgcgtggtcatggttccctcggatgtgctcctgaggacagaaatgtgaatggattgttggggacactctgcaatc

SEQ ID NO: 27103 - DNA, 3337 bp, Zea Mays
tactgtagtccagtctccagtctatctactactcgtacttccagtggggcctcgcttgctactgcaagtcctacttccgtctttcctccgccccgttatccattctattctcaccagccatcgcccatctttaaaaaaaaatcttgaacccctcctttgccgactcctctctccagaaggccccaacccatctcatcactcaccgctcccaaggcgagagatctcacctccccattcccaaaccaacccaaacaccaaaattcaaactgacgatcgatccaaaaacgccacaaatcccaccaaatccacctcaaatttgccacaaaatgccccagattggcacccaaaccccgcacccaccgtttcaaatctgacctcgccattcccactcctcccactctacccaccgcatactccagatccccaccgcaatggcgaccgcggtctccaaatccgccgtcaaatcccaccccaggttgcccaccacagcgcagccgccgccgccgaaccccggctccaacgccgcgtcggctggcggaggggcggcgcctccgccgccgccgtctcccgccgccggcgcgacgccgtcgaagaacgcggcgatggcggagctcaagtcgcgcgtgctcgccgcgctcgccaagctctcggaccgcgacacgcaccacatcgccgttgaggagctggaccgcatcatccgcgcgccgccgtcgaccgacgccgtgcccatgctgctcaatgcgctggcacccgactccccggggctcgcctccccggccaggcgcgagtgtctgcgcctcctcgccacgctctgcacgtcgcacccggatgccgccgcgtcgcacctccacaaggtgctcgcccacctcgcgcgtcggctaaaggacccggcgtccgacacttccgtgcgcgacacgtgccgagacgtcgcggggcagctcgcggcagtgtacctccgccctctgtcggcttcaggcgtttgcgaggcgggcaatgcgaccgtgacgctgttcgtgaagccgctgttcgaggtgatgggggagcagagcaaatcggtgcagggcggggcggccgcatgcttggccaaggcggtggaaggggcgggacctgggcccggtgccatcgggatgtttgggaagctcggtcctaggatttgcaagttgctcggtgggcagggcgtgcaagccaaggcgggattactaggcatcatgggaagtttggcgcaggtgggagcaatcagttcccagaatatgcagcagactctgcaaagtatccgcgactgccttgagaacagcgattgggctactagaaaagcagctgctgatacattatctgtctttgctacccattctgttcacttgataggtgacggaacagctccaaccattgctgctctcgaagcttgccgttttgataaggtaaggcctgtcagagatagcatgattgatgcagtacagttgtggaaaaagttgactggagaagatgcaaatgcagatggtagaaataaggatcttgctgatggtgaagggaaactggactcaagaaggtcaatacaaagaggtggaaaatcagaatcctttgatgattcctctccagattcacctagtaacaacgtgaagggcagtagcatagctgaaaaggcagcttttcttttgaagaaaagaccaacattaactgacagggaattgaaccctgagtttttccaaaagctcgagacaagaaaaacagatgacttggcagttgaggttgtagtcccccacaagactctacaatctcacttgcgaggtgaagatgaaacagaagaagatgatgatcctgttggtccagctgacagcaatggatcagctgaagatgaagcaaatctaactcaaatgcgtgctagctttaattttcagaatatccgggataaatgggctggccaaaggggaaatagaaacaaaattacaaaagctaggacaactgatgttgaagataggggcgaacccagtacaaaagattccactgctgcagccatgaacatttctggagaaggccctttcataaataataaaacaaattggttagcaatacagaggcaattgtcacacttggagaggcagcaaactagtctcatgaacatgttgcaggatttcatgggagggtctcatgacagcatggttacattggagaacagagtacgtggtcttgagagagttgttgaggaaatggctagagaaatatcactctcctcaggcaggagaggtggtggtccagcgttgggctttgattcatctcctggcagatcatctaaacacaatggtttccatgaatattctaattcgaaatatggaaggagtggtgatggacggatgggatttgcagaaaggtatttctctgcagatgctatggcttctggtacgaaaaaccaatcttggagaccagattctgaaccatgggactcatatgcttattctggatcaagaagtggtatgaatgtgaggagaggattagattctgtttcatcagacaatagaatggcaagaaatgaacggagtaatgatcaagtgggtccccggagaggttgggacaaaggtcagggaccctttaggttcggtgagggtccttctgcccgaagtgcatggcgggcctcaaaagatgaagcaacactggaagctattagagtagctggtgaagataatggaaattcaagggccgctgcaagagttgctattcctgaactggatggagaagctttgaatgatgacaaccaaggggatgaaagaggcccactttgggaggcctggactcgtgcgatggatgctgttcatcttgaggatatggactctgcttatgctgaacttctttcgactggtgatgctgaattacttgtaaagttgatggagcaaactggaccggtcgttgatcaactttcaaatgaggttgcaaatgaagtcctacatgcagtggggcagtttctcatggaagaaagcttatatgacgtagcattaaactggcttcagcagttgactgatctggtaatggaaaatggctctgattatctcggaatacctctagacgcaaagcaggacgtcttactgggacttcatgaggcgacagcgattgacctgcctgatgactgggagggagcgacaccgttgcagataatgaagcagctagcttcatcctggcacatcgacctacagcaacttatcaattagggcagatgctacgcatttggatatattgcccatatgatgttaggcatcccagagcatcaactctttctgcagagattgtatggtggtgttgggggcctacggttgtggttcagactgcaacacgacgaggttagcagcgg

SEQ ID NO: 27104 - DNA, 1528 bp, Zea Mays
cttgaggttggccaaattaggcctggagataaaatatgcttatgacatattaatgtatgcctatccgagatttcatgggagggtctcatgacagcatggttacattggagaacagagtacgtggtcttgagagagttgttgaggaaatggctagagaaatatcactctcctcaggcaggagaggtggtggtccagcgttgggctttgattcatctcctggcagatcatctaaacacaatggtttccatgaatattctaattcgaaatatggaaggagtggtgatggacggatgggatttgcagaaaggtatttctctgcagatgctatggcttctggtacgaaaaaccaatcttggagaccagattctgaaccatgggactcatatgcttattctggatcaagaagtggtatgaatgtgaggagaggattagattctgtttcatcagacaatagaatggcaagaaatgaacggagtaatgatcaagtgggtccccggagaggttgggacaaaggtcagggaccctttaggttcggtgagggtccttctgcccgaagtgcatggcgggcctcaaaagatgaagcaacactggaagctattagagtagctggtgaagataatggaaattcaagggccgctgcaagagttgctattcctgaactggatggagaagctttgaatgatgacaaccaaggggatgaaagaggcccactttgggaggcctggactcgtgcgatggatgctgttcatcttgaggatatggactctgcttatgctgaacttctttcgactggtgatgctgaattacttgtaaagttgatggagcaaactggaccggtcgttgatcaactttcaaatgaggttgcaaatgaagtcctacatgcagtggggcagtttctcatggaagaaagcttatatgacgtagcattaaactggcttcagcagttgactgatctggtaatggaaaatggctctgattatctcggaatacctctagacgcaaagcaggacgtcttactgggacttcatgaggcgacagcgattgacctgcctgatgactgggagggagcgacaccgttgcagataatgaagcagctagcttcatcctggcacatcgacctacagcaacttatcaattagggtaacattgattaccgacatatgggttaatttcatttgttcgttgcctcttggtcttgtctggcctgttgctattaggattaggaatattatattggttggagtggaagtggcactgtgttgaaatggattggttgtattggggaaatatgatgtggatattgtctcaccttcatctaaaggctttcataattcatagtttgattctccagttatactgtaaaaccttctcacttcatggtggtggtctcttgtatgattatggtgcattggttattacatggaactcaaaatgagtagcaatgcattgtttatttgccaaaaataaattgtctccagcaacacttgtatgcagaaggcagatgctacgcatttggatatattgccca

SEQ ID NO: 27105 - DNA, 3583 bp, Zea Mays
tactgtagtccagtctccagtctatctactactcgtacttccagtggggcctcgcttgctactgcaagtcctacttccgtctttcctccgccccgttatccattctattctcaccagccatcgcccatctttaaaaaaaaatcttgaacccctcctttgccgactcctctctccagaaggccccaacccatctcatcactcaccgctcccaaggcgagagatctcacctccccattcccaaaccaacccaaacaccaaaattcaaactgacgatcgatccaaaaacgccacaaatcccaccaaatccacctcaaatttgccacaaaatgccccagattggcacccaaaccccgcacccaccgtttcaaatctgacctcgccattcccactcctcccactctacccaccgcatactccagatccccaccgcaatggcgaccgcggtctccaaatccgccgtcaaatcccaccccaggttgcccaccacagcgcagccgccgccgccgaaccccggctccaacgccgcgtcggctggcggaggggcggcgcctccgccgccgccgtctcccgccgccggcgcgacgccgtcgaagaacgcggcgatggcggagctcaagtcgcgcgtgctcgccgcgctcgccaagctctcggaccgcgacacgcaccacatcgccgttgaggagctggaccgcatcatccgcgcgccgccgtcgaccgacgccgtgcccatgctgctcaatgcgctggcacccgactccccggggctcgcctccccggccaggcgcgagtgtctgcgcctcctcgccacgctctgcacgtcgcacccggatgccgccgcgtcgcacctccacaaggtgctcgcccacctcgcgcgtcggctaaaggacccggcgtccgacacttccgtgcgcgacacgtgccgagacgtcgcggggcagctcgcggcagtgtacctccgccctctgtcggcttcaggcgtttgcgaggcgggcaatgcgaccgtgacgctgttcgtgaagccgctgttcgaggtgatgggggagcagagcaaatcggtgcagggcggggcggccgcatgcttggccaaggcggtggaaggggcgggacctgggcccggtgccatcgggatgtttgggaagctcggtcctaggatttgcaagttgctcggtgggcagggcgtgcaagccaaggcgggattactaggcatcatgggaagtttggcgcaggtgggagcaatcagttcccagaatatgcagcagactctgcaaagtatccgcgactgccttgagaacagcgattgggctactagaaaagcagctgctgatacattatctgtctttgctacccattctgttcacttgataggtgacggaacagctccaaccattgctgctctcgaagcttgccgttttgataaggtaaggcctgtcagagatagcatgattgatgcagtacagttgtggaaaaagttgactggagaagatgcaaatgatggtagaaataaggatcttgctgatggtgaagggaaactggactcaagaaggtcaatacaaagaggtggaaaatcagaatcctttgatgattcctctccagattcacctagtaacaacgtgaagggcagtagcatagctgaaaaggcagcttttcttttgaagaaaagaccaacattaactgacagggaattgaaccctgagtttttccaaaagctcgagacaagaaaaacagatgacttggcagttgaggttgtagtcccccacaagactctacaatctcacttgcgaggtgaagatgaaacagaagaagatgatgatcctgttggtccagctgacagcaatggatcagctgaagatgaagcaaatctaactcaaatgcgtgctagctttaattttcagaatatccgggataaatgggctggccaaaggggaaatagaaacaaaattacaaaagctaggacaactgatgttgaagataggggcgaacccagtacaaaagattccactgctgcagccatgaacatttctggagaaggccctttcataaataataaaacaaattggttagcaatacagaggcaattgtcacacttggagaggcagcaaactagtctcatgaacatgttgcaggatttcatgggagggtctcatgacagcatggttacattggagaacagagtacgtggtcttgagagagttgttgaggaaatggctagagaaatatcactctcctcaggcaggagaggtggtggtccagcgttgggctttgattcatctcctggcagatcatctaaacacaatggtttccatgaatattctaattcgaaatatggaaggagtggtgatggacggatgggatttgcagaaaggtatttctctgcagatgctatggcttctggtacgaaaaaccaatcttggagaccagattctgaaccatgggactcatatgcttattctggatcaagaagtggtatgaatgtgaggagaggattagattctgtttcatcagacaatagaatggcaagaaatgaacggagtaatgatcaagtgggtccccggagaggttgggacaaaggtcagggaccctttaggttcggtgagggtccttctgcccgaagtgcatggcgggcctcaaaagatgaagcaacactggaagctattagagtagctggtgaagataatggaaattcaagggccgctgcaagagttgctattcctgaactggatggagaagctttgaatgatgacaaccaaggggatgaaagaggcccactttgggaggcctggactcgtgcgatggatgctgttcatcttgaggatatggactctgcttatgctgaacttctttcgactggtgatgctgaattacttgtaaagttgatggagcaaactggaccggtcgttgatcaactttcaaatgaggttgcaaatgaagtcctacatgcagtggggcagtttctcatggaagaaagcttatatgacgtagcattaaactggcttcagcagttgactgatctggtaatggaaaatggctctgattatctcggaatacctctagacgcaaagcaggacgtcttactgggacttcatgaggcgacagcgattgacctgcctgatgactgggagggagcgacaccgttgcagataatgaagcagctagcttcatcctggcacatcgacctacagcaacttatcaattagggtaacattgattaccgacatatgggttaatttcatttgttcgttgcctcttggtcttgtctggcctgttgctattaggattaggaatattatattggttggagtggaagtggcactgtgttgaaatggattggttgtattggggaaatatgatgtggatattgtctcaccttcatctaaaggctttcataattcatagtttgattctccagttatactgtaaaaccttctcacttcatggtggtggtctcttgtatgattatggtgcattggttattacatggaactcaaaatgagtagcaatgcattgtttatttgccaaaaataaattgtctccagcaacacttgtatgcagaaggcagatgctacgcatttggatatattgccca

SEQ ID NO: 27106 - DNA, 3550 bp, Zea Mays
tactgtagtccagtctccagtctatctactactcgtacttccagtggggcctcgcttgctactgcaagtcctacttccgtctttcctccgccccgttatccattctattctcaccagccatcgcccatctttaaaaaaaaatcttgaacccctcctttgccgactcctctctccagaaggccccaacccatctcatcactcaccgctcccaaggcgagagatctcacctccccattcccaaaccaacccaaacaccaaaattcaaactgacgatcgatccaaaaacgccacaaatcccaccaaatccacctcaaatttgccacaaaatgccccagattggcacccaaaccccgcacccaccgtttcaaatctgacctcgccattcccactcctcccactctacccaccgcatactccagatccccaccgcaatggcgaccgcggtctccaaatccgccgtcaaatcccaccccaggttgcccaccacagcgcagccgccgccgccgaaccccggctccaacgccgcgtcggctggcggaggggcggcgcctccgccgccgccgtctcccgccgccggcgcgacgccgtcgaagaacgcggcgatggcggagctcaagtcgcgcgtgctcgccgcgctcgccaagctctcggaccgcgacacgcaccacatcgccgttgaggagctggaccgcatcatccgcgcgccgccgtcgaccgacgccgtgcccatgctgctcaatgcgctggcacccgactccccggggctcgcctccccggccaggcgcgagtgtctgcgcctcctcgccacgctctgcacgtcgcacccggatgccgccgcgtcgcacctccacaaggtgctcgcccacctcgcgcgtcggctaaaggacccggcgtccgacacttccgtgcgcgacacgtgccgagacgtcgcggggcagctcgcggcagtgtacctccgccctctgtcggcttcaggcgtttgcgaggcgggcaatgcgaccgtgacgctgttcgtgaagccgctgttcgaggtgatgggggagcagagcaaatcggtgcagggcggggcggccgcatgcttggccaaggcggtggaaggggcgggacctgggcccggtgccatcgggatgtttgggaagctcggtcctaggatttgcaagttgctcggtgggcagggcgtgcaagccaaggcgggattactaggcatcatgggaagtttggcgcaggtgggagcaatcagttcccagaatatgcagcagactctgcaaagtatccgcgactgccttgagaacagcgattgggctactagaaaagcagctgctgatacattatctgtctttgctacccattctgttcacttgataggtgacggaacagctccaaccattgctgctctcgaagcttgccgttttgataaggtaaggcctgtcagagatagcatgattgatgcagtacagttgtggaaaaagttgactggagaagatgcaaatgggaaactggactcaagaaggtcaatacaaagaggtggaaaatcagaatcctttgatgattcctctccagattcacctagtaacaacgtgaagggcagtagcatagctgaaaaggcagcttttcttttgaagaaaagaccaacattaactgacagggaattgaaccctgagtttttccaaaagctcgagacaagaaaaacagatgacttggcagttgaggttgtagtcccccacaagactctacaatctcacttgcgaggtgaagatgaaacagaagaagatgatgatcctgttggtccagctgacagcaatggatcagctgaagatgaagcaaatctaactcaaatgcgtgctagctttaattttcagaatatccgggataaatgggctggccaaaggggaaatagaaacaaaattacaaaagctaggacaactgatgttgaagataggggcgaacccagtacaaaagattccactgctgcagccatgaacatttctggagaaggccctttcataaataataaaacaaattggttagcaatacagaggcaattgtcacacttggagaggcagcaaactagtctcatgaacatgttgcaggatttcatgggagggtctcatgacagcatggttacattggagaacagagtacgtggtcttgagagagttgttgaggaaatggctagagaaatatcactctcctcaggcaggagaggtggtggtccagcgttgggctttgattcatctcctggcagatcatctaaacacaatggtttccatgaatattctaattcgaaatatggaaggagtggtgatggacggatgggatttgcagaaaggtatttctctgcagatgctatggcttctggtacgaaaaaccaatcttggagaccagattctgaaccatgggactcatatgcttattctggatcaagaagtggtatgaatgtgaggagaggattagattctgtttcatcagacaatagaatggcaagaaatgaacggagtaatgatcaagtgggtccccggagaggttgggacaaaggtcagggaccctttaggttcggtgagggtccttctgcccgaagtgcatggcgggcctcaaaagatgaagcaacactggaagctattagagtagctggtgaagataatggaaattcaagggccgctgcaagagttgctattcctgaactggatggagaagctttgaatgatgacaaccaaggggatgaaagaggcccactttgggaggcctggactcgtgcgatggatgctgttcatcttgaggatatggactctgcttatgctgaacttctttcgactggtgatgctgaattacttgtaaagttgatggagcaaactggaccggtcgttgatcaactttcaaatgaggttgcaaatgaagtcctacatgcagtggggcagtttctcatggaagaaagcttatatgacgtagcattaaactggcttcagcagttgactgatctggtaatggaaaatggctctgattatctcggaatacctctagacgcaaagcaggacgtcttactgggacttcatgaggcgacagcgattgacctgcctgatgactgggagggagcgacaccgttgcagataatgaagcagctagcttcatcctggcacatcgacctacagcaacttatcaattagggtaacattgattaccgacatatgggttaatttcatttgttcgttgcctcttggtcttgtctggcctgttgctattaggattaggaatattatattggttggagtggaagtggcactgtgttgaaatggattggttgtattggggaaatatgatgtggatattgtctcaccttcatctaaaggctttcataattcatagtttgattctccagttatactgtaaaaccttctcacttcatggtggtggtctcttgtatgattatggtgcattggttattacatggaactcaaaatgagtagcaatgcattgtttatttgccaaaaataaattgtctccagcaacacttgtatgcagaaggcagatgctacgcatttggatatattgccca

SEQ ID NO: 27107 - DNA, 511 bp, Zea Mays
ggccgcggctgcctgcggcgccgccaccttggtggagtccagctcccttgtcatgagcgagccgatggtgcccgttgtgcctaccttgaccgtgcctccctcgccatggacgagctcggtggcggcgcaaggcatggtctgggactgggactgggactggagctggaggaacggaggggccgcagacttctgctcttctgcgcagaattgaagtcaagtgagggcctgctgccgtgacttgaggagcgcaactctcctcgtgtcccccctctgccttgtaaatgctgctgccccttcttcctcctcggggttggggagcctcctctgaccacatttgtcttcactagatgtcctgtcacatcgtgcgtgaaccgttttttttgttttgcctttatttatttaacaggccggcttagtatatactgtttggaaaaggttgtgaaaggccgtcttacattttttttttctaattctacgtacatgtgtcgctgcgaaggtatctttcttcttc

SEQ ID NO: 27108 - DNA, 4555 bp, Zea Mays
tggaggtctagaaatttatcgatgagcacatgtacgtttcgattcattttaggatcggatttctatcgtgcttaaacagttaactgcgtacatacatatggaaaagagtgatagactataaaaacgatttgtatatttcagcttgttttgaaataagttcgtaaaaacccccaacgaaaataccaaataaacccagaaaaaaaagaaattacacaggaacaaaaaaagaaacgaaccaaacaagcgcaggcgcaaacgcctcccttcttccgttcccttcctcctccggccctccggggcgccctccctcggtctctcccgcgtctcgagctgtcgacgtcgccgtcctcgcaccgctcccttctccggcacccgagccgtagccctgccctccgcatccacaatttgatgcggtgggcgcggccgccatgtcgtggggcctggcctggaagcgcagctccgagatcttccacctcacgctcaactacggtgactacgacgacaacgacgaccgccaaccctcgtcaccgccccctccggcgtcctcttcccctcccgcctctgcatcgtcgacccctgtatactcctcctcgcccattgccacccgcaacggcgaccttggcttccgcatcgagcttgactggtcggcgggggacgacgaggatcaggtcgcgctccgcctccagtcccagctcatggtcgcgctgcccccgccccacgacgccgtctccgtcgatctgaccccgagggaccacggggaggaggaaggggtgcggatcgaaatgcgtgtggtcaggaggcgggaggcgctccggtccgtgcgcgtgtcgcgggcccctgggtctgcgctgggcagcggcgatggcgcgggggtgctcgcacgcctcatcagatccaacctcgcgcccgcgcctgccgtggatggccccacagccgcctcgggcgtgcccgtgcttgcggatcactggcgccccatcaccatggtcagcctatgcaactgcggaatgtcgatgcttccagttgagttaactcgccttcaatttcttgagaagttatatcttgacaacaataaattgtcagttttgccccctgaagttggtgctttgaagaatatgaaagtgctgtcatttaacaacaacatgctagtttctgtccctgcagtagaactgcggcaatgtgttatgctggaggaattatcattagaacataacaagcttgtccggcctctattggatttcaggtcaatgcccaagctccgaattttgcgcttgtttggaaatcctctagagttccttccagaaattttgccattgcataacctcaggcatgtcacacttgcaaatattagaattgaagcagtggaaagtcttaaatctgtcactgtacagatagaggttgagcaagcatgtcttgctatctcatcactggcatctgatatttcttcagcaatgcagctgattaagtgtgacattatgaagcctattgaagctgtactaaaatcatctgatgaagaagaactagtatcagtattgcaagttgtagtcaccttaactttcgtttctgatcatgttgctcaaaaggtgcaacgtctatctctgtttgcaattggcaatttggctttctgtttggagactcgtcgcatcctcatgcattctgaaagcatgtgtgacctgttaatccgattaactatttcacaagagtgtcgtgtcagcaaggcagctgcgcgcgctttggcaatcctaggggagaatgagaacttacgtcgagcaataagaggaaggccagttgcaaagaagggtctacgcatcctatcaatggatggtggtggcatgaaaggccttgcaactgttcaaatgcttaaacagatagagcaaggaactgggaaacgcatacatgaaatgtttgacctcatatgtggtacatccactggtggcatgcttgcaatggctcttgggatcaagcagatgactttggatcagtgtgaagaaatatacacaaaacttggatgaagctgctacgtggaaggagaagattgatcaacttttcaaaagttcctcacaaagttttagagtggttgtacatgggtccaagcacagtgcagatcaatttgagaggttactaaaggaaatgtgcgagaatgaagatggtgaccttctaattgaatctgctgtaaaaggcattccgaaggtctttgctgtatccactttagtcagtgtcattcctgctcaaccgtatatattccgaaactatcagtatcctcctggcactctggaggtatcaccaggaatggcagaaagtccatcaattggtgcaattggcacggctgtttctggtgcaccagttggtattaaacgtggtgccttcatggggagctgcaagcatcgcgtgtgggaagccataagagcatcgtctgcagcaccatattatctggatgatttctctgtagatgcaaatcgttggcaagatggagctattgtagccaacaatcctacaatctttgccattagagaagcacaacttttgtggccagatgcacgaatagattgtctagtctcgataggatgtggctcagttccaactaagagtcgccgaggtggatggcgctacttggacacagggcaagtgttaatagaaagtgcatgctcagtggagagagttgaagaaactttggatacactgataccgatgcttcctgaaatgcaatatttccgctttaatccagtggatgaacggtgtggtatggagttagatgaaactgatcctactatctggctgaagttggaagctgcaactgatgagtacattcagaagaactttctgtctgtcaagaatctttgtgagcttctggtcccaaggtaccaagaggaagaaaagccatcagatatttacaaatctctttcattttcaagactgacatcgttaaatcaaggtttcagtgaaagtaatcctatcttaggatggaggcgtgtggttttacttgtagaggcttcatttagtcctgattttggaaagaaaataaatcatgcacgttcccttgaatccttctgctcccagaatggtattaggttagctctaatgaatagcacttctgggtttgggaagccagccactgcacttcctaccccaataacttctcccttgtttactggaagtttcccatctagtccacttctatatagtccagagggcactcaacggatcagtcgaattgacctagttcctccacttagtttggatggccacccaactacaaagtcctcacctccaacatcaccattgaagtcaagacagccatctgcacatgttcggtcattgtatgataaactgcagaatatgcctcaagttggtgtgatacacttggctcttcaaaatgattcaactggttcagtattgagttggcagaatgatgtatttgtggtcgctgaacccggggaacttgcagacaggtttctgcaatctgtcaaaactatcttgtcaaccttgttgcgtgggtgtaatagaaagggtgcatattccctgtccaagatttcatgtttatctgagttggttgctgaatggccatcttttgaaatcggtgggatacaccaccgctatataggtcgacaaacacaagtaatggaagataaccaagaaattggcgcatatatgtttaggaggacagtgcctgctgttcacatggcacctgaagatgttcgatggatggttggagcatggagggagaggattatcatatgcagtggtaagtatggccttgctcatggcctggtcaaggcattcatggattgtggtgccaaagcagtcatctcgtcgtccatcgagcctccggattccaagacaatagtctaccatgggatggatgtcaatagaagcctagagaatggcaagtttgtcatccgtgatgaagaagcggacgaatcagagcctgaacctgtcagccctataagcgactgggaggacagtgatgtggagaaaggcggcaaccatgacgtggatgatgaggagtacctggctcagttcatgtgcctgatgtatgacaaattgttccgtgagggtgtgactgtggatacggctctgcagcaagcactccgctcacatcccaagttgaagtacagctgccacttacccaacgttttgtagttagggacattattgacaaaccatacataagtatagcaaaatggacatggataacagggaatgaataaggattgggtggattttttagttgggttatagaggtctatactttgttcgttgtgcaggcatggtgacagaataaaagcatgaaggcattgcactgcatgtgcatttttgctgtagttgtgagaacgggcattttgtttcgcaaatactatgctgacttttgacgttcagttgctagtttgcggctaacactaaggctcgctccatttaagtactgcttacacattagttgttgccctcctataactgtttatatattataaagcagaaaaaaaatagaagatctaatcaaggtgctcttgcacctacagttgaacacatcatccatacacagagcgcaacagcagtttcc

SEQ ID NO: 27109 - DNA, 4803 bp, Zea Mays
tggaggtctagaaatttatcgatgagcacatgtacgtttcgattcattttaggatcggatttctatcgtgcttaaacagttaactgcgtacatacatatggaaaagagtgatagactataaaaacgatttgtatatttcagcttgttttgaaataagttcgtaaaaacccccaacgaaaataccaaataaacccagaaaaaaaagaaattacacaggaacaaaaaaagaaacgaaccaaacaagcgcaggcgcaaacgcctcccttcttccgttcccttcctcctccggccctccggggcgccctccctcggtctctcccgcgtctcgagctgtcgacgtcgccgtcctcgcaccgctcccttctccggcacccgagccgtagccctgccctccgcatccacaatttgatgcggtgggcgcggccgccatgtcgtggggcctggcctggaagcgcagctccgagatcttccacctcacgctcaactacggtgactacgacgacaacgacgaccgccaaccctcgtcaccgccccctccggcgtcctcttcccctcccgcctctgcatcgtcgacccctgtatactcctcctcgcccattgccacccgcaacggcgaccttggcttccgcatcgagcttgactggtcggcgggggacgacgaggatcaggtcgcgctccgcctccagtcccagctcatggtcgcgctgcccccgccccacgacgccgtctccgtcgatctgaccccgagggaccacggggaggaggaaggggtgcggatcgaaatgcgtgtggtcaggaggcgggaggcgctccggtccgtgcgcgtgtcgcgggcccctgggtctgcgctgggcagcggcgatggcgcgggggtgctcgcacgcctcatcagatccaacctcgcgcccgcgcctgccgtggatggccccacagccgcctcgggcgtgcccgtgcttgcggatcactggcgccccatcaccatggtcagcctatgcaactgcggaatgtcgatgcttccagttgagttaactcgccttcaatttcttgagaagttatatcttgacaacaataaattgtcagttttgccccctgaagttggtgctttgaagaatatgaaagtgctgtcatttaacaacaacatgctagtttctgtccctgcagtagaactgcggcaatgtgttatgctggaggaattatcattagaacataacaagcttgtccggcctctattggatttcaggtcaatgcccaagctccgaattttgcgcttgtttggaaatcctctagagttccttccagaaattttgccattgcataacctcaggcatgtcacacttgcaaatattagaattgaagcagtggaaagtcttaaatctgtcactgtacagatagagactgagaatagttcctacttcattgcggccaggcacaaacttagtgcctttttctctctagttttccgtttctcttcctgtcaccatcctttgctagcttctgctttggtcaaaataatggaagatcgtagcaaccacattgcaattagcaaagaagagaatgctgtcaggcagcttataagcatgataagcagtgataatcgtcatgtggttgagcaagcatgtcttgctatctcatcactggcatctgatatttcttcagcaatgcagctgattaagtgtgacattatgaagcctattgaagctgtactaaaatcatctgatgaagaagaactagtatcagtattgcaagttgtagtcaccttaactttcgtttctgatcatgttgctcaaaaggtgttgacaaaggatgtgttgaagtcattgaaagcactttgcgcacacaagaactctgaggtgcaacgtctatctctgtttgcaattggcaatttggctttctgtttggagactcgtcgcatcctcatgcattctgaaagcatgtgtgacctgttaatccgattaactatttcacaagagtgtcgtgtcagcaaggcagctgcgcgcgctttggcaatcctaggggagaatgagaacttacgtcgagcaataagaggaaggccagttgcaaagaagggtctacgcatcctatcaatggatggtggtggcatgaaaggccttgcaactgttcaaatgcttaaacagatagagcaaggaactgggaaacgcatacatgaaatgtttgacctcatatgtggtacatccactggtggcatgcttgcaatggctcttgggatcaagcagatgactttggatcagtgtgaagaaatatacacaaaacttggaaaacttgtatttactgaacctatcccaaaggatgaagctgctacgtggaaggagaagattgatcaacttttcaaaagttcctcacaaagttttagagtggttgtacatgggtccaagcacagtgcagatcaatttgagaggttactaaaggaaatgtgcgagaatgaagatggtgaccttctaattgaatctgctgtaaaaggcattccgaaggtctttgctgtatccactttagtcagtgtcattcctgctcaaccgtatatattccgaaactatcagtatcctcctggcactctggaggtatcaccaggaatggcagaaagtccatcaattggtgcaattggcacggctgtttctggtgcaccagttggtattaaacgtggtgccttcatggggagctgcaagcatcgcgtgtgggaagccataagagcatcgtctgcagcaccatattatctggatgatttctctgtagatgcaaatcgttggcaagatggagctattgtagccaacaatcctacaatctttgccattagagaagcacaacttttgtggccagatgcacgaatagattgtctagtctcgataggatgtggctcagttccaactaagagtcgccgaggtggatggcgctacttggacacagggcaagtgttaatagaaagtgcatgctcagtggagagagttgaagaaactttggatacactgataccgatgcttcctgaaatgcaatatttccgctttaatccagtggatgaacggtgtggtatggagttagatgaaactgatcctactatctggctgaagttggaagctgcaactgatgagtacattcagaagaactttctgtctgtcaagaatctttgtgagcttctggtcccaaggtaccaagaggaagaaaagccatcagatatttacaaatctctttcattttcaagactgacatcgttaaatcaagaggcttcatttagtcctgattttggaaagaaaataaatcatgcacgttcccttgaatccttctgctcccagaatggtattaggttagctctaatgaatagcacttctgggtttgggaagccagccactgcacttcctaccccaataacttctcccttgtttactggaagtttcccatctagtccacttctatatagtccagagggcactcaacggatcagtcgaattgacctagttcctccacttagtttggatggccacccaactacaaagtcctcacctccaacatcaccattgaagtcaagacagccatctgcacatgttcggtcattgtatgataaactgcagaatatgcctcaagttggtgtgatacacttggctcttcaaaatgattcaactggttcagtattgagttggcagaatgatgtatttgtggtcgctgaacccggggaacttgcagacaggtttctgcaatctgtcaaaactatcttgtcaaccttgttgcgtgggtgtaatagaaagggtgcatattccctgtccaagatttcatgtttatctgagttggttgctgaatggccatcttttgaaatcggtgggatacaccaccgctatataggtcgacaaacacaagtaatggaagataaccaagaaattggcgcatatatgtttaggaggacagtgcctgctgttcacatggcacctgaagatgttcgatggatggttggagcatggagggagaggattatcatatgcagtggtaagtatggccttgctcatggcctggtcaaggcattcatggattgtggtgccaaagcagtcatctcgtcgtccatcgagcctccggattccaagacaatagtctaccatgggatggatgtcaatagaagcctagagaatggcaagtttgtcatccgtgatgaagaagcggacgaatcagagcctgaacctgtcagccctataagcgactgggaggacagtgatgtggagaaaggcggcaaccatgacgtggatgatgaggagtacctggctcagttcatgtgcctgatgtatgacaaattgttccgtgagggtgtgactgtggatacggctctgcagcaagcactccgctcacatcccaagttgaagtacagctgccacttacccaacgttttgtagttagggacattattgacaaaccatacataagtatagcaaaatggacatggataacagggaatgaataaggattgggtggattttttagttgggttatagaggtctatactttgttcgttgtgcaggcatggtgacagaataaaagcatgaaggcattgcactgcatgtgcatttttgctgtagttgtgagaacgggcattttgtttcgcaaatactatgctgacttttgacgttcagttgctagtttgcggctaacactaaggctcgctccatttaagtactgcttacacattagttgttgccctcctataactgtttatatattataaagcagaaaaaaaatagaagatctaatcaaggtgctcttgcacctacagttgaacacatcatccatacacagagcgcaacagcagtttcc

SEQ ID NO: 27110 - DNA, 4429 bp, Zea Mays
tggaggtctagaaatttatcgatgagcacatgtacgtttcgattcattttaggatcggatttctatcgtgcttaaacagttaactgcgtacatacatatggaaaagagtgatagactataaaaacgatttgtatatttcagcttgttttgaaataagttcgtaaaaacccccaacgaaaataccaaataaacccagaaaaaaaagaaattacacaggaacaaaaaaagaaacgaaccaaacaagcgcaggcgcaaacgcctcccttcttccgttcccttcctcctccggccctccggggcgccctccctcggtctctcccgcgtctcgagctgtcgacgtcgccgtcctcgcaccgctcccttctccggcacccgagccgtagccctgccctccgcatccacaatttgatgcggtgggcgcggccgccatgtcgtggggcctggcctggaagcgcagctccgagatcttccacctcacgctcaactacggtgactacgacgacaacgacgaccgccaaccctcgtcaccgccccctccggcgtcctcttcccctcccgcctctgcatcgtcgacccctgtatactcctcctcgcccattgccacccgcaacggcgaccttggcttccgcatcgagcttgactggtcggcgggggacgacgaggatcaggtcgcgctccgcctccagtcccagctcatggtcgcgctgcccccgccccacgacgccgtctccgtcgatctgaccccgagggaccacggggaggaggaaggggtgcggatcgaaatgcgtgtggtcaggaggcgggaggcgctccggtccgtgcgcgtgtcgcgggcccctgggtctgcgctgggcagcggcgatggcgcgggggtgctcgcacgcctcatcagatccaacctcgcgcccgcgcctgccgtggatggccccacagccgcctcgggcgtgcccgtgcttgcggatcactggcgccccatcaccatggtcagcctatgcaactgcggaatgtcggtcaatgcccaagctccgaattttgcgcttgtttggaaatcctctagagttccttccagaaattttgccattgcataacctcaggcatgtcacacttgcaaatattagaattgaagcagtggaaagtcttaaatctgtcactgtacagatagaggttgagcaagcatgtcttgctatctcatcactggcatctgatatttcttcagcaatgcagctgattaagtgtgacattatgaagcctattgaagctgtactaaaatcatctgatgaagaagaactagtatcagtattgcaagttgtagtcaccttaactttcgtttctgatcatgttgctcaaaaggtgcaacgtctatctctgtttgcaattggcaatttggctttctgtttggagactcgtcgcatcctcatgcattctgaaagcatgtgtgacctgttaatccgattaactatttcacaagagtgtcgtgtcagcaaggcagctgcgcgcgctttggcaatcctaggggagaatgagaacttacgtcgagcaataagaggaaggccagttgcaaagaagggtctacgcatcctatcaatggatggtggtggcatgaaaggccttgcaactgttcaaatgcttaaacagatagagcaaggaactgggaaacgcatacatgaaatgtttgacctcatatgtggtacatccactggtggcatgcttgcaatggctcttgggatcaagcagatgactttggatcagtgtgaagaaatatacacaaaacttggtgattcccttttgccttttgaagtttccttgccaatgccaatgttgccaactgaacttttaattttcctaggaaaacttgtatttactgaacctatcccaaaggatgaagctgctacgtggaaggagaagattgatcaacttttcaaaagttcctcacaaagttttagagtggttgtacatgggtccaagcacagtgcagatcaatttgagaggttactaaaggaaatgtgcgagaatgaagatggtgaccttctaattgaatctgctgtaaaaggcattccgaaggtctttgctgtatccactttagtcagtgtcattcctgctcaaccgtatatattccgaaactatcagtatcctcctggcactctggaggtatcaccaggaatggcagaaagtccatcaattggtgcaattggcacggctgtttctggtgcaccagttggtattaaacgtggtgccttcatggggagctgcaagcatcgcgtgtgggaagccataagagcatcgtctgcagcaccatattatctggatgatttctctgtagatgcaaatcgttggcaagatggagctattgtagccaacaatcctacaatctttgccattagagaagcacaacttttgtggccagatgcacgaatagattgtctagtctcgataggatgtggctcagttccaactaagagtcgccgaggtggatggcgctacttggacacagggcaagtgttaatagaaagtgcatgctcagtggagagagttgaagaaactttggatacactgataccgatgcttcctgaaatgcaatatttccgctttaatccagtggatgaacggtgtggtatggagttagatgaaactgatcctactatctggctgaagttggaagctgcaactgatgagtacattcagaagaactttctgtctgtcaagaatctttgtgagcttctggtcccaaggtaccaagaggaagaaaagccatcagatatttacaaatctctttcattttcaagactgacatcgttaaatcaaggtttcagtgaaagtaatcctatcttaggatggaggcgtgtggttttacttgtagaggcttcatttagtcctgattttggaaagaaaataaatcatgcacgttcccttgaatccttctgctcccagaatggtattaggttagctctaatgaatagcacttctgggtttgggaagccagccactgcacttcctaccccaataacttctcccttgtttactggaagtttcccatctagtccacttctatatagtccagagggcactcaacggatcagtcgaattgacctagttcctccacttagtttggatggccacccaactacaaagtcctcacctccaacatcaccattgaagtcaagacagccatctgcacatgttcggtcattgtatgataaactgcagaatatgcctcaagttggtgtgatacacttggctcttcaaaatgattcaactggttcagtattgagttggcagaatgatgtatttgtggtcgctgaacccggggaacttgcagacaggtttctgcaatctgtcaaaactatcttgtcaaccttgttgcgtgggtgtaatagaaagggtgcatattccctgtccaagatttcatgtttatctgagttggttgctgaatggccatcttttgaaatcggtgggatacaccaccgctatataggtcgacaaacacaagtaatggaagataaccaagaaattggcgcatatatgtttaggaggacagtgcctgctgttcacatggcacctgaagatgttcgatggatggttggagcatggagggagaggattatcatatgcagtggtaagtatggccttgctcatggcctggtcaaggcattcatggattgtggtgccaaagcagtcatctcgtcgtccatcgagcctccggattccaagacaatagtctaccatgggatggatgtcaatagaagcctagagaatggcaagtttgtcatccgtgatgaagaagcggacgaatcagagcctgaacctgtcagccctataagcgactgggaggacagtgatgtggagaaaggcggcaaccatgacgtggatgatgaggagtacctggctcagttcatgtgcctgatgtatgacaaattgttccgtgagggtgtgactgtggatacggctctgcagcaagcactccgctcacatcccaagttgaagtacagctgccacttacccaacgttttgtagttagggacattattgacaaaccatacataagtatagcaaaatggacatggataacagggaatgaataaggattgggtggattttttagttgggttatagaggtctatactttgttcgttgtgcaggcatggtgacagaataaaagcatgaaggcattgcactgcatgtgcatttttgctgtagttgtgagaacgggcattttgtttcgcaaatactatgctgacttttgacgttcagttgctagtttgcggctaacactaaggctcgctccatttaagtactgcttacacattagttgttgccctcctataactgtttatatattataaagcagaaaaaaaatagaagatctaatcaaggtgctcttgcacctacagttgaacacatcatccatacacagagcgcaacagcagtttcc

SEQ ID NO: 27111 - DNA, 4847 bp, Zea Mays
tggaggtctagaaatttatcgatgagcacatgtacgtttcgattcattttaggatcggatttctatcgtgcttaaacagttaactgcgtacatacatatggaaaagagtgatagactataaaaacgatttgtatatttcagcttgttttgaaataagttcgtaaaaacccccaacgaaaataccaaataaacccagaaaaaaaagaaattacacaggaacaaaaaaagaaacgaaccaaacaagcgcaggcgcaaacgcctcccttcttccgttcccttcctcctccggccctccggggcgccctccctcggtctctcccgcgtctcgagctgtcgacgtcgccgtcctcgcaccgctcccttctccggcacccgagccgtagccctgccctccgcatccacaatttgatgcggtgggcgcggccgccatgtcgtggggcctggcctggaagcgcagctccgagatcttccacctcacgctcaactacggtgactacgacgacaacgacgaccgccaaccctcgtcaccgccccctccggcgtcctcttcccctcccgcctctgcatcgtcgacccctgtatactcctcctcgcccattgccacccgcaacggcgaccttggcttccgcatcgagcttgactggtcggcgggggacgacgaggatcaggtcgcgctccgcctccagtcccagctcatggtcgcgctgcccccgccccacgacgccgtctccgtcgatctgaccccgagggaccacggggaggaggaaggggtgcggatcgaaatgcgtgtggtcaggaggcgggaggcgctccggtccgtgcgcgtgtcgcgggcccctgggtctgcgctgggcagcggcgatggcgcgggggtgctcgcacgcctcatcagatccaacctcgcgcccgcgcctgccgtggatggccccacagccgcctcgggcgtgcccgtgcttgcggatcactggcgccccatcaccatggtcagcctatgcaactgcggaatgtcgatgcttccagttgagttaactcgccttcaatttcttgagaagttatatcttgacaacaataaattgtcagttttgccccctgaagttggtgctttgaagaatatgaaagtgctgtcatttaacaacaacatgctagtttctgtccctgcagtagaactgcggcaatgtgttatgctggaggaattatcattagaacataacaagcttgtccggcctctattggatttcaggtcaatgcccaagctccgaattttgcgcttgtttggaaatcctctagagttccttccagaaattttgccattgcataacctcaggcatgtcacacttgcaaatattagaattgaagcagtggaaagtcttaaatctgtcactgtacagatagagactgagaatagttcctacttcattgcggccaggcacaaacttagtgcctttttctctctagttttccgtttctcttcctgtcaccatcctttgctagcttctgctttggtcaaaataatggaagatcgtagcaaccacattgcaattagcaaagaagagaatgctgtcaggcagcttataagcatgataagcagtgataatcgtcatgtggttgagcaagcatgtcttgctatctcatcactggcatctgatatttcttcagcaatgcagctgattaagtgtgacattatgaagcctattgaagctgtactaaaatcatctgatgaagaagaactagtatcagtattgcaagttgtagtcaccttaactttcgtttctgatcatgttgctcaaaaggtgttgacaaaggatgtgttgaagtcattgaaagcactttgcgcacacaagaactctgaggtgcaacgtctatctctgtttgcaattggcaatttggctttctgtttggagactcgtcgcatcctcatgcattctgaaagcatgtgtgacctgttaatccgattaactatttcacaagagtgtcgtgtcagcaaggcagctgcgcgcgctttggcaatcctaggggagaatgagaacttacgtcgagcaataagaggaaggccagttgcaaagaagggtctacgcatcctatcaatggatggtggtggcatgaaaggccttgcaactgttcaaatgcttaaacagatagagcaaggaactgggaaacgcatacatgaaatgtttgacctcatatgtggtacatccactggtggcatgcttgcaatggctcttgggatcaagcagatgactttggatcagtgtgaagaaatatacacaaaacttggaaaacttgtatttactgaacctatcccaaaggatgaagctgctacgtggaaggagaagattgatcaacttttcaaaagttcctcacaaagttttagagtggttgtacatgggtccaagatcaatttgagaggttactaaaggaaatgtgcgagaatgaagatggtgaccttctaattgaatctgctgtaaaaggcattccgaaggtctttgctgtatccactttagtcagtgtcattcctgctcaaccgtatatattccgaaactatcagtatcctcctggcactctggaggtatcaccaggaatggcagaaagtccatcaattggtgcaattggcacggctgtttctggtgcaccagttggtattaaacgtggtgccttcatggggagctgcaagcatcgcgtgtgggaagccataagagcatcgtctgcagcaccatattatctggatgatttctctgtagatgcaaatcgttggcaagatggagctattgtagccaacaatcctacaatctttgccattagagaagcacaacttttgtggccagatgcacgaatagattgtctagtctcgataggatgtggctcagttccaactaagagtcgccgaggtggatggcgctacttggacacagggcaagtgttaatagaaagtgcatgctcagtggagagagttgaagaaactttggatacactgataccgatgcttcctgaaatgcaatatttccgctttaatccagtggatgaacggtgtggtatggagttagatgaaactgatcctactatctggctgaagttggaagctgcaactgatgagtacattcagaagaactttctgtctgtcaagaatctttgtgagcttctggtcccaaggtaccaagaggaagaaaagccatcagatatttacaaatctctttcattttcaagactgacatcgttaaatcaaggtttcagtgaaagtaatcctatcttaggatggaggcgtgtggttttacttgtagaggcttcatttagtcctgattttggaaagaaaataaatcatgcacgttcccttgaatccttctgctcccagaatggtattaggttagctctaatgaatagcacttctgggtttgggaagccagccactgcacttcctaccccaataacttctcccttgtttactggaagtttcccatctagtccacttctatatagtccagagggcactcaacggatcagtcgaattgacctagttcctccacttagtttggatggccacccaactacaaagtcctcacctccaacatcaccattgaagtcaagacagccatctgcacatgttcggtcattgtatgataaactgcagaatatgcctcaagttggtgtgatacacttggctcttcaaaatgattcaactggttcagtattgagttggcagaatgatgtatttgtggtcgctgaacccggggaacttgcagacaggtttctgcaatctgtcaaaactatcttgtcaaccttgttgcgtgggtgtaatagaaagggtgcatattccctgtccaagatttcatgtttatctgagttggttgctgaatggccatcttttgaaatcggtgggatacaccaccgctatataggtcgacaaacacaagtaatggaagataaccaagaaattggcgcatatatgtttaggaggacagtgcctgctgttcacatggcacctgaagatgttcgatggatggttggagcatggagggagaggattatcatatgcagtggtaagtatggccttgctcatggcctggtcaaggcattcatggattgtggtgccaaagcagtcatctcgtcgtccatcgagcctccggattccaagacaatagtctaccatgggatggatgtcaatagaagcctagagaatggcaagtttgtcatccgtgatgaagaagcggacgaatcagagcctgaacctgtcagccctataagcgactgggaggacagtgatgtggagaaaggcggcaaccatgacgtggatgatgaggagtacctggctcagttcatgtgcctgatgtatgacaaattgttccgtgagggtgtgactgtggatacggctctgcagcaagcactccgctcacatcccaagttgaagtacagctgccacttacccaacgttttgtagttagggacattattgacaaaccatacataagtatagcaaaatggacatggataacagggaatgaataaggattgggtggattttttagttgggttatagaggtctatactttgttcgttgtgcaggcatggtgacagaataaaagcatgaaggcattgcactgcatgtgcatttttgctgtagttgtgagaacgggcattttgtttcgcaaatactatgctgacttttgacgttcagttgctagtttgcggctaacactaaggctcgctccatttaagtactgcttacacattagttgttgccctcctataactgtttatatattataaagcagaaaaaaaatagaagatctaatcaaggtgctcttgcacctacagttgaacacatcatccatacacagagcgcaacagcagtttcc

SEQ ID NO: 27112 - DNA, 4794 bp, Zea Mays
tggaggtctagaaatttatcgatgagcacatgtacgtttcgattcattttaggatcggatttctatcgtgcttaaacagttaactgcgtacatacatatggaaaagagtgatagactataaaaacgatttgtatatttcagcttgttttgaaataagttcgtaaaaacccccaacgaaaataccaaataaacccagaaaaaaaagaaattacacaggaacaaaaaaagaaacgaaccaaacaagcgcaggcgcaaacgcctcccttcttccgttcccttcctcctccggccctccggggcgccctccctcggtctctcccgcgtctcgagctgtcgacgtcgccgtcctcgcaccgctcccttctccggcacccgagccgtagccctgccctccgcatccacaatttgatgcggtgggcgcggccgccatgtcgtggggcctggcctggaagcgcagctccgagatcttccacctcacgctcaactacggtgactacgacgacaacgacgaccgccaaccctcgtcaccgccccctccggcgtcctcttcccctcccgcctctgcatcgtcgacccctgtatactcctcctcgcccattgccacccgcaacggcgaccttggcttccgcatcgagcttgactggtcggcgggggacgacgaggatcaggtcgcgctccgcctccagtcccagctcatggtcgcgctgcccccgccccacgacgccgtctccgtcgatctgaccccgagggaccacggggaggaggaaggggtgcggatcgaaatgcgtgtggtcaggaggcgggaggcgctccggtccgtgcgcgtgtcgcgggcccctgggtctgcgctgggcagcggcgatggcgcgggggtgctcgcacgcctcatcagatccaacctcgcgcccgcgcctgccgtggatggccccacagccgcctcgggcgtgcccgtgcttgcggatcactggcgccccatcaccatggtcagcctatgcaactgcggaatgtcgatgcttccagttgagttaactcgccttcaatttcttgagaagttatatcttgacaacaataaattgtcagttttgccccctgaagttggtgctttgaagaatatgaaagtgctgtcatttaacaacaacatgctagtttctgtccctgtagaactgcggcaatgtgttatgctggaggaattatcattagaacataacaagcttgtccggcctctattggatttcaggtcaatgcccaagctccgaattttgcgcttgtttggaaatcctctagagttccttccagaaattttgccattgcataacctcaggcatgtcacacttgcaaatattagaattgaagcagtggaaagtcttaaatctgtcactgtacagatagagactgagaatagttcctacttcattgcggccaggcacaaacttagtgcctttttctctctagttttccgtttctcttcctgtcaccatcctttgctagcttctgctttggtcaaaataatggaagatcgtagcaaccacattgcaattagcaaagaagagaatgctgtcaggcagcttataagcatgataagcagtgataatcgtcatgtggttgagcaagcatgtcttgctatctcatcactggcatctgatatttcttcagcaatgcagctgattaagtgtgacattatgaagcctattgaagctgtactaaaatcatctgatgaagaagaactagtatcagtattgcaagttgtagtcaccttaactttcgtttctgatcatgttgctcaaaaggtgcaacgtctatctctgtttgcaattggcaatttggctttctgtttggagactcgtcgcatcctcatgcattctgaaagcatgtgtgacctgttaatccgattaactatttcacaagagtgtcgtgtcagcaaggcagctgcgcgcgctttggcaatcctaggggagaatgagaacttacgtcgagcaataagaggaaggccagttgcaaagaagggtctacgcatcctatcaatggatggtggtggcatgaaaggccttgcaactgttcaaatgcttaaacagatagagcaaggaactgggaaacgcatacatgaaatgtttgacctcatatgtggtacatccactggtggcatgcttgcaatggctcttgggatcaagcagatgactttggatcagtgtgaagaaatatacacaaaacttggaaaacttgtatttactgaacctatcccaaaggatgaagctgctacgtggaaggagaagattgatcaacttttcaaaagttcctcacaaagttttagagtggttgtacatgggtccaagcacagtgcagatcaatttgagaggttactaaaggaaatgtgcgagaatgaagatggtgaccttctaattgaatctgctgtaaaaggcattccgaaggtctttgctgtatccactttagtcagtgtcattcctgctcaaccgtatatattccgaaactatcagtatcctcctggcactctggaggtatcaccaggaatggcagaaagtccatcaattggtgcaattggcacggctgtttctggtgcaccagttggtattaaacgtggtgccttcatggggagctgcaagcatcgcgtgtgggaagccataagagcatcgtctgcagcaccatattatctggatgatttctctgtagatgcaaatcgttggcaagatggagctattgtagccaacaatcctacaatctttgccattagagaagcacaacttttgtggccagatgcacgaatagattgtctagtctcgataggatgtggctcagttccaactaagagtcgccgaggtggatggcgctacttggacacagggcaagtgttaatagaaagtgcatgctcagtggagagagttgaagaaactttggatacactgataccgatgcttcctgaaatgcaatatttccgctttaatccagtggatgaacggtgtggtatggagttagatgaaactgatcctactatctggctgaagttggaagctgcaactgatgagtacattcagaagaactttctgtctgtcaagaatctttgtgagcttctggtcccaaggtaccaagaggaagaaaagccatcagatatttacaaatctctttcattttcaagactgacatcgttaaatcaaggtttcagtgaaagtaatcctatcttaggatggaggcgtgtggttttacttgtagaggcttcatttagtcctgattttggaaagaaaataaatcatgcacgttcccttgaatccttctgctcccagaatggtattaggttagctctaatgaatagcacttctgggtttgggaagccagccactgcacttcctaccccaataacttctcccttgtttactggaagtttcccatctagtccacttctatatagtccagagggcactcaacggatcagtcgaattgacctagttcctccacttagtttggatggccacccaactacaaagtcctcacctccaacatcaccattgaagtcaagacagccatctgcacatgttcggtcattgtatgataaactgcagaatatgcctcaagttggtgtgatacacttggctcttcaaaatgattcaactggttcagtattgagttggcagaatgatgtatttgtggtcgctgaacccggggaacttgcagacaggtttctgcaatctgtcaaaactatcttgtcaaccttgttgcgtgggtgtaatagaaagggtgcatattccctgtccaagatttcatgtttatctgagttggttgctgaatggccatcttttgaaatcggtgggatacaccaccgctatataggtcgacaaacacaagtaatggaagataaccaagaaattggcgcatatatgtttaggaggacagtgcctgctgttcacatggcacctgaagatgttcgatggatggttggagcatggagggagaggattatcatatgcagtggtaagtatggccttgctcatggcctggtcaaggcattcatggattgtggtgccaaagcagtcatctcgtcgtccatcgagcctccggattccaagacaatagtctaccatgggatggatgtcaatagaagcctagagaatggcaagtttgtcatccgtgatgaagaagcggacgaatcagagcctgaacctgtcagccctataagcgactgggaggacagtgatgtggagaaaggcggcaaccatgacgtggatgatgaggagtacctggctcagttcatgtgcctgatgtatgacaaattgttccgtgagggtgtgactgtggatacggctctgcagcaagcactccgctcacatcccaagttgaagtacagctgccacttacccaacgttttgtagttagggacattattgacaaaccatacataagtatagcaaaatggacatggataacagggaatgaataaggattgggtggattttttagttgggttatagaggtctatactttgttcgttgtgcaggcatggtgacagaataaaagcatgaaggcattgcactgcatgtgcatttttgctgtagttgtgagaacgggcattttgtttcgcaaatactatgctgacttttgacgttcagttgctagtttgcggctaacactaaggctcgctccatttaagtactgcttacacattagttgttgccctcctataactgtttatatattataaagcagaaaaaaaatagaagatctaatcaaggtgctcttgcacctacagttgaacacatcatccatacacagagcgcaacagcagtttcc

SEQ ID NO: 27113 - DNA, 4797 bp, Zea Mays
tggaggtctagaaatttatcgatgagcacatgtacgtttcgattcattttaggatcggatttctatcgtgcttaaacagttaactgcgtacatacatatggaaaagagtgatagactataaaaacgatttgtatatttcagcttgttttgaaataagttcgtaaaaacccccaacgaaaataccaaataaacccagaaaaaaaagaaattacacaggaacaaaaaaagaaacgaaccaaacaagcgcaggcgcaaacgcctcccttcttccgttcccttcctcctccggccctccggggcgccctccctcggtctctcccgcgtctcgagctgtcgacgtcgccgtcctcgcaccgctcccttctccggcacccgagccgtagccctgccctccgcatccacaatttgatgcggtgggcgcggccgccatgtcgtggggcctggcctggaagcgcagctccgagatcttccacctcacgctcaactacggtgactacgacgacaacgacgaccgccaaccctcgtcaccgccccctccggcgtcctcttcccctcccgcctctgcatcgtcgacccctgtatactcctcctcgcccattgccacccgcaacggcgaccttggcttccgcatcgagcttgactggtcggcgggggacgacgaggatcaggtcgcgctccgcctccagtcccagctcatggtcgcgctgcccccgccccacgacgccgtctccgtcgatctgaccccgagggaccacggggaggaggaaggggtgcggatcgaaatgcgtgtggtcaggaggcgggaggcgctccggtccgtgcgcgtgtcgcgggcccctgggtctgcgctgggcagcggcgatggcgcgggggtgctcgcacgcctcatcagatccaacctcgcgcccgcgcctgccgtggatggccccacagccgcctcgggcgtgcccgtgcttgcggatcactggcgccccatcaccatggtcagcctatgcaactgcggaatgtcgatgcttccagttgagttaactcgccttcaatttcttgagaagttatatcttgacaacaataaattgtcagttttgccccctgaagttggtgctttgaagaatatgaaagtgctgtcatttaacaacaacatgctagtttctgtccctgcagtagaactgcggcaatgtgttatgctggaggaattatcattagaacataacaagcttgtccggcctctattggatttcaggtcaatgcccaagctccgaattttgcgcttgtttggaaatcctctagagttccttccagaaattttgccattgcataacctcaggcatgtcacacttgcaaatattagaattgaagcagtggaaagtcttaaatctgtcactgtacagatagagactgagaatagttcctacttcattgcggccaggcacaaacttagtgcctttttctctctagttttccgtttctcttcctgtcaccatcctttgctagcttctgctttggtcaaaataatggaagatcgtagcaaccacattgcaattagcaaagaagagaatgctgtcaggcagcttataagcatgataagcagtgataatcgtcatgtggttgagcaagcatgtcttgctatctcatcactggcatctgatatttcttcagcaatgcagctgattaagtgtgacattatgaagcctattgaagctgtactaaaatcatctgatgaagaagaactagtatcagtattgcaagttgtagtcaccttaactttcgtttctgatcatgttgctcaaaaggtgcaacgtctatctctgtttgcaattggcaatttggctttctgtttggagactcgtcgcatcctcatgcattctgaaagcatgtgtgacctgttaatccgattaactatttcacaagagtgtcgtgtcagcaaggcagctgcgcgcgctttggcaatcctaggggagaatgagaacttacgtcgagcaataagaggaaggccagttgcaaagaagggtctacgcatcctatcaatggatggtggtggcatgaaaggccttgcaactgttcaaatgcttaaacagatagagcaaggaactgggaaacgcatacatgaaatgtttgacctcatatgtggtacatccactggtggcatgcttgcaatggctcttgggatcaagcagatgactttggatcagtgtgaagaaatatacacaaaacttggaaaacttgtatttactgaacctatcccaaaggatgaagctgctacgtggaaggagaagattgatcaacttttcaaaagttcctcacaaagttttagagtggttgtacatgggtccaagcacagtgcagatcaatttgagaggttactaaaggaaatgtgcgagaatgaagatggtgaccttctaattgaatctgctgtaaaaggcattccgaaggtctttgctgtatccactttagtcagtgtcattcctgctcaaccgtatatattccgaaactatcagtatcctcctggcactctggaggtatcaccaggaatggcagaaagtccatcaattggtgcaattggcacggctgtttctggtgcaccagttggtattaaacgtggtgccttcatggggagctgcaagcatcgcgtgtgggaagccataagagcatcgtctgcagcaccatattatctggatgatttctctgtagatgcaaatcgttggcaagatggagctattgtagccaacaatcctacaatctttgccattagagaagcacaacttttgtggccagatgcacgaatagattgtctagtctcgataggatgtggctcagttccaactaagagtcgccgaggtggatggcgctacttggacacagggcaagtgttaatagaaagtgcatgctcagtggagagagttgaagaaactttggatacactgataccgatgcttcctgaaatgcaatatttccgctttaatccagtggatgaacggtgtggtatggagttagatgaaactgatcctactatctggctgaagttggaagctgcaactgatgagtacattcagaagaactttctgtctgtcaagaatctttgtgagcttctggtcccaaggtaccaagaggaagaaaagccatcagatatttacaaatctctttcattttcaagactgacatcgttaaatcaaggtttcagtgaaagtaatcctatcttaggatggaggcgtgtggttttacttgtagaggcttcatttagtcctgattttggaaagaaaataaatcatgcacgttcccttgaatccttctgctcccagaatggtattaggttagctctaatgaatagcacttctgggtttgggaagccagccactgcacttcctaccccaataacttctcccttgtttactggaagtttcccatctagtccacttctatatagtccagagggcactcaacggatcagtcgaattgacctagttcctccacttagtttggatggccacccaactacaaagtcctcacctccaacatcaccattgaagtcaagacagccatctgcacatgttcggtcattgtatgataaactgcagaatatgcctcaagttggtgtgatacacttggctcttcaaaatgattcaactggttcagtattgagttggcagaatgatgtatttgtggtcgctgaacccggggaacttgcagacaggtttctgcaatctgtcaaaactatcttgtcaaccttgttgcgtgggtgtaatagaaagggtgcatattccctgtccaagatttcatgtttatctgagttggttgctgaatggccatcttttgaaatcggtgggatacaccaccgctatataggtcgacaaacacaagtaatggaagataaccaagaaattggcgcatatatgtttaggaggacagtgcctgctgttcacatggcacctgaagatgttcgatggatggttggagcatggagggagaggattatcatatgcagtggtaagtatggccttgctcatggcctggtcaaggcattcatggattgtggtgccaaagcagtcatctcgtcgtccatcgagcctccggattccaagacaatagtctaccatgggatggatgtcaatagaagcctagagaatggcaagtttgtcatccgtgatgaagaagcggacgaatcagagcctgaacctgtcagccctataagcgactgggaggacagtgatgtggagaaaggcggcaaccatgacgtggatgatgaggagtacctggctcagttcatgtgcctgatgtatgacaaattgttccgtgagggtgtgactgtggatacggctctgcagcaagcactccgctcacatcccaagttgaagtacagctgccacttacccaacgttttgtagttagggacattattgacaaaccatacataagtatagcaaaatggacatggataacagggaatgaataaggattgggtggattttttagttgggttatagaggtctatactttgttcgttgtgcaggcatggtgacagaataaaagcatgaaggcattgcactgcatgtgcatttttgctgtagttgtgagaacgggcattttgtttcgcaaatactatgctgacttttgacgttcagttgctagtttgcggctaacactaaggctcgctccatttaagtactgcttacacattagttgttgccctcctataactgtttatatattataaagcagaaaaaaaatagaagatctaatcaaggtgctcttgcacctacagttgaacacatcatccatacacagagcgcaacagcagtttcc

SEQ ID NO: 27114 - DNA, 4584 bp, Zea Mays
tggaggtctagaaatttatcgatgagcacatgtacgtttcgattcattttaggatcggatttctatcgtgcttaaacagttaactgcgtacatacatatggaaaagagtgatagactataaaaacgatttgtatatttcagcttgttttgaaataagttcgtaaaaacccccaacgaaaataccaaataaacccagaaaaaaaagaaattacacaggaacaaaaaaagaaacgaaccaaacaagcgcaggcgcaaacgcctcccttcttccgttcccttcctcctccggccctccggggcgccctccctcggtctctcccgcgtctcgagctgtcgacgtcgccgtcctcgcaccgctcccttctccggcacccgagccgtagccctgccctccgcatccacaatttgatgcggtgggcgcggccgccatgtcgtggggcctggcctggaagcgcagctccgagatcttccacctcacgctcaactacggtgactacgacgacaacgacgaccgccaaccctcgtcaccgccccctccggcgtcctcttcccctcccgcctctgcatcgtcgacccctgtatactcctcctcgcccattgccacccgcaacggcgaccttggcttccgcatcgagcttgactggtcggcgggggacgacgaggatcaggtcgcgctccgcctccagtcccagctcatggtcgcgctgcccccgccccacgacgccgtctccgtcgatctgaccccgagggaccacggggaggaggaaggggtgcggatcgaaatgcgtgtggtcaggaggcgggaggcgctccggtccgtgcgcgtgtcgcgggcccctgggtctgcgctgggcagcggcgatggcgcgggggtgctcgcacgcctcatcagatccaacctcgcgcccgcgcctgccgtggatggccccacagccgcctcgggcgtgcccgtgcttgcggatcactggcgccccatcaccatggtcagcctatgcaactgcggaatgtcgatgcttccagttgagttaactcgccttcaatttcttgagaagttatatcttgacaacaataaattgtcagttttgccccctgaagttggtgctttgaagaatatgaaagtgctgtcatttaacaacaacatgctagtttctgtccctgtagaactgcggcaatgtgttatgctggaggaattatcattagaacataacaagcttgtccggcctctattggatttcaggtcaatgcccaagctccgaattttgcgcttgtttggaaatcctctagagttccttccagaaattttgccattgcataacctcaggcatgtcacacttgcaaatattagaattgaagcagtggaaagtcttaaatctgtcactgtacagatagaggttgagcaagcatgtcttgctatctcatcactggcatctgatatttcttcagcaatgcagctgattaagtgtgacattatgaagcctattgaagctgtactaaaatcatctgatgaagaagaactagtatcagtattgcaagttgtagtcaccttaactttcgtttctgatcatgttgctcaaaaggtgcaacgtctatctctgtttgcaattggcaatttggctttctgtttggagactcgtcgcatcctcatgcattctgaaagcatgtgtgacctgttaatccgattaactatttcacaagagtgtcgtgtcagcaaggcagctgcgcgcgctttggcaatcctaggggagaatgagaacttacgtcgagcaataagaggaaggccagttgcaaagaagggtctacgcatcctatcaatggatggtggtggcatgaaaggccttgcaactgttcaaatgcttaaacagatagagcaaggaactgggaaacgcatacatgaaatgtttgacctcatatgtggtacatccactggtggcatgcttgcaatggctcttgggatcaagcagatgactttggatcagtgtgaagaaatatacacaaaacttggaaaacttgtatttactgaacctatcccaaaggatgaagctgctacgtggaaggagaagattgatcaacttttcaaaagttcctcacaaagttttagagtggttgtacatgggtccaagcacagtgcagatcaatttgagaggttactaaaggaaatgtgcgagaatgaagatggtgaccttctaattgaatctgctgtaaaaggcattccgaaggtctttgctgtatccactttagtcagtgtcattcctgctcaaccgtatatattccgaaactatcagtatcctcctggcactctggaggtatcaccaggaatggcagaaagtccatcaattggtgcaattggcacggctgtttctggtgcaccagttggtattaaacgtggtgccttcatggggagctgcaagcatcgcgtgtgggaagccataagagcatcgtctgcagcaccatattatctggatgatttctctgtagatgcaaatcgttggcaagatggagctattgtagccaacaatcctacaatctttgccattagagaagcacaacttttgtggccagatgcacgaatagattgtctagtctcgataggatgtggctcagttccaactaagagtcgccgaggtggatggcgctacttggacacagggcaagtgttaatagaaagtgcatgctcagtggagagagttgaagaaactttggatacactgataccgatgcttcctgaaatgcaatatttccgctttaatccagtggatgaacggtgtggtatggagttagatgaaactgatcctactatctggctgaagttggaagctgcaactgatgagtacattcagaagaactttctgtctgtcaagaatctttgtgagcttctggtcccaaggtaccaagaggaagaaaagccatcagatatttacaaatctctttcattttcaagactgacatcgttaaatcaaggtttcagtgaaagtaatcctatcttaggatggaggcgtgtggttttacttgtagaggcttcatttagtcctgattttggaaagaaaataaatcatgcacgttcccttgaatccttctgctcccagaatggtattaggttagctctaatgaatagcacttctgggtttgggaagccagccactgcacttcctaccccaataacttctcccttgtttactggaagtttcccatctagtccacttctatatagtccagagggcactcaacggatcagtcgaattgacctagttcctccacttagtttggatggccacccaactacaaagtcctcacctccaacatcaccattgaagtcaagacagccatctgcacatgttcggtcattgtatgataaactgcagaatatgcctcaagttggtgtgatacacttggctcttcaaaatgattcaactggttcagtattgagttggcagaatgatgtatttgtggtcgctgaacccggggaacttgcagacaggtttctgcaatctgtcaaaactatcttgtcaaccttgttgcgtgggtgtaatagaaagggtgcatattccctgtccaagatttcatgtttatctgagttggttgctgaatggccatcttttgaaatcggtgggatacaccaccgctatataggtcgacaaacacaagtaatggaagataaccaagaaattggcgcatatatgtttaggaggacagtgcctgctgttcacatggcacctgaagatgttcgatggatggttggagcatggagggagaggattatcatatgcagtggtaagtatggccttgctcatggcctggtcaaggcattcatggattgtggtgccaaagcagtcatctcgtcgtccatcgagcctccggattccaagacaatagtctaccatgggatggatgtcaatagaagcctagagaatggcaagtttgtcatccgtgatgaagaagcggacgaatcagagcctgaacctgtcagccctataagcgactgggaggacagtgatgtggagaaaggcggcaaccatgacgtggatgatgaggagtacctggctcagttcatgtgcctgatgtatgacaaattgttccgtgagggtgtgactgtggatacggctctgcagcaagcactccgctcacatcccaagttgaagtacagctgccacttacccaacgttttgtagttagggacattattgacaaaccatacataagtatagcaaaatggacatggataacagggaatgaataaggattgggtggattttttagttgggttatagaggtctatactttgttcgttgtgcaggcatggtgacagaataaaagcatgaaggcattgcactgcatgtgcatttttgctgtagttgtgagaacgggcattttgtttcgcaaatactatgctgacttttgacgttcagttgctagtttgcggctaacactaaggctcgctccatttaagtactgcttacacattagttgttgccctcctataactgtttatatattataaagcagaaaaaaaatagaagatctaatcaaggtgctcttgcacctacagttgaacacatcatccatacacagagcgcaacagcagtttcc

SEQ ID NO: 27115 - DNA, 4926 bp, Zea Mays
tggaggtctagaaatttatcgatgagcacatgtacgtttcgattcattttaggatcggatttctatcgtgcttaaacagttaactgcgtacatacatatggaaaagagtgatagactataaaaacgatttgtatatttcagcttgttttgaaataagttcgtaaaaacccccaacgaaaataccaaataaacccagaaaaaaaagaaattacacaggaacaaaaaaagaaacgaaccaaacaagcgcaggcgcaaacgcctcccttcttccgttcccttcctcctccggccctccggggcgccctccctcggtctctcccgcgtctcgagctgtcgacgtcgccgtcctcgcaccgctcccttctccggcacccgagccgtagccctgccctccgcatccacaatttgatgcggtgggcgcggccgccatgtcgtggggcctggcctggaagcgcagctccgagatcttccacctcacgctcaactacggtgactacgacgacaacgacgaccgccaaccctcgtcaccgccccctccggcgtcctcttcccctcccgcctctgcatcgtcgacccctgtatactcctcctcgcccattgccacccgcaacggcgaccttggcttccgcatcgagcttgactggtcggcgggggacgacgaggatcaggtcgcgctccgcctccagtcccagctcatggtcgcgctgcccccgccccacgacgccgtctccgtcgatctgaccccgagggaccacggggaggaggaaggggtgcggatcgaaatgcgtgtggtcaggaggcgggaggcgctccggtccgtgcgcgtgtcgcgggcccctgggtctgcgctgggcagcggcgatggcgcgggggtgctcgcacgcctcatcagatccaacctcgcgcccgcgcctgccgtggatggccccacagccgcctcgggcgtgcccgtgcttgcggatcactggcgccccatcaccatggtcagcctatgcaactgcggaatgtcgatgcttccagttgagttaactcgccttcaatttcttgagaagttatatcttgacaacaataaattgtcagttttgccccctgaagttggtgctttgaagaatatgaaagtgctgtcatttaacaacaacatgctagtttctgtccctgtagaactgcggcaatgtgttatgctggaggaattatcattagaacataacaagcttgtccggcctctattggatttcaggtcaatgcccaagctccgaattttgcgcttgtttggaaatcctctagagttccttccagaaattttgccattgcataacctcaggcatgtcacacttgcaaatattagaattgaagcagtggaaagtcttaaatctgtcactgtacagatagagactgagaatagttcctacttcattgcggccaggcacaaacttagtgcctttttctctctagttttccgtttctcttcctgtcaccatcctttgctagcttctgctttggtcaaaataatggaagatcgtagcaaccacattgcaattagcaaagaagagaatgctgtcaggcagcttataagcatgataagcagtgataatcgtcatgtggttgagcaagcatgtcttgctatctcatcactggcatctgatatttcttcagcaatgcagctgattaagtgtgacattatgaagcctattgaagctgtactaaaatcatctgatgaagaagaactagtatcagtattgcaagttgtagtcaccttaactttcgtttctgatcatgttgctcaaaaggtgttgacaaaggatgtgttgaagtcattgaaagcactttgcgcacacaagaactctgaggtgcaacgtctatctctgtttgcaattggcaatttggctttctgtttggagactcgtcgcatcctcatgcattctgaaagcatgtgtgacctgttaatccgattaactatttcacaagagtgtcgtgtcagcaaggcagctgcgcgcgctttggcaatcctaggggagaatgagaacttacgtcgagcaataagaggaaggccagttgcaaagaagggtctacgcatcctatcaatggatggtggtggcatgaaaggccttgcaactgttcaaatgcttaaacagatagagcaaggaactgggaaacgcatacatgaaatgtttgacctcatatgtggtacatccactggtggcatgcttgcaatggctcttgggatcaagcagatgactttggatcagtgtgaagaaatatacacaaaacttggtgattcccttttgccttttgaagtttccttgccaatgccaatgttgccaactgaacttttaattttcctaggaaaacttgtatttactgaacctatcccaaaggatgaagctgctacgtggaaggagaagattgatcaacttttcaaaagttcctcacaaagttttagagtggttgtacatgggtccaagcacagtgcagatcaatttgagaggttactaaaggaaatgtgcgagaatgaagatggtgaccttctaattgaatctgctgtaaaaggcattccgaaggtctttgctgtatccactttagtcagtgtcattcctgctcaaccgtatatattccgaaactatcagtatcctcctggcactctggaggtatcaccaggaatggcagaaagtccatcaattggtgcaattggcacggctgtttctggtgcaccagttggtattaaacgtggtgccttcatggggagctgcaagcatcgcgtgtgggaagccataagagcatcgtctgcagcaccatattatctggatgatttctctgtagatgcaaatcgttggcaagatggagctattgtagccaacaatcctacaatctttgccattagagaagcacaacttttgtggccagatgcacgaatagattgtctagtctcgataggatgtggctcagttccaactaagagtcgccgaggtggatggcgctacttggacacagggcaagtgttaatagaaagtgcatgctcagtggagagagttgaagaaactttggatacactgataccgatgcttcctgaaatgcaatatttccgctttaatccagtggatgaacggtgtggtatggagttagatgaaactgatcctactatctggctgaagttggaagctgcaactgatgagtacattcagaagaactttctgtctgtcaagaatctttgtgagcttctggtcccaaggtaccaagaggaagaaaagccatcagatatttacaaatctctttcattttcaagactgacatcgttaaatcaaggtttcagtgaaagtaatcctatcttaggatggaggcgtgtggttttacttgtagaggcttcatttagtcctgattttggaaagaaaataaatcatgcacgttcccttgaatccttctgctcccagaatggtattaggttagctctaatgaatagcacttctgggtttgggaagccagccactgcacttcctaccccaataacttctcccttgtttactggaagtttcccatctagtccacttctatatagtccagagggcactcaacggatcagtcgaattgacctagttcctccacttagtttggatggccacccaactacaaagtcctcacctccaacatcaccattgaagtcaagacagccatctgcacatgttcggtcattgtatgataaactgcagaatatgcctcaagttggtgtgatacacttggctcttcaaaatgattcaactggttcagtattgagttggcagaatgatgtatttgtggtcgctgaacccggggaacttgcagacaggtttctgcaatctgtcaaaactatcttgtcaaccttgttgcgtgggtgtaatagaaagggtgcatattccctgtccaagatttcatgtttatctgagttggttgctgaatggccatcttttgaaatcggtgggatacaccaccgctatataggtcgacaaacacaagtaatggaagataaccaagaaattggcgcatatatgtttaggaggacagtgcctgctgttcacatggcacctgaagatgttcgatggatggttggagcatggagggagaggattatcatatgcagtggtaagtatggccttgctcatggcctggtcaaggcattcatggattgtggtgccaaagcagtcatctcgtcgtccatcgagcctccggattccaagacaatagtctaccatgggatggatgtcaatagaagcctagagaatggcaagtttgtcatccgtgatgaagaagcggacgaatcagagcctgaacctgtcagccctataagcgactgggaggacagtgatgtggagaaaggcggcaaccatgacgtggatgatgaggagtacctggctcagttcatgtgcctgatgtatgacaaattgttccgtgagggtgtgactgtggatacggctctgcagcaagcactccgctcacatcccaagttgaagtacagctgccacttacccaacgttttgtagttagggacattattgacaaaccatacataagtatagcaaaatggacatggataacagggaatgaataaggattgggtggattttttagttgggttatagaggtctatactttgttcgttgtgcaggcatggtgacagaataaaagcatgaaggcattgcactgcatgtgcatttttgctgtagttgtgagaacgggcattttgtttcgcaaatactatgctgacttttgacgttcagttgctagtttgcggctaacactaaggctcgctccatttaagtactgcttacacattagttgttgccctcctataactgtttatatattataaagcagaaaaaaaatagaagatctaatcaaggtgctcttgcacctacagttgaacacatcatccatacacagagcgcaacagcagtttcc

SEQ ID NO: 27116 - DNA, 4719 bp, Zea Mays
tggaggtctagaaatttatcgatgagcacatgtacgtttcgattcattttaggatcggatttctatcgtgcttaaacagttaactgcgtacatacatatggaaaagagtgatagactataaaaacgatttgtatatttcagcttgttttgaaataagttcgtaaaaacccccaacgaaaataccaaataaacccagaaaaaaaagaaattacacaggaacaaaaaaagaaacgaaccaaacaagcgcaggcgcaaacgcctcccttcttccgttcccttcctcctccggccctccggggcgccctccctcggtctctcccgcgtctcgagctgtcgacgtcgccgtcctcgcaccgctcccttctccggcacccgagccgtagccctgccctccgcatccacaatttgatgcggtgggcgcggccgccatgtcgtggggcctggcctggaagcgcagctccgagatcttccacctcacgctcaactacggtgactacgacgacaacgacgaccgccaaccctcgtcaccgccccctccggcgtcctcttcccctcccgcctctgcatcgtcgacccctgtatactcctcctcgcccattgccacccgcaacggcgaccttggcttccgcatcgagcttgactggtcggcgggggacgacgaggatcaggtcgcgctccgcctccagtcccagctcatggtcgcgctgcccccgccccacgacgccgtctccgtcgatctgaccccgagggaccacggggaggaggaaggggtgcggatcgaaatgcgtgtggtcaggaggcgggaggcgctccggtccgtgcgcgtgtcgcgggcccctgggtctgcgctgggcagcggcgatggcgcgggggtgctcgcacgcctcatcagatccaacctcgcgcccgcgcctgccgtggatggccccacagccgcctcgggcgtgcccgtgcttgcggatcactggcgccccatcaccatggtcagcctatgcaactgcggaatgtcgatgcttccagttgagttaactcgccttcaatttcttgagaagttatatcttgacaacaataaattgtcagttttgccccctgaagttggtgctttgaagaatatgaaagtgctgtcatttaacaacaacatgctagtttctgtccctgcagtagaactgcggcaatgtgttatgctggaggaattatcattagaacataacaagcttgtccggcctctattggatttcaggtcaatgcccaagctccgaattttgcgcttgtttggaaatcctctagagttccttccagaaattttgccattgcataacctcaggcatgtcacacttgcaaatattagaattgaagcagtggaaagtcttaaatctgtcactgtacagatagaggttgagcaagcatgtcttgctatctcatcactggcatctgatatttcttcagcaatgcagctgattaagtgtgacattatgaagcctattgaagctgtactaaaatcatctgatgaagaagaactagtatcagtattgcaagttgtagtcaccttaactttcgtttctgatcatgttgctcaaaaggtgttgacaaaggatgtgttgaagtcattgaaagcactttgcgcacacaagaactctgaggtgcaacgtctatctctgtttgcaattggcaatttggctttctgtttggagactcgtcgcatcctcatgcattctgaaagcatgtgtgacctgttaatccgattaactatttcacaagagtgtcgtgtcagcaaggcagctgcgcgcgctttggcaatcctaggggagaatgagaacttacgtcgagcaataagaggaaggccagttgcaaagaagggtctacgcatcctatcaatggatggtggtggcatgaaaggccttgcaactgttcaaatgcttaaacagatagagcaaggaactgggaaacgcatacatgaaatgtttgacctcatatgtggtacatccactggtggcatgcttgcaatggctcttgggatcaagcagatgactttggatcagtgtgaagaaatatacacaaaacttggtgattcccttttgccttttgaagtttccttgccaatgccaatgttgccaactgaacttttaattttcctaggaaaacttgtatttactgaacctatcccaaaggatgaagctgctacgtggaaggagaagattgatcaacttttcaaaagttcctcacaaagttttagagtggttgtacatgggtccaagcacagtgcagatcaatttgagaggttactaaaggaaatgtgcgagaatgaagatggtgaccttctaattgaatctgctgtaaaaggcattccgaaggtctttgctgtatccactttagtcagtgtcattcctgctcaaccgtatatattccgaaactatcagtatcctcctggcactctggaggtatcaccaggaatggcagaaagtccatcaattggtgcaattggcacggctgtttctggtgcaccagttggtattaaacgtggtgccttcatggggagctgcaagcatcgcgtgtgggaagccataagagcatcgtctgcagcaccatattatctggatgatttctctgtagatgcaaatcgttggcaagatggagctattgtagccaacaatcctacaatctttgccattagagaagcacaacttttgtggccagatgcacgaatagattgtctagtctcgataggatgtggctcagttccaactaagagtcgccgaggtggatggcgctacttggacacagggcaagtgttaatagaaagtgcatgctcagtggagagagttgaagaaactttggatacactgataccgatgcttcctgaaatgcaatatttccgctttaatccagtggatgaacggtgtggtatggagttagatgaaactgatcctactatctggctgaagttggaagctgcaactgatgagtacattcagaagaactttctgtctgtcaagaatctttgtgagcttctggtcccaaggtaccaagaggaagaaaagccatcagatatttacaaatctctttcattttcaagactgacatcgttaaatcaaggtttcagtgaaagtaatcctatcttaggatggaggcgtgtggttttacttgtagaggcttcatttagtcctgattttggaaagaaaataaatcatgcacgttcccttgaatccttctgctcccagaatggtattaggttagctctaatgaatagcacttctgggtttgggaagccagccactgcacttcctaccccaataacttctcccttgtttactggaagtttcccatctagtccacttctatatagtccagagggcactcaacggatcagtcgaattgacctagttcctccacttagtttggatggccacccaactacaaagtcctcacctccaacatcaccattgaagtcaagacagccatctgcacatgttcggtcattgtatgataaactgcagaatatgcctcaagttggtgtgatacacttggctcttcaaaatgattcaactggttcagtattgagttggcagaatgatgtatttgtggtcgctgaacccggggaacttgcagacaggtttctgcaatctgtcaaaactatcttgtcaaccttgttgcgtgggtgtaatagaaagggtgcatattccctgtccaagatttcatgtttatctgagttggttgctgaatggccatcttttgaaatcggtgggatacaccaccgctatataggtcgacaaacacaagtaatggaagataaccaagaaattggcgcatatatgtttaggaggacagtgcctgctgttcacatggcacctgaagatgttcgatggatggttggagcatggagggagaggattatcatatgcagtggtaagtatggccttgctcatggcctggtcaaggcattcatggattgtggtgccaaagcagtcatctcgtcgtccatcgagcctccggattccaagacaatagtctaccatgggatggatgtcaatagaagcctagagaatggcaagtttgtcatccgtgatgaagaagcggacgaatcagagcctgaacctgtcagccctataagcgactgggaggacagtgatgtggagaaaggcggcaaccatgacgtggatgatgaggagtacctggctcagttcatgtgcctgatgtatgacaaattgttccgtgagggtgtgactgtggatacggctctgcagcaagcactccgctcacatcccaagttgaagtacagctgccacttacccaacgttttgtagttagggacattattgacaaaccatacataagtatagcaaaatggacatggataacagggaatgaataaggattgggtggattttttagttgggttatagaggtctatactttgttcgttgtgcaggcatggtgacagaataaaagcatgaaggcattgcactgcatgtgcatttttgctgtagttgtgagaacgggcattttgtttcgcaaatactatgctgacttttgacgttcagttgctagtttgcggctaacactaaggctcgctccatttaagtactgcttacacattagttgttgccctcctataactgtttatatattataaagcagaaaaaaaatagaagatctaatcaaggtgctcttgcacctacagttgaacacatcatccatacacagagcgcaacagcagtttcc

SEQ ID NO: 27117 - DNA, 4825 bp, Zea Mays
tggaggtctagaaatttatcgatgagcacatgtacgtttcgattcattttaggatcggatttctatcgtgcttaaacagttaactgcgtacatacatatggaaaagagtgatagactataaaaacgatttgtatatttcagcttgttttgaaataagttcgtaaaaacccccaacgaaaataccaaataaacccagaaaaaaaagaaattacacaggaacaaaaaaagaaacgaaccaaacaagcgcaggcgcaaacgcctcccttcttccgttcccttcctcctccggccctccggggcgccctccctcggtctctcccgcgtctcgagctgtcgacgtcgccgtcctcgcaccgctcccttctccggcacccgagccgtagccctgccctccgcatccacaatttgatgcggtgggcgcggccgccatgtcgtggggcctggcctggaagcgcagctccgagatcttccacctcacgctcaactacggtgactacgacgacaacgacgaccgccaaccctcgtcaccgccccctccggcgtcctcttcccctcccgcctctgcatcgtcgacccctgtatactcctcctcgcccattgccacccgcaacggcgaccttggcttccgcatcgagcttgactggtcggcgggggacgacgaggatcaggtcgcgctccgcctccagtcccagctcatggtcgcgctgcccccgccccacgacgccgtctccgtcgatctgaccccgagggaccacggggaggaggaaggggtgcggatcgaaatgcgtgtggtcaggaggcgggaggcgctccggtccgtgcgcgtgtcgcgggcccctgggtctgcgctgggcagcggcgatggcgcgggggtgctcgcacgcctcatcagatccaacctcgcgcccgcgcctgccgtggatggccccacagccgcctcgggcgtgcccgtgcttgcggatcactggcgccccatcaccatggtcagcctatgcaactgcggaatgtcgatgcttccagttgagttaactcgccttcaatttcttgagaagttatatcttgacaacaataaattgtcagttttgccccctgaagttggtgctttgaagaatatgaaagtgctgtcatttaacaacaacatgctagtttctgtccctgcagtagaactgcggcaatgtgttatgctggaggaattatcattagaacataacaagcttgtccggcctctattggatttcaggtcaatgcccaagctccgaattttgcgcttgtttggaaatcctctagagttccttccagaaattttgccattgcataacctcaggcatgtcacacttgcaaatattagaattgaagcagtggaaagtcttaaatctgtcactgtacagatagagactgagaatagttcctacttcattgcggccaggcacaaacttagtgcctttttctctctagttttccgtttctcttcctgtcaccatcctttgctagcttctgctttggtcaaaataatggaagatcgtagcaaccacattgcaattagcaaagaagagaatgctgtcaggcagcttataagcatgataagcagtgataatcgtcatgtggttgagcaagcatgtcttgctatctcatcactggcatctgatatttcttcagcaatgcagctgattaagtgtgacattatgaagcctattgaagctgtactaaaatcatctgatgaagaagaactagtatcagtattgcaagttgtagtcaccttaactttcgtttctgatcatgttgctcaaaaggtgttgacaaaggatgtgttgaagtcattgaaagcactttgcgcacacaagaactctgaggtgcaacgtctatctctgtttgcaattggcaatttggctttctgtttggagactcgtcgcatcctcatgcattctgaaagcatgtgtgacctgttaatccgattaactatttcacaagagtgtcgtgtcagcaaggcagctgcgcgcgctttggcaatcctaggggagaatgagaacttacgtcgagcaataagaggaaggccagttgcaaagaagggtctacgcatcctatcaatggatggtggtggcatgaaaggccttgcaactgttcaaatgcttaaacagatagagcaaggaactgggaaacgcatacatgaaatgtttgacctcatatgtggtacatccactggtggcatgcttgcaatggctcttgggatcaagcagatgactttggatcagtgtgaagaaatatacacaaaacttggatgaagctgctacgtggaaggagaagattgatcaacttttcaaaagttcctcacaaagttttagagtggttgtacatgggtccaagcacagtgcagatcaatttgagaggttactaaaggaaatgtgcgagaatgaagatggtgaccttctaattgaatctgctgtaaaaggcattccgaaggtctttgctgtatccactttagtcagtgtcattcctgctcaaccgtatatattccgaaactatcagtatcctcctggcactctggaggtatcaccaggaatggcagaaagtccatcaattggtgcaattggcacggctgtttctggtgcaccagttggtattaaacgtggtgccttcatggggagctgcaagcatcgcgtgtgggaagccataagagcatcgtctgcagcaccatattatctggatgatttctctgtagatgcaaatcgttggcaagatggagctattgtagccaacaatcctacaatctttgccattagagaagcacaacttttgtggccagatgcacgaatagattgtctagtctcgataggatgtggctcagttccaactaagagtcgccgaggtggatggcgctacttggacacagggcaagtgttaatagaaagtgcatgctcagtggagagagttgaagaaactttggatacactgataccgatgcttcctgaaatgcaatatttccgctttaatccagtggatgaacggtgtggtatggagttagatgaaactgatcctactatctggctgaagttggaagctgcaactgatgagtacattcagaagaactttctgtctgtcaagaatctttgtgagcttctggtcccaaggtaccaagaggaagaaaagccatcagatatttacaaatctctttcattttcaagactgacatcgttaaatcaaggtttcagtgaaagtaatcctatcttaggatggaggcgtgtggttttacttgtagaggcttcatttagtcctgattttggaaagaaaataaatcatgcacgttcccttgaatccttctgctcccagaatggtattaggttagctctaatgaatagcacttctgggtttgggaagccagccactgcacttcctaccccaataacttctcccttgtttactggaagtttcccatctagtccacttctatatagtccagagggcactcaacggatcagtcgaattgacctagttcctccacttagtttggatggccacccaactacaaagtcctcacctccaacatcaccattgaagtcaagacagccatctgcacatgttcggtcattgtatgataaactgcagaatatgcctcaagttggtgtgatacacttggctcttcaaaatgattcaactggttcagtattgagttggcagaatgatgtatttgtggtcgctgaacccggggaacttgcagacaggtttctgcaatctgtcaaaactatcttgtcaaccttgttgcgtgggtgtaatagaaagggtgcatattccctgtccaagatttcatgtttatctgagttggttgctgaatggccatcttttgaaatcggtgggatacaccaccgctatataggtcgacaaacacaagtaatggaagataaccaagaaattggcgcatatatgtttaggaggacagtgcctgctgttcacatggcacctgaagatgttcgatggatggttggagcatggagggagaggattatcatatgcagtggtaagtatggccttgctcatggcctggtcaaggcattcatggattgtggtgccaaagcagtcatctcgtcgtccatcgagcctccggattccaagacaatagtctaccatgggatggatgtcaatagaagcctagagaatggcaagtttgtcatccgtgatgaagaagcggacgaatcagagcctgaacctgtcagccctataagcgactgggaggacagtgatgtggagaaaggcggcaaccatgacgtggatgatgaggagtacctggctcagttcatgtgcctgatgtatgacaaattgttccgtgagggtgtgactgtggatacggctctgcagcaagcactccgctcacatcccaagttgaagtacagctgccacttacccaacgttttgtagttagggacattattgacaaaccatacataagtatagcaaaatggacatggataacagggaatgaataaggattgggtggattttttagttgggttatagaggtctatactttgttcgttgtgcaggcatggtgacagaataaaagcatgaaggcattgcactgcatgtgcatttttgctgtagttgtgagaacgggcattttgtttcgcaaatactatgctgacttttgacgttcagttgctagtttgcggctaacactaaggctcgctccatttaagtactgcttacacattagttgttgccctcctataactgtttatatattataaagcagaaaaaaaatagaagatctaatcaaggtgctcttgcacctacagttgaacacatcatccatacacagagcgcaacagcagtttcc

SEQ ID NO: 27118 - DNA, 4963 bp, Zea Mays
tggaggtctagaaatttatcgatgagcacatgtacgtttcgattcattttaggatcggatttctatcgtgcttaaacagttaactgcgtacatacatatggaaaagagtgatagactataaaaacgatttgtatatttcagcttgttttgaaataagttcgtaaaaacccccaacgaaaataccaaataaacccagaaaaaaaagaaattacacaggaacaaaaaaagaaacgaaccaaacaagcgcaggcgcaaacgcctcccttcttccgttcccttcctcctccggccctccggggcgccctccctcggtctctcccgcgtctcgagctgtcgacgtcgccgtcctcgcaccgctcccttctccggcacccgagccgtagccctgccctccgcatccacaatttgatgcggtgggcgcggccgccatgtcgtggggcctggcctggaagcgcagctccgagatcttccacctcacgctcaactacggtgactacgacgacaacgacgaccgccaaccctcgtcaccgccccctccggcgtcctcttcccctcccgcctctgcatcgtcgacccctgtatactcctcctcgcccattgccacccgcaacggcgaccttggcttccgcatcgagcttgactggtcggcgggggacgacgaggatcaggtcgcgctccgcctccagtcccagctcatggtcgcgctgcccccgccccacgacgccgtctccgtcgatctgaccccgagggaccacggggaggaggaaggggtgcggatcgaaatgcgtgtggtcaggaggcgggaggcgctccggtccgtgcgcgtgtcgcgggcccctgggtctgcgctgggcagcggcgatggcgcgggggtgctcgcacgcctcatcagatccaacctcgcgcccgcgcctgccgtggatggccccacagccgcctcgggcgtgcccgtgcttgcggatcactggcgccccatcaccatggtcagcctatgcaactgcggaatgtcgatgcttccagttgagttaactcgccttcaatttcttgagaagttatatcttgacaacaataaattgtcagttttgccccctgaagttggtgctttgaagaatatgaaagtgctgtcatttaacaacaacatgctagtttctgtccctgcagtagaactgcggcaatgtgttatgctggaggaattatcattagaacataacaagcttgtccggcctctattggatttcaggtcaatgcccaagctccgaattttgcgcttgtttggaaatcctctagagttccttccagaaattttgccattgcataacctcaggcatgtcacacttgcaaatattagaattgaagcagtggaaagtcttaaatctgtcactgtacagatagagactgagaatagttcctacttcattgcggccaggcacaaacttagtgcctttttctctctagttttccgtttctcttcctgtcaccatcctttgctagcttctgctttggtcaaaataatggaagatcgtagcaaccacattgcaattagcaaagaagagaatgctgtcaggcagcttataagcatgataagcagtgataatcgtcatgtggttgagcaagcatgtcttgctatctcatcactggcatctgatatttcttcagcaatgcagctgattaagtgtgacattatgaagcctattgaagctgtactaaaatcatctgatgaagaagaactagtatcagtattgcaagttgtagtcaccttaactttcgtttctgatcatgttgctcaaaaggtgttgacaaaggatgtgttgaagtcattgaaagcactttgcgcacacaagaactctgaggtgcaacgtctatctctgtttgcaattggcaatttggctttctgtttggagactcgtcgcatcctcatgcattctgaaagcatgtgtgacctgttaatccgattaactatttcacaagagtgtcgtgtcagcaaggcagctgcgcgcgctttggcaatcctaggggagaatgagaacttacgtcgagcaataagaggaaggccagttgcaaagaagggtctacgcatcctatcaatggatggtggtggcatgaaaggccttgcaactgttcaaatgcttaaacagatagagcaaggaactgggaaacgcatacatgaaatgtttgacctcatatgtggtacatccactggtggcatgcttgcaatggctcttgggatcaagcagatgactttggatcagtgtgaagaaatatacacaaaacttggtgattcccttttgccttttgaagtttccttgccaatgccaatgttgccaactgaacttttaattttcctaggaaaacttgtatttactgaacctatcccaaaggatgaagctgctacgtggaaggagaagattgatcaacttttcaaaagttcctcacaaagttttagagtggttgtacatgggtccaaggtattaatgaagtgataaatttggtatcctgtcatcatgtgtcatgtttcatgttgtgcacaatggactactggctaaggacttaattacagcacagtgcagatcaatttgagaggttactaaaggaaatgtgcgagaatgaagatggtgaccttctaattgaatctgctgtaaaaggcattccgaaggtctttgctgtatccactttagtcagtgtcattcctgctcaaccgtatatattccgaaactatcagtatcctcctggcactctggaggtatcaccaggaatggcagaaagtccatcaattggtgcaattggcacggctgtttctggtgcaccagttggtattaaacgtggtgccttcatggggagctgcaagcatcgcgtgtgggaagccataagagcatcgtctgcagcaccatattatctggatgatttctctatgcaaatcgttggcaagatggagctattgtagccaacaatcctacaatctttgccattagagaagcacaacttttgtggccagatgcacgaatagattgtctagtctcgataggatgtggctcagttccaactaagagtcgccgaggtggatggcgctacttggacacagggcaagtgttaatagaaagtgcatgctcagtggagagagttgaagaaactttggatacactgataccgatgcttcctgaaatgcaatatttccgctttaatccagtggatgaacggtgtggtatggagttagatgaaactgatcctactatctggctgaagttggaagctgcaactgatgagtacattcagaagaactttctgtctgtcaagaatctttgtgagcttctggtcccaaggtaccaagaggaagaaaagccatcagatatttacaaatctctttcattttcaagactgacatcgttaaatcaagaggcttcatttagtcctgattttggaaagaaaataaatcatgcacgttcccttgaatccttctgctcccagaatggtattaggttagctctaatgaatagcacttctgggtttgggaagccagccactgcacttcctaccccaataacttctcccttgtttactggaagtttcccatctagtccacttctatatagtccagagggcactcaacggatcagtcgaattgacctagttcctccacttagtttggatggccacccaactacaaagtcctcacctccaacatcaccattgaagtcaagacagccatctgcacatgttcggtcattgtatgataaactgcagaatatgcctcaagttggtgtgatacacttggctcttcaaaatgattcaactggttcagtattgagttggcagaatgatgtatttgtggtcgctgaacccggggaacttgcagacaggtttctgcaatctgtcaaaactatcttgtcaaccttgttgcgtgggtgtaatagaaagggtgcatattccctgtccaagatttcatgtttatctgagttggttgctgaatggccatcttttgaaatcggtgggatacaccaccgctatataggtcgacaaacacaagtaatggaagataaccaagaaattggcgcatatatgtttaggaggacagtgcctgctgttcacatggcacctgaagatgttcgatggatggttggagcatggagggagaggattatcatatgcagtggtaagtatggccttgctcatggcctggtcaaggcattcatggattgtggtgccaaagcagtcatctcgtcgtccatcgagcctccggattccaagacaatagtctaccatgggatggatgtcaatagaagcctagagaatggcaagtttgtcatccgtgatgaagaagcggacgaatcagagcctgaacctgtcagccctataagcgactgggaggacagtgatgtggagaaaggcggcaaccatgacgtggatgatgaggagtacctggctcagttcatgtgcctgatgtatgacaaattgttccgtgagggtgtgactgtggatacggctctgcagcaagcactccgctcacatcccaagttgaagtacagctgccacttacccaacgttttgtagttagggacattattgacaaaccatacataagtatagcaaaatggacatggataacagggaatgaataaggattgggtggattttttagttgggttatagaggtctatactttgttcgttgtgcaggcatggtgacagaataaaagcatgaaggcattgcactgcatgtgcatttttgctgtagttgtgagaacgggcattttgtttcgcaaatactatgctgacttttgacgttcagttgctagtttgcggctaacactaaggctcgctccatttaagtactgcttacacattagttgttgccctcctataactgtttatatattataaagcagaaaaaaaatagaagatctaatcaaggtgctcttgcacctacagttgaacacatcatccatacacagagcgcaacagcagtttcc

SEQ ID NO: 27119 - DNA, 2960 bp, Zea Mays
taacttgtgagttgtgacggggtagcataaattgactcgtcgtgcaaataactcacagatgtacaaataaccaactacaggaacggaggaacctgaactgcttgcacgcctcaagacgcatgcaagcacgccctgcccgggtgaggagaaagaagaggttctgcaccggcagcaagccgccacgcgccagcgcatgcctttgtcagttggaatggagggtatattaacatggatttcctatatactctggcgaatgttacagacggggtgttacatcacagtcacacctcgcggttttcttcccatttgacgacgctcccgcacggccgcacgcacgcgggaccgtcacctatggctatatttacaaagggcatcttgcctgctgcagccggccaccaggaggaagaggacgacgggcatgctcggtcacttcatggctccggcggctcgcacagggcaagaggatcgaaagacacgaccctgtcaacccatgatatataccaagggtcgtcgtgcgtgtgctgccgagttactagttagaggaaggggtcgtcagaagtctatgatgggctcgccgatggtgaggttgcgctccaccgtccacgggaggttgaagagcttggccgtgatgaacttgaagatcttgttcacgttgatgttgtgcgtcgcgctcgagaagaagagggtcgccttcatcgctcttgcgtatgctctggcctgttgggaacacacaaaccacatttgttagcgatcgacacgcacattagtattgtttcgataggaatggaacttcgcaacactccactctggagctgtagtgctgtagcacaagtaacaactctagcctagatgcaaagactgaacttctcatctttcagtgccactgacagaaatgcagctaaagcttcctaacagcagttcagcacagccaaataaatcccaggaacctcccttctttttctcagccagatgcaacgtagccgtcgattccttttagcatgtccggtgaggagtgaccatcagtttacatcctgtagaccaagggcccacaaacaagattgacgtacactcctaattccgacgtgcggcgactggcaaacggacacgaaaatggagaccggagtaccagaccttgcatgtccaattgccaagttttttctaacactcttgaccacttcagttttcgtctatcgatataagacgttgtctgggcctacaactacaactacctaatagtagttcactatggctccaatcgacaccaaggcccacttgagcttcaatgtgcataagtaggcgagtactatctgctcagagcagtctttacttgtctactgtaaccgattcaagttctgttttgggttctacaacgctgtcgcctgtcggtccttgtcacaggaatgcccaaccgacactgagtctgtggatgtaatcacactagaaataaatctagggttcatggcggtggagcacataaagaagcccaaaaatgtttcatctagaaagattcaagaacagttgcctagctatgggttatggtagtttttatatatctcacgtgacttcaactttcaggcctttgttgaactgcactgtttcagatgaaacaggcatgtgcaaccacttctcccctcgtcacaaccaaggcaattctcatctttctatgccagcaccagataaattacatcggggatgctgaagacccccatatgcaagaaacaaagctaccaagaatcaaatttcgatcagaacaaaccagtactgtaaaatgcacagctcacctggttaacgatggcccattgcatctcaagaggaagctgagcaaagtcatcaaactttgtcccgattaggattggaatagccgtctgccaagaggagagggggttaaaaaattaaagcactgctcagtaacaatgccaagctccaagcacaatgcgcactagtactatccatcttcaatactgctaaacgtgtgagaacaaatcacagagttatcaaattgttccaaacagttatctgaaggagagtgagcggcagcccatctgctactgactgtttgtgtcaattcgtaatagttttttttcgccatatgttccgtgagcacgaaatgttcagctatatcatcaagaggctacagaaagaaaacgcgggatgtacacgaagtgttcagcacagagaaatgcacaccaaccttattccatttcctcgccctcccgtaccaatctacaatgctgcacaaccaaacaaagaatgagcaacaaacaagaatttgctgtgaaactctggattctagttgtttgtaatcgatgtaaacactaacttattaagcgtgcagcggctcgtgagatcgaacatgtacaggatcgccacggcgtccttgcacgcgattgggacgtggtcgacggactggtggtctcctgcatccgtttcacaggcgaatggaaatgaaacgatcgagaaaggttggaaatctggcctctgagccaaagcaaccagggaacagaatcgctgatccaatggggtgcctgaggtttacctgccacatcccagatgctgtaggcaatccttgctcccctgacgggcatcgtcttgtccatgagattcaggcccgtcatctgcaagccgttctgctcctccccgtcatctcccacatacttaacctgcggatgaacgaacatccacgagaaggttaaacttacagcgacgacgcgttggtggtttctcgctcagatttgcacagcggttaaggaactgcacgagcacgatgtgaggaaggaataatagtagctgtatgtaggcaccaaaccaaaccaaaccaaaccagatccgccgtcaagattacacagcaagacaataagacaggtcaacagcatcaaacgacaagacgacgaggagggaagacgcgtcgagggtgcagacgtgcagtacagagcatatccggattaagttatttatttact

SEQ ID NO: 27120 - DNA, 1425 bp, Zea Mays
gtcaatttctagccttgcagaaattctcggccgccgccgcctccgtcaagtcctcccctccccgccgccggctccaggccgctgtccctctccgtctccgcgcgtccgctgtaccgccaagaccatgtcctcgcgacaaccgtggcgatggcggcggcgggccgcagcgaccgcgccgcgtcccccgcgcctccgtccgccacagcggacggcgcccggccggtggtggaggtcgccgcgccggcggagaccgcgcgccgcgccaagatcggggtgtacttcgccacgtggtgggcgctgaacgtgatcttcaacatctacaacaagaaggtgctgaacgcgttcccgtacccgtggctcacgtcgacgctgtccctcgccgccggctccgccatcatgctcgcgtcctgggccaccaggatcgccgaggcgccccagacggacctcgacttctggaaggcgctcactcccgttgcgatcgcgcacacgatcgggcacgtcgcggcgacggtgagcatggccaaggtggccgtgtcgttcacgcacatcatcaagagcggggagccggcattcagcgtgctcgtctccaggttcttcctcggcgagcacttcccggcgccggtctacttctccctcctcccgatcatcggtgggtgcgcgctcgccgccgtcaccgagctcaacttcaacatggttgggttcatgggggcaatgatctcgaacctggcgttcgtcgtccggaccatcttctccaagaaggggatgaagggcaagtccgtgagcgggatgaactactacgcctgcctctccatcatgtcgctggtgatcctcctccccttcgccgtcgccatggagggacccaagctctgggcggcgggctggcagcaagcagtcgccgagatcggccccaacttcgtctggtgggtggctgcgcagagcgtgttctaccacctgtacaaccaggtgtcgtacatgtcgctggacgagatctcgccgctcacgttctccatcggcaacaccatgaagaggatctccgtcatcgtcgcctccatcatcatcttccagacgcccgtccagcccatcaacgcgctcggagccgccatcgccatcctcggaaccttcatctactcccaggcaaagcagtaacgccttgcattaattggcgtctagatggcctgccctcatcagttcaccgcggatcagctcggtgctcgaagatgacagcttatgacctttgagaatgtctactaagaatcgccctttgtataatactactagatcctctcttttttgtattttctttcctaggactagcttccagtgttactgggctcatttcgtggtgtttctattatgactaagattagagagagaatgagagatggatccatctaaataaaggttccagattttttttcccctctc

SEQ ID NO: 27121 - DNA, 894 bp, Zea Mays
gttgacgagtatggccggcaggccgcggcacgcgagggccgtccagtttccggaggatgcagcctacattacatatacgtctctcttggtcacaagacggcatcctgtgatgagaatatttccaggaagattcttttgtcaatttctagccttgcagaaattctcgggttcatgggggcaatgatctcgaacctggcgttcgtcgtccggaccatcttctccaagaaggggatgaagggcaagtccgtgagcgggatgaactactacgcctgcctctccatcatgtcgctggtgatcctcctccccttcgccgtcgccatggagggacccaagctctgggcggcgggctggcagcaagcagtcgccgagatcggccccaacttcgtctggtgggtggctgcgcagagcgtgttctaccacctgtacaaccaggtgtcgtacatgtcgctggacgagatctcgccgctcacgttctccatcggcaacaccatgaagaggatctccgtcatcgtcgcctccatcatcatcttccagacgcccgtccagcccatcaacgcgctcggagccgccatcgccatcctcggaaccttcatctactcccaggcaaagcagtaacgccttgcattaattggcgtctagatggcctgccctcatcagttcaccgcggatcagctcggtgctcgaagatgacagcttatgacctttgagaatgtctactaagaatcgccctttgtataatactactagatcctctcttttttgtattttctttcctaggactagcttccagtgttactgggctcatttcgtggtgtttctattatgactaagattagagagagaatgagagatggatccatctaaataaaggttccagattttttttcccctctc

SEQ ID NO: 27122 - DNA, 821 bp, Zea Mays
cgcgttttgatcgcgcctctcgtccccgggcaatcgctgttgacgagtatggccggcaggccgcggcacgcgagggccgtccagtttccggagggttcatgggggcaatgatctcgaacctggcgttcgtcgtccggaccatcttctccaagaaggggatgaagggcaagtccgtgagcgggatgaactactacgcctgcctctccatcatgtcgctggtgatcctcctccccttcgccgtcgccatggagggacccaagctctgggcggcgggctggcagcaagcagtcgccgagatcggccccaacttcgtctggtgggtggctgcgcagagcgtgttctaccacctgtacaaccaggtgtcgtacatgtcgctggacgagatctcgccgctcacgttctccatcggcaacaccatgaagaggatctccgtcatcgtcgcctccatcatcatcttccagacgcccgtccagcccatcaacgcgctcggagccgccatcgccatcctcggaaccttcatctactcccaggcaaagcagtaacgccttgcattaattggcgtctagatggcctgccctcatcagttcaccgcggatcagctcggtgctcgaagatgacagcttatgacctttgagaatgtctactaagaatcgccctttgtataatactactagatcctctcttttttgtattttctttcctaggactagcttccagtgttactgggctcatttcgtggtgtttctattatgactaagattagagagagaatgagagatggatccatctaaataaaggttccagattttttttcccctctc

SEQ ID NO: 27123 - DNA, 478 bp, Zea Mays
aaaaaaggtcctaaccaatgtaaaagatgctaccaggttgggcatgttggacatgtccctactaactcgttgttgaattaccaccgatagttcctactgaatctaggtaaattgcaacttctatttcgttttagtcacacaaacacaaccgcctgctactgctagtttaggtccaacaacaagaacaatggcagcgtctatttgtagtcctcttcctctcagtccaggagaccgtgatgtttccacgctaagacacggccaattagttataaaccggcctacggtagaatctacctagcaggattagtctaagatatatacctaccaactgggattacatcaacgatcaaatcaaaagagacattctttggttaaaaaaaggagaatcaaaagagacataccaaagcaaccataatcctcttattaattgagttttaggcgcatctcaaggcaataatttagcctcagcagatagacg

SEQ ID NO: 27124 - DNA, 1284 bp, Zea Mays
gcgtacgtgtacgtaacgtaacctcgtgagagccagccaaccgtctctggccgccgcaccgtgacgttttcactgcgaggaattggctgaattctcttgtgtactccaagtttggttccgttttggttgagttctccagcgctctgttcttgaagatggaaacggcaacacactgacaggaacttttctggtttctcttacttgcagttgcttttctggtttctcttacttgcagttgcaggttgtcgcggcgggaggagatgctgggcaatcgagcttcagcgccaactcaccccccaccaccggcgccgggttcgtcgccctcgacgtcggtgagctctcgtctctggccggcgacgccggccctccgggcacgcccatcgcgccgccccggacacccagggtggtgaggtcgctgtcgaggaagggcgacaggaagccggccgacgccgacgccaacgccaccgccggtggcggtagagagcggccgcagctgttcgtacacgtggctgccggcgacctcggggacgcgcccggcagcgcccggctggtcgtccacacgccgctggccggcacgcccggaagcaagtcccggcggttcggaaggcgggcggcgccgtggctcgatccccgcagggtggtcttcctcttcgccacgctgtccagcgtgggaacactgatcctcctctacttcacgctatccatgagcagggcggactccagtagcggcggcggcggcggcagcggcggcagcgacgcccggtgaaacgccagccgtctagagcgagggggcgtttggcctgatctgagaatttccagatctgcaaagatttacaagaacaccgtggtccaagcatatagaagaaaaggctgtggtgctgcgggcctatctcatggatgaatatagagcgagccaacgacagcgaagaagtcgagccggatgtggatttgatggagaagtttgtgatggtagacatcgagccaattgtatatttgggactctaaacatagtgtttcgcaatattgtcatccaaaagatttacttcacaaaaaagtgactacaaatatgttctaattgattatactaccatttactatataatcttctttttattacttctttccctatattttgtacctaaggaaaccaaattatcttgtgtgtacgttctgtctccacgacgccatggatgaccggccaccgtcttgcccacagccaccctgtaccccgtccaggccctcaggctcaccgagataattggatttttgccactcacattgttg

SEQ ID NO: 27125 - DNA, 1327 bp, Zea Mays
gttgttcaggctccacacttgacagggcacagggcagggcgccaggagacggggagaatctttcgccctgaaaaaagagcaaagtgtcagccctttccccccggttcctagttttggtactactacaggctcccgctgcatcatccccaacgaaccagcagagctcgcaagcaacaaaagagaaggacgaagcaggcgcagccgccacacggacacgcagcagagcatcgccgcagcggtccagaggcatgggggccgccgccgccgcaaagcacgccttgcaggttgtcgcggcgggaggagatgctgggcaatcgagcttcagcgccaactcaccccccaccaccggcgccgggttcgtcgccctcgacgtcggtgagctctcgtctctggccggcgacgccggccctccgggcacgcccatcgcgccgccccggacacccagggtggtgaggtcgctgtcgaggaagggcgacaggaagccggccgacgccgacgccaacgccaccgccggtggcggtagagagcggccgcagctgttcgtacacgtggctgccggcgacctcggggacgcgcccggcagcgcccggctggtcgtccacacgccgctggccggcacgcccggaagcaagtcccggcggttcggaaggcgggcggcgccgtggctcgatccccgcagggtggtcttcctcttcgccacgctgtccagcgtgggaacactgatcctcctctacttcacgctatccatgagcagggcggactccagtagcggcggcggcggcggcagcggcggcagcgacgcccggtgaaacgccagccgtctagagcgagggggcgtttggcctgatctgagaatttccagatctgcaaagatttacaagaacaccgtggtccaagcatatagaagaaaaggctgtggtgctgcgggcctatctcatggatgaatatagagcgagccaacgacagcgaagaagtcgagccggatgtggatttgatggagaagtttgtgatggtagacatcgagccaattgtatatttgggactctaaacatagtgtttcgcaatattgtcatccaaaagatttacttcacaaaaaagtgactacaaatatgttctaattgattatactaccatttactatataatcttctttttattacttctttccctatattttgtacctaaggaaaccaaattatcttgtgtgtacgttctgtctccacgacgccatggatgaccggccaccgtcttgcccacagccaccctgtaccccgtccaggccctcaggctcaccgagataattggatttttgccactcacattgttg

SEQ ID NO: 27126 - DNA, 2691 bp, Zea Mays
gttgttcaggctccacacttgacagggcacagggcagggcgccaggagacggggagaatctttcgccctgaaaaaagagcaaagtgtcagccctttccccccggttcctagttttggtactactacaggctcccgctgcatcatccccaacgaaccagcagagctcgcaagcaacaaaagagaaggacgaagcaggcgcagccgccacacggacacgcagcagagcatcgccgcagcggtccagaggcatgggggccgccgccgccgcaaagcacgccttgcaggttgtcgcggcgggaggagatgctgggcaatcgagcttcagcgccaactcaccccccaccaccggcgccgggttcgtcgccctcgacgtcggtgagctctcgtctctggccggcgacgccggccctccgggcacgcccatcgcgccgccccggacacccagggtggtgaggtcgctgtcgaggaagggcgacaggaagccggccgacgccgacgccaacgccaccgccggtacgtcagtccaaacgattagtggcggtagagagcggccgcagctgttcgtacacgtggctgccggcgacctcggggacgcgcccggcagcgcccggctggtcgtccacacgccgctggccggcacgcccggaagcaagtcccggcggttcggaaggcgggcggcgccgtggctcgatccccgcagggtggtcttcctcttcgccacgctgtaaggaaactgtccccttcggttgtcagtccttacgatttctaagtttagaattaaaaaaaattagaaaagaaagaaaacatatactatgacatatatcacctcaacatggtaaaagtggcattacgtaatggctgttaacttgtcataatttgcctaatttttgtgcttaagtttaaacttatttctttaattaaaatgactaaccttaaataaagtgtggcacacttagccacaaattaaacagcatgtacgtcttacagttattgcccgtgctggtagcttaggctaatcaccatgaggtttcatgaggtgttttatgtattaattagccttccacgtcagctatttagatgacatgttacatcatttaagaaggaagagttttatgaagtttcatagggatgaaaccatgttaacccattttcaatgtcttggaaactatgtgaaacctccactgagagtgttttgtttcatcttcatatatttgagtaaatcctattggttatttatatgcagcatttaagaagtatgttgacatatgaaatagtgagatgaaactctttattaagagagagtgtttcatttatccataaagttgatgtggtatttttggaaacagagacataacatcctcactgtgacttgccttagtgtgtggcaaaagtggcagttgtgattaatactcctacatgaagtacccagacgcttaggctagcggccctagcgcagttaagcgagcctgccctgaacaagctacggagtgacagtgaacgccagtaaattctccagtgtaccatcttcagtgagtcagtagcgcgtacagagtacacaaccaaacccaccaacaaatgggttccatcaattctatgcgatggatctcttatcaaaatgcactgttccgcagccccaaggacacgttcgtttcgttgcggcagaacgatggcgatggcgatggccatgctcgcagtggcagggttgcagagcgcaggacggactgcccgcgtcgcaggttttgtcggccccagcctccgtcgggttgccgttgcagagctagctcgggggctctggcctctcggccgtcgtcgtcgccttcgcaacagcgacagcagtgataaataaggacggagaccgacgagcgaccgccgtggcgagcacgacgctgccgtgccgagtgcggcgccttagtgtttctcggtccatgtctcccgtcccgtccagcacatagtttcttgttattggaaaagtctgttcggatttctgaatccaagtccagaatttgatgtcttcagctagctgaaactctagtgtggcttacgcacgcccgttcctgatttctgcaggtccagcgtgggaacactgatcctcctctacttcacgctatccatgagcagggcggactccagtagcggcggcggcggcggcagcggcggcagcgacgcccggtgaaacgccagccgtctagagcgagggggcgtttggcctgatctgagaatttccagatctgcaaagatttacaagaacaccgtggtccaagcatatagaagaaaaggctgtggtgctgcgggcctatctcatggatgaatatagagcgagccaacgacagcgaagaagtcgagccggatgtggatttgatggagaagtttgtgatggtagacatcgagccaattgtatatttgggactctaaacatagtgtttcgcaatattgtcatccaaaagatttacttcacaaaaaagtgactacaaatatgttctaattgattatactaccatttactatataatcttctttttattacttctttccctatattttgtacctaaggaaaccaaattatcttgtgtgtacgttctgtctccacgacgccatggatgaccggccaccgtcttgcccacagccaccctgtaccccgtccaggccctcaggctcaccgagataattggatttttgccactcacattgttg

SEQ ID NO: 27127 - DNA, 1791 bp, Zea Mays
gttgttcaggctccacacttgacagggcacagggcagggcgccaggagacggggagaatctttcgccctgaaaaaagagcaaagtgtcagccctttccccccggttcctagttttggtactactacaggctcccgctgcatcatccccaacgaaccagcagagctcgcaagcaacaaaagagaaggacgaagcaggcgcagccgccacacggacacgcagcagagcatcgccgcagcggtccagaggcatgggggccgccgccgccgcaaagcacgccttgcttttctggtttctcttacttgcagttgcaggttgtcgcggcgggaggagatgctgggcaatcgagcttcagcgccaactcaccccccaccaccggcgccgggttcgtcgccctcgacgtcggtgagctctcgtctctggccggcgacgccggccctccgggcacgcccatcgcgccgccccggacacccagggtggtgaggtcgctgtcgaggaagggcgacaggaagccggccgacgccgacgccaacgccaccgccggtggcggtagagagcggccgcagctgttcgtacacgtggctgccggcgacctcggggacgcgcccggcagcgcccggctggtcgtccacacgccgctggccggcacgcccggaagcaagtcccggcggttcggaaggcgggcggcgccgtggctcgatccccgcagggtggtcttcctcttcgccacgctccccaaggacacgttcgtttcgttgcggcagaacgatggcgatggcgatggccatgctcgcagtggcagggttgcagagcgcaggacggactgcccgcgtcgcaggttttgtcggccccagcctccgtcgggttgccgttgcagagctagctcgggggctctggcctctcggccgtcgtcgtcgccttcgcaacagcgacagcagtgataaataaggacggagaccgacgagcgaccgccgtggcgagcacgacgctgccgtgccgagtgcggcgccttagtgtttctcggtccatgtctcccgtcccgtccagcacatagtttcttgttattggaaaagtctgttcggatttctgaatccaagtccagaatttgatgtcttcagctagctgaaactctagtgtggcttacgcacgcccgttcctgatttctgcaggtccagcgtgggaacactgatcctcctctacttcacgctatccatgagcagggcggactccagtagcggcggcggcggcggcagcggcggcagcgacgcccggtgaaacgccagccgtctagagcgagggggcgtttggcctgatctgagaatttccagatctgcaaagatttacaagaacaccgtggtccaagcatatagaagaaaaggctgtggtgctgcgggcctatctcatggatgaatatagagcgagccaacgacagcgaagaagtcgagccggatgtggatttgatggagaagtttgtgatggtagacatcgagccaattgtatatttgggactctaaacatagtgtttcgcaatattgtcatccaaaagatttacttcacaaaaaagtgactacaaatatgttctaattgattatactaccatttactatataatcttctttttattacttctttccctatattttgtacctaaggaaaccaaattatcttgtgtgtacgttctgtctccacgacgccatggatgaccggccaccgtcttgcccacagccaccctgtaccccgtccaggccctcaggctcaccgagataattggatttttgccactcacattgttg

SEQ ID NO: 27128 - DNA, 1757 bp, Zea Mays
gttgttcaggctccacacttgacagggcacagggcagggcgccaggagacggggagaatctttcgccctgaaaaaagagcaaagtgtcagccctttccccccggttcctagttttggtactactacaggctcccgctgcatcatccccaacgaaccagcagagctcgcaagcaacaaaagagaaggacgaagcaggcgcagccgccacacggacacgcagcagagcatcgccgcagcggtccagaggcatgggggccgccgccgccgcaaagcacgccgttgtcgcggcgggaggagatgctgggcaatcgagcttcagcgccaactcaccccccaccaccggcgccgggttcgtcgccctcgacgtcggtgagctctcgtctctggccggcgacgccggccctccgggcacgcccatcgcgccgccccggacacccagggtggtgaggtcgctgtcgaggaagggcgacaggaagccggccgacgccgacgccaacgccaccgccggtggcggtagagagcggccgcagctgttcgtacacgtggctgccggcgacctcggggacgcgcccggcagcgcccggctggtcgtccacacgccgctggccggcacgcccggaagcaagtcccggcggttcggaaggcgggcggcgccgtggctcgatccccgcagggtggtcttcctcttcgccacgctccccaaggacacgttcgtttcgttgcggcagaacgatggcgatggcgatggccatgctcgcagtggcagggttgcagagcgcaggacggactgcccgcgtcgcaggttttgtcggccccagcctccgtcgggttgccgttgcagagctagctcgggggctctggcctctcggccgtcgtcgtcgccttcgcaacagcgacagcagtgataaataaggacggagaccgacgagcgaccgccgtggcgagcacgacgctgccgtgccgagtgcggcgccttagtgtttctcggtccatgtctcccgtcccgtccagcacatagtttcttgttattggaaaagtctgttcggatttctgaatccaagtccagaatttgatgtcttcagctagctgaaactctagtgtggcttacgcacgcccgttcctgatttctgcaggtccagcgtgggaacactgatcctcctctacttcacgctatccatgagcagggcggactccagtagcggcggcggcggcggcagcggcggcagcgacgcccggtgaaacgccagccgtctagagcgagggggcgtttggcctgatctgagaatttccagatctgcaaagatttacaagaacaccgtggtccaagcatatagaagaaaaggctgtggtgctgcgggcctatctcatggatgaatatagagcgagccaacgacagcgaagaagtcgagccggatgtggatttgatggagaagtttgtgatggtagacatcgagccaattgtatatttgggactctaaacatagtgtttcgcaatattgtcatccaaaagatttacttcacaaaaaagtgactacaaatatgttctaattgattatactaccatttactatataatcttctttttattacttctttccctatattttgtacctaaggaaaccaaattatcttgtgtgtacgttctgtctccacgacgccatggatgaccggccaccgtcttgcccacagccaccctgtaccccgtccaggccctcaggctcaccgagataattggatttttgccactcacattgttg

SEQ ID NO: 27129 - DNA, 2021 bp, Zea Mays
gttgttcaggctccacacttgacagggcacagggcagggcgccaggagacggggagaatctttcgccctgaaaaaagagcaaagtgtcagccctttccccccggttcctagttttggtactactacaggctcccgctgcatcatccccaacgaaccagcagagctcgcaagcaacaaaagagaaggacgaagcaggcgcagccgccacacggacacgcagcagagcatcgccgcagcggtccagaggcatgggggccgccgccgccgcaaagcacgccgtgagtccctcgccccgcgtacggcgtacgtgtacgtaacgtaacctcgtgagagccagccaaccgtctctggccgccgcaccgtgacgttttcactgcgaggaattggctgaattctcttgtgtactccaagtttggttccgttttggttgagttctccagcgctctgttcttgaagatggaaacggcaacacactgacaggaacttttctggtttctcttacttgcagttgcttttctggtttctcttacttgcagttgcaggttgtcgcggcgggaggagatgctgggcaatcgagcttcagcgccaactcaccccccaccaccggcgccgggttcgtcgccctcgacgtcggtgagctctcgtctctggccggcgacgccggccctccgggcacgcccatcgcgccgccccggacacccagggtggtgaggtcgctgtcgaggaagggcgacaggaagccggccgacgccgacgccaacgccaccgccggtggcggtagagagcggccgcagctgttcgtacacgtggctgccggcgacctcggggacgcgcccggcagcgcccggctggtcgtccacacgccgctggccggcacgcccggaagcaagtcccggcggttcggaaggcgggcggcgccgtggctcgatccccgcagggtggtcttcctcttcgccacgctccccaaggacacgttcgtttcgttgcggcagaacgatggcgatggcgatggccatgctcgcagtggcagggttgcagagcgcaggacggactgcccgcgtcgcaggttttgtcggccccagcctccgtcgggttgccgttgcagagctagctcgggggctctggcctctcggccgtcgtcgtcgccttcgcaacagcgacagcagtgataaataaggacggagaccgacgagcgaccgccgtggcgagcacgacgctgccgtgccgagtgcggcgccttagtgtttctcggtccatgtctcccgtcccgtccagcacatagtttcttgttattggaaaagtctgttcggatttctgaatccaagtccagaatttgatgtcttcagctagctgaaactctagtgtggcttacgcacgcccgttcctgatttctgcaggtccagcgtgggaacactgatcctcctctacttcacgctatccatgagcagggcggactccagtagcggcggcggcggcggcagcggcggcagcgacgcccggtgaaacgccagccgtctagagcgagggggcgtttggcctgatctgagaatttccagatctgcaaagatttacaagaacaccgtggtccaagcatatagaagaaaaggctgtggtgctgcgggcctatctcatggatgaatatagagcgagccaacgacagcgaagaagtcgagccggatgtggatttgatggagaagtttgtgatggtagacatcgagccaattgtatatttgggactctaaacatagtgtttcgcaatattgtcatccaaaagatttacttcacaaaaaagtgactacaaatatgttctaattgattatactaccatttactatataatcttctttttattacttctttccctatattttgtacctaaggaaaccaaattatcttgtgtgtacgttctgtctccacgacgccatggatgaccggccaccgtcttgcccacagccaccctgtaccccgtccaggccctcaggctcaccgagataattggatttttgccactcacattgttg

SEQ ID NO: 27130 - DNA, 1556 bp, Zea Mays
tgttgttcaggctccacacttgacagggcacagggcagggcgccaggagacggggagaatctttcgccctgaaaaaagagcaaagtgtcagccctttccccccggttcctagttttggtactactacaggctcccgctgcatcatccccaacgaaccagcagagctcgcaagcaacaaaagagaaggacgaagcaggcgcagccgccacacggacacgcagcagagcatcgccgcagcggtccagaggcatgggggccgccgccgccgcaaagcacgccgtgagtccctcgccccgcgtacggcgtacgtgtacgtaacgtaacctcgtgagagccagccaaccgtctctggccgccgcaccgtgacgttttcactgcgaggaattggctgaattctcttgtgtactccaagtttggttccgttttggttgagttctccagcgctctgttcttgaagatggaaacggcaacacactgacaggaacttttctggtttctcttacttgcagttgcttttctggtttctcttacttgcagttgcaggttgtcgcggcgggaggagatgctgggcaatcgagcttcagcgccaactcaccccccaccaccggcgccgggttcgtcgccctcgacgtcggtgagctctcgtctctggccggcgacgccggccctccgggcacgcccatcgcgccgccccggacacccagggtggtgaggtcgctgtcgaggaagggcgacaggaagccggccgacgccgacgccaacgccaccgccggtacgtcagtccaaacgattagtggcggtagagagcggccgcagctgttcgtacacgtggctgccggcgacctcggggacgcgcccggcagcgcccggctggtcgtccacacgccgctggccggcacgcccggaagcaagtcccggcggttcggaaggcgggcggcgccgtggctcgatccccgcagggtggtcttcctcttcgccacgctggcggactccagtagcggcggcggcggcggcagcggcggcagcgacgcccggtgaaacgccagccgtctagagcgagggggcgtttggcctgatctgagaatttccagatctgcaaagatttacaagaacaccgtggtccaagcatatagaagaaaaggctgtggtgctgcgggcctatctcatggatgaatatagagcgagccaacgacagcgaagaagtcgagccggatgtggatttgatggagaagtttgtgatggtagacatcgagccaattgtatatttgggactctaaacatagtgtttcgcaatattgtcatccaaaagatttacttcacaaaaaagtgactacaaatatgttctaattgattatactaccatttactatataatcttctttttattacttctttccctatattttgtacctaaggaaaccaaattatcttgtgtgtacgttctgtctccacgacgccatggatgaccggccaccgtcttgcccacagccaccctgtaccccgtccaggccctcaggctcaccgagataattggatttttgccactcacattgttg

SEQ ID NO: 27131 - DNA, 1283 bp, Zea Mays
ccaacatgttgttcaggctccacacttgacagggcacagggcagggcgccaggagacggggagaatctttcgccctgaaaaaagagcaaagtgtcagccctttccccccggttcctagttttggtactactacaggctcccgctgcatcatccccaacgaaccagcagagctcgcaagcaacaaaagagaaggacgaagcaggcgcagccgccacacggacacgcagcagagcatcgccgcagcggtccagaggcatgggggccgccgccgccgcaaagcacgccttgcaggttgtcgcggcgggaggagatgctgggcaatcgagcttcagcgccaactcaccccccaccaccggcgccgggttcgtcgccctcgacgtcggtgagctctcgtctctggccggcgacgccggccctccgggcacgcccatcgcgccgccccggacacccagggtggtgaggtcgctgtcgaggaagggcgacaggaagccggccgacgccgacgccaacgccaccgccggtggcggtagagagcggccgcagctgttcgtacacgtggctgccggcgacctcggggacgcgcccggcagcgcccggctggtcgtccacacgccgctggccggcacgcccggaagcaagtcccggcggttcggaaggcgggcggcgccgtggctcgatccccgcagggtggtcttcctcttcgccacgctggcggactccagtagcggcggcggcggcggcagcggcggcagcgacgcccggtgaaacgccagccgtctagagcgagggggcgtttggcctgatctgagaatttccagatctgcaaagatttacaagaacaccgtggtccaagcatatagaagaaaaggctgtggtgctgcgggcctatctcatggatgaatatagagcgagccaacgacagcgaagaagtcgagccggatgtggatttgatggagaagtttgtgatggtagacatcgagccaattgtatatttgggactctaaacatagtgtttcgcaatattgtcatccaaaagatttacttcacaaaaaagtgactacaaatatgttctaattgattatactaccatttactatataatcttctttttattacttctttccctatattttgtacctaaggaaaccaaattatcttgtgtgtacgttctgtctccacgacgccatggatgaccggccaccgtcttgcccacagccaccctgtaccccgtccaggccctcaggctcaccgagataattggatttttgccactcacattgttg

SEQ ID NO: 27132 - DNA, 1450 bp, Zea Mays
atgaccttctccttgctctgcaggaagtcagacctcgcgctcctccacatggtcccctgtgccccgctcagccgcctcctcgacaatatccaggaggatgttgttgcaactgggggtatcgatacaaatgcagtaatctttgatcagtcatctggtcaaatcttgtgcacgcttactggtcactcaaagaagaacagatactatggaattgagatgtttggttctacatatagagtctcaagcatcattgacgttggcactagcctcctctgtacaaggtcagggacaccgttgtaatagagttgttgatatcgatgtcgtccgtgaactgactgtcgagaaggcctccgtggatacaggtgtactaaccccaaggccggtgctgttgaccccaaggccgagaacaaggtgctagattgaagatggcgcagaacattgccatcttgttgcccgcgctgaatgtgatcaaagaagaggtctgcaacgtgctctatgatggtgaaaaaatcctcgctgcactacttgctagaattcagtcattttgatttgctgcttacatgctgcattttcacgctcgcataggattagttttgctcgtgagttgtgtctgaccatctttagcttatgactggactacaggctacaaccatgcttgttcgtatatttagtatatttagctatgtttctttttggcgatttagtacccactatacctatgcctgtggaagtctagatcaccatctcttcaggagtaagcatttggcatctgctactttattttaagcatatgttgccagcttcagatatgttcttgacaacactaccatctagagaaatgtgaaaatatgttgttacataggactatacatacctactgtatatttagacctgacacaaatctaagtatataggaaaattgccaactatttattaaaaatatagacttattacatggaaggatcgggtgacaaaggtatgtgcttttcttttggttgctattgttcagttctccaatcacttatcatctgtgcttctcatgcaggctatagagaagataaaatctgccaggaataaatcatcgcaaggaaggtgagtatctcttggtatcttgtacaaactacaaagtgcagttgccaccacatcagcaccgctgcaacggaaagtacctctagaaaatgtgaccccaactttcatgattatatgttattcttagccttccctgtagtcatcaattctagatagggcatctcaatctatgcaggccaggtagcaattaggccaatagaagctgtatcttacaagcatgtcctcgagacacatgccagcgccttttcatttaaagtcatatgttactcatctaaatgcactatagggctgttcttctgcatgccagttgtgtttgaagagattgtgtaaacaaaacttaattattatggttgttagttcttag

SEQ ID NO: 27133 - DNA, 1709 bp, Zea Mays
cttaaaacctgaagccatttcgagctctccccgcgttttgcggtcgttgttttgcagaaaggcccttcgtcttttcgcgattcaacccgcggtcctcgcccgaaccccaatcaggttcggttggtgccccgtcgccatcccccgagcacaaaccctagcttgctgccgccgcctcctcctgctccgcctgcttcgaagcccttgactcgcttcaccgccgcgacgagcctctcaacaacttccgccacaacgacggacacgagcccctccaccgcctccgactcgtcgcctcggcccacctctttcttactagggcgccaccgctgttcgtgcagaggaacagagatgctgcatccgcatggacttcgccgccactgccctcctcgaatctacctccgcctcttccgccaacgtcgctggcaaggagatgtctggccgccacctcgcccacaacactaccccaacatgaccttctccttgctctgcaggaagtcagacctcgcgctcctccacatggtcccctgtgccccgctcagccgcctcctcgacaatatccaggaggatgttgttgcaactgggggtatcgatacaaatgcagtaatctttgatcagtcatctggtcaaatcttgtgcacgcttactggtcactcaaagaagaacagatactatggaattgagatgtttggttctacatatagagtgtaggcattaaatagaatcaggtctgcatacttatttttgtgcaatcaaagtagctgttagtgggttcctagaatgacaatgttggtttggttgagaaggatcatggaaatcagaaagtcttgctctcagacatcagtcttgatgaggatgcaaaaccaagaggggacaactgtgaatagtggtcattgttcgtcggcactgctcaagcatcattgacgttggcactagcctcctctgtacaaggtcaggggtaagtgtcttcctcccctttattagctgattcctcatcctctctgtctcttgttcgtattttgtagacctggatccgagatatcgctagctccctcttttttgttgtggccctcattgctcttccctaccaccagacaccgttgtaatagagttgttgatatcgatgtcgtccgtgaactgactgtcgagaaggcctccgtggatacaggtgtactaaccccaaggccggtgctgttgaccccaaggccgagaacaaggtgctagattgaagatggcgcagaacattgccatcttgttgcccgcgctgaatgtgatcaaagaagaggtctgcaacgtgctctatgatggctatagagaagataaaatctgccaggaataaatcatcgcaaggaaggtgagtatctcttggtatcttgtacaaactacaaagtgcagttgccaccacatcagcaccgctgcaacggaaagtacctctagaaaatgtgaccccaactttcatgattatatgttattcttagccttccctgtagtcatcaattctagatagggcatctcaatctatgcaggccaggtagcaattaggccaatagaagctgtatcttacaagcatgtcctcgagacacatgccagcgccttttcatttaaagtcatatgttactcatctaaatgcactatagggctgttcttctgcatgccagttgtgtttgaagagattgtgtaaacaaaacttaattattatggttgttagttcttag

SEQ ID NO: 27134 - DNA, 911 bp, Zea Mays
cgcgattcaacccgcggtcctcgcccgaaccccaatcaggttcggttggtgccccgtcgccatcccccgagcacaaaccctagcttgctgccgccgcctcctcctgctccgcctgcttcgaagcccttgactcgcttcaccgccgcgacgagcctctcaacaacttccgccacaacgacggacacgagcccctccaccgcctccgactcgtcgcctcggcccacctctttcttactagggcgccaccgctgttcgtgcagaggaacagagatgctgcatccgcatggacttcgccgccactgccctcctcgaatctacctccgcctcttccgccaacgtcgctggcaaggagatgtctggccgccacctcgcccacaacactaccccaacatgaccttctccttgctctgcaggaagtcagacctcgcgctcctccacatggtcccctgtgccccgctcagccgcctcctcgacaatatccaggaggatgttgttgcaactgggggtatcgatacaaatgcagtaatctttgatcagtcatctggtcaaatcttgtgcacgcttactggtcactcaaagaagataaccactttgaagtctgttccacgggatcaactctttgcaactggatcagcagataaggcaatttccatttaccataggtttaagtaaccactggaataatatggggtgtgcgagggattgctcgtgattttgctcgtgcatctctagcgtagtccgcatctcgtgctactacctacctgtttctgttgatgcatctctatgtgattctaacaaccaagaagcatatgtggcctttatttaatccaccataaagaagtatttggcatgttggccctatttcttttccggtgatcaagtacacttgcaatatcagaaatggtgctttc

SEQ ID NO: 27135 - DNA, 1754 bp, Zea Mays
cctccaagatttctccttcgatacacaagcacgatggctcacaacctgctgcccgtggccgtcgtcctcgccgtcgcactgctcatggccccagccgcgggttacccgtggctatcgtgtggcaccagcagcagcttcgcggccaacggcacataccaagaccacttcaacttcgccgccgccaccctgcccaagaacgcctcgacatcccctgacctttttgccagcatagtcgtcggcaccgtgccggagcagctctcagccatggccctttgccgcggcgacgtcaacagcacgacatgcttcagctgcctgaccgaggccttcggagacctgcccagcgcctgctccgacgacaaggctgccaccatctactacgatccctgcatggtccactactccgacgtgcacaccctccccggcgacgacgacaccggcccgtcgatcgacacgtaccccatcggcgacaaccagtacgtgaccgctgaccccggccagttcatacgcctgctggccgcgctcgtgaacgccaccgccgactacgccgcgtacaactccacgcggcggttcgcgactggccaggctgacaccggcttcgacccggagtttcccgagctctacgctctggctcagtgcacgccggaccagacgccggcgcagtgccacaagtgcctcgccgggctcatatcacagtcgctaggcgggttccagaaccgtgacggggccaggatgctcgcggtcagctgcacctacaggtacgagaccaagcccttctataacgggccggcgatggtgcggctggcctcaccaagctctggagcgccggcgccggcgcccgctgtgaactctcgggttcgtgcggcggatggagggaggcgaaagtaccatgtgccctgggtggcgattgcagttgtgctgccagctctagcagccatgaaccttgtggcctgcctctgcttccggaggcggcggcggcggctactgatcgcacaggccaaacaccagaatcccatgtactccactgaagcagaggacaccgaaatggtggactccatgatgatggacgtctccgccctacgggccgccacgggggatttcgacgagagcaacaagctcggcgaaggcggctttggcgccgtgtacaagggtgtcctcccggatggcgaggagatagcggtgaagcgtctgtccagtagctcgtcgcagggggtgcaggagctgaagaacgagctggcgctggtggccaagctgaagcacaggaacctcgtcaggctcatcggcgtctgcctggggcagcaggagaggctgctcgtctacgagttcctgcccaaccggagcctcgacctcatcctattcgacacggagaatgaagagcgtggacgacgacggctggactgggcgcagaggtacaagatcatcaacggagtcgctcgggggctgcagtacctccacgaggactcccagctcaaggtggtgcaccgcgacctcaaggccagcaacgtcctgctagacgagaacatgaaccccaagatctcggacttcggcctggccaggatctttggccggggccagacccaggccgtcacccgccgcgtcgtcggcacctacgggtacatggcgccggagtacatgatgcgggggaactactccgtcaggtcggacgcgttcagcttcggcgtcatggtgctggaggtcgtcacggggaggaagaacagcgacgatggctgcaacctcttggccacaatcgaccgtcc

SEQ ID NO: 27136 - DNA, 2375 bp, Zea Mays
aaagttaaaaaaacaaaaaaaaaatcggtaacagggactgggcctcagctagtcagctacaataaagtaaacaaccaccaccaaagcttcttccagcttgcacaatggcgaaccatctggtgccctgcgccgccattgtcgcagcggttgtgctgctcatgccctgcgccaccggttatccatggcccttttgccacgacagcgacaatttcaaggccaacagctcctaccaggcccatctcgacttcgtcgccgccaccctgcccatgaacgcatccgcgtccccggacctcttcgctaccgccgtcgtcggaaccgtcccggagcagctctgggctgtggggctctgccgtggcgacgtcaatgccacggcctgcttcaactgcctcacccaggccttccgagacctacagaacgactgctcgtacgacaagggcgcgaccatctactacgacccctgcatgctccactactcagacaaccaacagctcctcgccgacgacgagtccgatctcccctacttcatcagctacaacggaaacgtcacctcggaccaagcccggttcaacggactcgtggcagagctcgtgaacgccaccgccgagcacgccgcgtacaactccacgcggcggttcgccaccggcgagagcagagccggcttcgagccaaaggtgtacagtctagcgcagtgcacgccggacctgacggctgcgcggtgccggacgtgccttgaggcgatcatatcgcagtcgctggacgggttccagaacctcgtcggaggtcgggcgctctggatcaactgcacctaccggtacgagacggcgcccttcttcgacggaccggcgatggtgcagatagcaccaccgccgagctctggagcgccagcgccagcgcccacagtggcgccgtctatgcaaccgacttctgggacgccagcggcggtggccggcggaggcgggaggaagtacagtcgtctgccgagcgtggttgtcgcagccgtgctggctgcagtaacggccttgaaccttgcagcttgcctctgcttctggaggcggcgccggcgaacagcagaggagaagcagacatatcccatgtactccaccgtagcagaggacacggacatggtggactccatgatgatggacgcctctatcctgcgggccgccaccggggatttcgacgagagcaacaagctcggcgaaggcggtttcggcgctgtgtacaagggcgtcctcccggacggcggcgaggtagccgtgaagcggctatcgcagggctcgagtcggggagtcgaggagctgaagaacgagctcgcgctggtggccaagctgaggcacaagaacgtcgtcactctcgtcggcatctgcttggagcagcaggagcgcctgcttgtctacgagttcgtcgccaaccggagcctaaacctcatcattttcgacgcggagaaacgcgagcggctggactggaggcacaggcaccagatcatcaacggcatagctcgtggcttgcagtacctccacgaagactcccagctcaaggtagtgcaccgtgacctcaaccccagcaacatcctgctggacgcaaacatggaccccaagatctcgggcttcggcctggcgaggatcgtcgggcgggaccagcagacgcaggccgtcgtctcgcaaggcgtcgtcggcacctatggatacatggcgccggagtacgcgctgcgggggaactactccgtcaaatccgacgcttttagcttcggcgtcacggtgctggagatcatctcggggaggaagaacagcgcgatctacaacggtggaaagcctgacgatctcctcgacactgtatggcagcactgggaggctgggacggtggtggagacggtggacccgtgcatggacggcggcttccctgaaggcgacgtgctgagatgcatccacgtagcgctcctgtgcgtgcagggagacccggcggcccggccggccatgtcgtcggttgtgatgatgctcggtggcgatactatcactctccaagcaccgtccaagccgatgatctttgaatattaccaggagtctccagagaatgagtaaattcatatcaccagtgtacactgatgaaaacttgcagattggccggttctcagcaactagaacgtagacacctaggtggtgggctgaatctcaagataaatcttatatttctgtgtgcttgattttccttggtttattcttatttatcttttgaatttattgcaagcattgaccttttttttgggttgacatcagatctacttttctattgagtttttagctgtaggtggatcactgaaacatattaaggaataacttagaatcatagaaaaattatggatataagagaactacggc

SEQ ID NO: 27137 - DNA, 1977 bp, Zea Mays
  misc_feature (1)..(2): n is a, c, g, or t
nntataaataaataacatgtcccgtttgtatctgttgacttttttctccaattacatttcaatagtttttgggaggaatgtatctcgataggatatgttaaatcagtatctgtactcagctggatgaatatgtcccattactcagctggttgaatatgtctcgaagcacatagatttgggtttgtggacccattctacactagatatatctgggggttactctgcctttacactactatttcttaatagagatagtgctaagacctgtggtgttgccttatctgtttaaaatggcagattcttaaatcttcggtgtgctatgaacttctgcagtatgacattataatgattcccttttagttaaaattccacgacaataatattcgctaagaatttcttggcagcgatggaaatatttatttgtaacatgccaatcaaaagctatggtattgttttcattttattgggttatcttttgcttatttagatcaaggcgatcatggaaaccaaatgttcaggagaagcgtcttttcagctatgttcatgatcagcacattagagtcaaggttaccacacacgcacttcgatgtattgacaaagctggtgggatagatgaatacctcctgaagacaccttacaataaaatggataccgagatggggatagtgtggaaagcaaatatcgaaaagatgtattcagatttggctgaaatagaagtaggcttcttccctcccgaggttgaggctaagattaaaaagggcttagacgaggttcgagctgcgaagagggactttcgcagggaaggaagacgagctttggcaaagcaaagccagctagaagcaagtagtgttggtgatgaccaaacgagtgaagtcatagatacaaagcaagtatttgccgctaaagtctgagcctaaacctatgtgcctgtattgaatgatcaaaggaggcggcaaatcattggatgcacctgggcaaataatggaaggcttgctacttgcgcactaactgtacccccttttcgggagcagcagtgcgcggaacttccaatttgacgccttccgatatattacgtggatcacttgttaaggctgctggaaaatgtttctgatgttccatccgcccgcaaaggtacttgtcaagaacttgggatataatatgaacaggaaacggtacatttgccggctccatatgaacaaacacaagtccgaaattacgtggccatcgttaacccatctattagcttccatctaggctagcttggcgaggacgtcgccgagcgcatctttggttgctgcgaagtatttctcggcctccggggtgctcttgatctttgcggcatggtcaagctgccaaaaacgagaagataagctcacgtgttatttccatgccgaaaggagattccgcagtgagctcgggtccacttacatcgtcgatggtgctgaagagcttgccggtgagctccttgaggctctgcttctcctccttgggcttggaagcgatgacggtcttgaggtcgtagcgcaggtaggaggcccggaggcggaggtcgttctggacgtacggccacgccttcttgtcgatgagtggcttgaggttgatgatgtcctgcgccgacgtcttcaccctcgccaccgcctccgccggcggcagcggctgcaggtagaaccgctccttcaaggggaggtcgaagtccctcgcctggtcagagttcagagtcccggctgtgccatagcaaattaaaagtaggcgcatcagatgaatactgtagttccaaagaaaaaaaaaaagctatgtgaggcgcgggcgggcaggcactcacggagtccaccggagggcggcggcggggctccgatcttgatggtcttgacggtctcggcgtgcaccgcctgcgacaaggcgccgccgacgatgccagtggccaccagcccgagcacggcgcggcggcccgcctgcgcctgcgcctgcgcctcggcg

SEQ ID NO: 27138 - DNA, 3420 bp, Zea Mays
tgttgcatttcccgggcaggtgcattggcatggtcgcagtagtgtaggaagcagaaaagatgaggcactgttggagtgcatggctcctggccctgtgcctcgtctctgtccagctcctcgctccattggtatgcgagcgattgctcgttgcagcacagaacctgtcaccgccagccttgacaccgccccttgtcaaagaagtagacgatgtggtggaacatgtatggatctcatgtgggttagacaggggatctcttgaagacgttagaaaacatttcaattacaaccacgtatttgacattctccgtacgctctccggaaaagatactaaggatagctctcctgaaactgaagatgccagcaaagcactgtctccagaaattaaaaacactttgctgaactgcttaagcaagcacccacttgtagttgctgcacatgagagtgcaaaaaacttacctattgattatatcaaaatgctttttgccttgttaagaagagatgtggctcaaggatctacaggtgcagcgacaacttctgcaccaccagcagctgtgaaatcaaatccatcaccttctttaggggaaccttcctcaacaaaacctgacaaaaatccagatcctccattagaaacaacacccgaagaaaaaatggtgccccaaactgaaaaaacagtggccaaaaaggaagataacagtaacatgtcaatcactgctgtcattggtttgtctgtgtctgctattgcgttgttagcccttctctgcttatgcaactttgtttgccgtgcaaaacaggcctcttcatctgaagtaggggttgataaaccgcctctgaatcagaacctgagtaatttatctgtagcttctcttaagttttccaaaggaaactcaattgatgtcaacaagctgggagcactgccgctaaagtcagaggctggccaaaatggcaatgccaaactaagctcatctgaaatctctaaaactgaagttaccccagcagtctacaactgtttggctgaaccaatggctgcttctactggttatgtcccaggatcaagaccaacaaccccaccatctatgccacctccagcccctgcacatccgaaggctcctccctcatcaactcctcaagcacctgcatctctgaaggctcctccctcatcaactcctcaagcacctgcacctctgaaggctcctcactcatcaactcctgaaacacccgcaccaccttcaaagcctagttcagttcttcactcagaaccctcatcaccatctgctctaaaagctgcacctccaccaaaagatgcaccacagccaaaagctgcacctccaccgccaccaaaatctaccggcccaccaccaccagcaatgtctggttcatcgaatacacgtccaccaccgcttatgaagaaatcaggcaataagatggatgatggcgcaaattctcatgaagctaaaacaaagctaaagcccttcttttgggataaagtaacagcaaatgctaatcagtctatggtgtgggatcacctcaagtctggatctttccagtttaatgagggtaagatggaaagcctttttggttataactctgtggagaaaataggcggtgatggcaagaaagatttattatctaaggatatacctcaatttgtgaggatacttgaacctaagaaggcacagaaccttgcgatatcattaagggctctgagtgtttcaccagaggaagtatgtagtgcagttaaggaagcttctcttgtaacattggatataatgacgctgctacatgactattattttgatcccataacctacatataaagattagagactaatctgttttttctgagctaaggaaatgaacttccatcagacttgatagacacactactaaagtggatcccaagcaatgaggaggagcttaggcttcgactgtacactggggaactgtctcagcttggtcctgcagagcaattcctaaaatcgattatcgatattccatatattttccaacgtctggatgcattacttttcatgtccagtctaccagaggaaacttcaaatgtgaaacacgcttttgctactttagaggtggcttgccaagagcttaaaaacagccggcttttcttgaagttacttgaagcggtccttaaaacaggaaacaggatgaatgttggcacattccgtggaggagctcaggcttttaaacttgacacgctccttaagttatctgatgtcaaaggaactgatgggaagacaacacttctgcattttgtggttgaagaaattattcgttctgaaggtatccgtgctacaagggctgcaaaagatactgacggtaataatatgcgaactgaagatgattacaaacaacttgggctgaaagttgtgtccaatttaagtgatgagctacaaaatgtcaggaaggcagcgatcctggatgcagatcaattgacaatgtcagtagcaactcttggccacaagcttgtcaaaaccaaagaattccttaacacgggcatgagaagtctggatgaacacagtgggtttcaccgcaagctgaagcatttcgcagagcagtgccaaactgatgtttctttgttgcaagaggaagaaaagaaaattcggtccttggtcaggggcactgttgattatttccatgggagtacagggaaggacgagggcctgcggttatttgtggtagtacgagatttccttgcgatgctggacaaggtttgtaaagaggtgaaagaagcatcaaaagtggctccaaagaaaacaaagaccgctcagccatctcaagcatctttcaatgatcccaggcgcaaactattcccagcaattcaagacctaagggcagacagttcaagctctgatgaagacgattagctgtataccgaatcaaggagtccatgttttcaccttcgaatgcactgaatttgacccttcaaaacaatagtgcggtgatacataatacatggaaactgatgggaaatggtgaagtgacgctattttttgccatccactgatcaaaaaggcaacaatcaaattgggaaacctggcttggctttacactgacatgttggtaatgacaaatcatcagaccagatctggcattcttggccaatgggtttgtatggcactctcctatctagcaagaaggatgttcatatggtcgagacagcatctatataaaaggtgtggctggtggaaaatggataattcaaaggaaatggaagaaaactggctctagtttagaaccggtgtaaatgcaggaggaagtctgactaatactatttttctgttcattgtacacatgtaccattgtaccgaacgcagagaaatgcagcgcaaacttgtgaatccggtgccattacccttgcaaacaggaatacaaatgaagtgtttggtttgagaaataagctagttt

SEQ ID NO: 27139 - DNA, 3757 bp, Zea Mays
ctccccccttctccctctcgcattcttcctcccccgtttcggggagacgccacgagaaaagagggagcagggaaagaaatcgcctccacgtccacggtgacgccggatcgcgcgtcaaatttctttgccgcggatttggtgctgcaaattttctagaattttttcgttttgtagggggcattattggcacggtatcttagtcctgggcttatattatctgcattttcgtttcccccgattttttcgactcaatttcttaacggatttgggaatcgcggctagggggctctgcattgccggatttgctcgatttcgtgggcgcattgcagctttgcattgcataacgatctttgccttggtcgcccacgttcgcgattctgtctgagcttcctcacccgggctcgtgcatttctccgaacatctccaggtgtctgttgcacaagctctcgcttgttgctccaatttcacgcgttctgcatgcatgtattccccgaaggtggtgccattctggggctgttgcaaagttctctggtcaaaaccaatggattccgtcgagcaatcggttccacggtgctaagagattgttgtccattggccatccccatgaatttctgaagggggagaagaattgctgttgcatttcccgggcaggtgcattggcatggtcgcagtagtgtaggaagcagaaaagatgaggcactgttggagtgcatggctcctggccctgtgcctcgtctctgtccagctcctcgctccattggtatgcgagcgattgctcgttgcagcacagaacctgtcaccgccagccttgacaccgccccttgtcaaagaagtagacgatgtggtggaacatgtatggatctcatgtgggttagacaggggatctcttgaagacgttagaaaacatttcaattacaaccacgtatttgacattctccgtacgctctccggaaaagatactaaggatagctctcctgaaactgaagatgccagcaaagcactgtctccagaaattaaaaacactttgctgaactgcttaagcaagcacccacttgtagttgctgcacatgagagtgcaaaaaacttacctattgattatatcaaaatgctttttgccttgttaagaagagatgtggctcaaggatctacaggtgcagcgacaacttctgcaccaccagcagctgtgaaatcaaatccatcaccttctttaggggaaccttcctcaacaaaacctgacaaaaatccagatcctccattagaaacaacacccgaagaaaaaatggtgccccaaactgaaaaaacagtggccaaaaaggaagataacagtaacatgtcaatcactgctgtcattggtttgtctgtgtctgctattgcgttgttagcccttctctgcttatgcaactttgtttgccgtgcaaaacaggcctcttcatctgaagtaggggttgataaaccgcctctgaatcagaacctgagtaatttatctgtagcttctcttaagttttccaaaggaaactcaattgatgtcaacaagctgggagcactgccgctaaagtcagaggctggccaaaatggatcaagaccaacaaccccaccatctatgccacctccagcccctgcacatccgaaggctcctccctcatcaactcctcaagcacctgcatctctgaaggctcctccctcatcaactcctcaagcacctgcacctctgaaggctcctcactcatcaactcctgaaacacccgcaccaccttcaaagcctagttcagttcttcactcagaaccctcatcaccatctgctctaaaagctgcacctccaccaaaagatgcaccacagccaaaagctgcacctccaccgccaccaaaatctaccggcccaccaccaccagcaatgtctggttcatcgaatacacgtccaccaccgcttatgaagaaatcaggcaataagatggatgatggcgcaaattctcatgaagctaaaacaaagctaaagcccttcttttgggataaagtaacagcaaatgctaatcagtctatggtgtgggatcacctcaagtctggatctttccagtttaatgagggtaagatggaaagcctttttggttataactctgtggagaaaataggcggtgatggcaagaaagatttattatctaaggatatacctcaatttgtgaggatacttgaacctaagaaggcacagaaccttgcgatatcattaagggctctgagtgtttcaccagaggaagtatgtagtgcagttaaggaaggaaatgaacttccatcagacttgatagacacactactaaagtggatcccaagcaatgaggaggagcttaggcttcgactgtacactggggaactgtctcagcttggtcctgcagagcaattcctaaaatcgattatcgatattccatatattttccaacgtctggatgcattacttttcatgtccagtctaccagaggaaacttcaaatgtgaaacacgcttttgctactttagaggtggcttgccaagagcttaaaaacagccggcttttcttgaagttacttgaagcggtccttaaaacaggaaacaggatgaatgttggcacattccgtggaggagctcaggcttttaaacttgacacgctccttaagttatctgatgtcaaaggaactgatgggaagacaacacttctgcattttgtggttgaagaaattattcgttctgaaggtatccgtgctacaagggctgcaaaagatactgacggaaggcagcgatcctggatgcagatcaattgacaatgtcagtagcaactcttggccacaagcttgtcaaaaccaaagaattccttaacacgggcatgagaagtctggatgaacacagtgggtttcaccgcaagctgaagcatttcgcagagcagtgccaaactgatgtttctttgttgcaagaggaagaaaagaaaattcggtccttggtcaggggcactgttgattatttccatgggagtacagggaaggacgagggcctgcggttatttgtggtagtacgagatttccttgcgatgctggacaaggtttgtaaagaggtgaaagaagcatcaaaagtggctccaaagaaaacaaagaccgctcagccatctcaagcatctttcaatgatcccaggcgcaaactattcccagcaattcaagacctaagggcagacagttcaagctctgatgaagacgattagctgtataccgaatcaaggagtccatgttttcaccttcgaatgcactgaatttgacccttcaaaacaatagtgcggtgatacataatacatggaaactgatgggaaatggtgaagtgacgctattttttgccatccactgatcaaaaaggcaacaatcaaattgggaaacctggcttggctttacactgacatgttggtaatgacaaatcatcagaccagatctggcattcttggccaatgggtttgtatggcactctcctatctagcaagaaggatgttcatatggtcgagacagcatctatataaaaggtgtggctggtggaaaatggataattcaaaggaaatggaagaaaactggctctagtttagaaccggtgtaaatgcaggaggaagtctgactaatactatttttctgttcattgtacacatgtaccattgtaccgaacgcagagaaatgcagcgcaaacttgtgaatccggtgccattacccttgcaaacaggaatacaaatgaagtgtttggtttgagaaataagctagttt

SEQ ID NO: 27140 - DNA, 4208 bp, Zea Mays
ctctccccccttctccctctcgcattcttcctcccccgtttcggggagacgccacgagaaaagagggagcagggaaagaaatcgcctccacgtccacggtgacgccggatcgcgcgtcaaatttctttgccgcggatttggtgctgcaaattttctagaattttttcgttttgtagggggcattattggcacggtatcttagtcctgggcttatattatctgcattttcgtttcccccgattttttcgactcaatttcttaacggatttgggaatcgcggctagggggctctgcattgccggatttgctcgatttcgtgggcgcattgcagctttgcattgcataacgatctttgccttggtcgcccacgttcgcgattctgtctgagcttcctcacccgggctcgtgcatttctccgaacatctccaggtgtctgttgcacaagctctcgcttgttgctccaatttcacgcgttctgcatgcatgtattccccgaaggtggtgccattctggggctgttgcaaagttctctggtcaaaaccaatggattccgtcgagcaatcggttccacggtgctaagagattgttgtccattggccatccccatgaatttctgaagggggagaagaattgctgttgcatttcccgggcaggtgcattggcatggtcgcagtagtgtaggaagcagaaaagatgaggcactgttggagtgcatggctcctggccctgtgcctcgtctctgtccagctcctcgctccattggtatgcgagcgattgctcgttgcagcacagaacctgtcaccgccagccttgacaccgccccttgtcaaagaagtagacgatgtggtggaacatgtatggatctcatgtgggttagacaggggatctcttgaagacgttagaaaacatttcaattacaaccacgtatttgacattctccgtacgctctccggaaaagatactaaggatagctctcctgaaactgaagatgccagcaaagcactgtctccagaaattaaaaacactttgctgaactgcttaagcaagcacccacttgtagttgctgcacatgagagtgcaaaaaacttacctattgattatatcaaaatgctttttgccttgttaagaagagatgtggctcaaggatctacaggtgcagcgacaacttctgcaccaccagcagctgtgaaatcaaatccatcaccttctttaggggaaccttcctcaacaaaacctgacaaaaatccagatcctccattagaaacaacacccgaagaaaaaatggtgccccaaactgaaaaaacagtggccaaaaaggaagataacagtaacatgtcaatcactgctgtcattggtttgtctgtgtctgctattgcgttgttagcccttctctgcttatgcaactttgtttgccgtgcaaaacaggcctcttcatctgaagtaggggttgataaaccgcctctgaatcagaacctgagtaatttatctggtatgaaatatacccacccacctttctccagtgtactgtttgaaattatgatgttcatttcattaggctattcctttggccaacaacaaaattgatgctgttagttttgtacaaaaaatatttacttatgatttatggttataattttctatcacatttgaaatattgacggtgtaactgttggccaaagccttgtaaaaaatgtagtagggagtaatgtgacattgccttctagtgttgatttacattctttattttgtagcttctcttaagttttccaaaggaaactcaattgatgtcaacaagctgggagcactgccgctaaagtcagaggctggccaaaatggcaatgccaaactaagctcatctgaaatctctaaaactgaagttaccccagcagtctacaactgtttggctgaaccaatggctgcttctactggttatgtcccaggatcaagaccaacaaccccaccatctatgccacctccagcccctgcacatccgaaggctcctccctcatcaactcctcaagcacctgcatctctgaaggctcctccctcatcaactcctcaagcacctgcacctctgaaggctcctcactcatcaactcctgaaacacccgcaccaccttcaaagcctagttcagttcttcactcagaaccctcatcaccatctgctctaaaagctgcacctccaccaaaagatgcaccacagccaaaagctgcacctccaccgccaccaaaatctaccggcccaccaccaccagcaatgtctggttcatcgaatacacgtccaccaccgcttatgaagaaatcaggcaataagatggatgatggcgcaaattctcatgaagctaaaacaaagctaaagcccttcttttgggataaagtaacagcaaatgctaatcagtctatggtgtgggatcacctcaagtctggatctttccagtttaatgagggtaagatggaaagcctttttggttataactctgtggagaaaataggcggtgatggcaagaaagatttattatctaaggatatacctcaatttgtgaggatacttgaacctaagaaggcacagaaccttgcgatatcattaagggctctgagtgtttcaccagaggaagtatgtagtgcagttaaggaaggaaatgaacttccatcagacttgatagacacactactaaagtggatcccaagcaatgaggaggagcttaggcttcgactgtacactggggaactgtctcagcttggtcctgcagagcaattcctaaaatcgattatcgatattccatatattttccaacgtctggatgcattacttttcatgtccagtctaccagaggaaacttcaaatgtgaaacacgcttttgctactttagaggtggcttgccaagagcttaaaaacagccggcttttcttgaagttacttgaagcggtccttaaaacaggaaacaggatgaatgttggcacattccgtggaggagctcaggcttttaaacttgacacgctccttaagttatctgatgtcaaaggaactgatgggaagacaacacttctgcattttgtggttgaagaaattattcgttctgaaggtatccgtgctacaagggctgcaaaagatactgacggtaataatatgcgaactgaagatgattacaaacaacttgggctgaaagttgtgtccaatttaagtgatgagctacaaaatgtcaggaaggcagcgatcctggatgcagatcaattgacaatgtcagtagcaactcttggccacaagcttgtcaaaaccaaagaattccttaacacgggcatgagaagtctggatgaacacagtgggtttcaccgcaagctgaagcatttcgcagagcagtgccaaactgatgtttctttgttgcaagaggaagaaaagaaaattcggtccttggtcaggggcactgttgattatttccatgggagtacagggaaggacgagggcctgcggttatttgtggtagtacgagatttccttgcgatgctggacaaggtttgtaaagaggtgaaagaagcatcaaaagtggctccaaagaaaacaaagaccgctcagccatctcaagcatctttcaatgatcccaggcgcaaactattcccagcaattcaagacctaagggcagacagttcaagctctgatgaagacgattagctgtataccgaatcaaggagtccatgttttcaccttcgaatgcactgaatttgacccttcaaaacaatagtgcggtgatacataatacatggaaactgatgggaaatggtgaagtgacgctattttttgccatccactgatcaaaaaggcaacaatcaaattgggaaacctggcttggctttacactgacatgttggtaatgacaaatcatcagaccagatctggcattcttggccaatgggtttgtatggcactctcctatctagcaagaaggatgttcatatggtcgagacagcatctatataaaaggtgtggctggtggaaaatggataattcaaaggaaatggaagaaaactggctctagtttagaaccggtgtaaatgcaggaggaagtctgactaatactatttttctgttcattgtacacatgtaccattgtaccgaacgcagagaaatgcagcgcaaacttgtgaatccggtgccattacccttgcaaacaggaatacaaatgaagtgtttggtttgagaaataagctagttt

SEQ ID NO: 27141 - DNA, 3957 bp, Zea Mays
cacggttccgcctctccccccttctccctctcgcattcttcctcccccgtttcggggagacgccacgagaaaagagggagcagggaaagaaatcgcctccacgtccacggtgacgccggatcgcgcgtcaaatttctttgccgcggatttggtgctgcaaattttctagaattttttcgttttgtagggggcattattggcacggtatcttagtcctgggcttatattatctgcattttcgtttcccccgattttttcgactcaatttcttaacggatttgggaatcgcggctagggggctctgcattgccggatttgctcgatttcgtgggcgcattgcagctttgcattgcataacgatctttgccttggtcgcccacgttcgcgattctgtctgagcttcctcacccgggctcgtgcatttctccgaacatctccaggtgtctgttgcacaagctctcgcttgttgctccaatttcacgcgttctgcatgcatgtattccccgaaggtggtgccattctggggctgttgcaaagttctctggtcaaaaccaatggattccgtcgagcaatcggttccacggtgctaagagattgttgtccattggccatccccatgaatttctgaagggggagaagaattgctgttgcatttcccgggcaggtgcattggcatggtcgcagtagtgtaggaagcagaaaagatgaggcactgttggagtgcatggctcctggccctgtgcctcgtctctgtccagctcctcgctccattggtatgcgagcgattgctcgttgcagcacagaacctgtcaccgccagccttgacaccgccccttgtcaaagaagtagacgatgtggtggaacatgtatggatctcatgtgggttagacaggggatctcttgaagacgttagaaaacatttcaattacaaccacgtatttgacattctccgtacgctctccggaaaagatactaaggatagctctcctgaaactgaagatgccagcaaagcactgtctccagaaattaaaaacactttgctgaactgcttaagcaagcacccacttgtagttgctgcacatgagagtgcaaaaaacttacctattgattatatcaaaatgctttttgccttgttaagaagagatgtggctcaaggatctacaggtgcagcgacaacttctgcaccaccagcagctgtgaaatcaaatccatcaccttctttaggggaaccttcctcaacaaaacctgacaaaaatccagatcctccattagaaacaacacccgaagaaaaaatggtgccccaaactgaaaaaacagtggccaaaaaggaagataacagtaacatgtcaatcactgctgtcattggtttgtctgtgtctgctattgcgttgttagcccttctctgcttatgcaactttgtttgccgtgcaaaacaggcctcttcatctgaagtaggggttgataaaccgcctctgaatcagaacctgagtaatttatctgcttctcttaagttttccaaaggaaactcaattgatgtcaacaagctgggagcactgccgctaaagtcagaggctggccaaaatggcaatgccaaactaagctcatctgaaatctctaaaactgaagttaccccagcagtctacaactgtttggctgaaccaatggctgcttctactggttatgtcccaggatcaagaccaacaaccccaccatctatgccacctccagcccctgcacatccgaaggctcctccctcatcaactcctcaagcacctgcatctctgaaggctcctccctcatcaactcctcaagcacctgcacctctgaaggctcctcactcatcaactcctgaaacacccgcaccaccttcaaagcctagttcagttcttcactcagaaccctcatcaccatctgctctaaaagctgcacctccaccaaaagatgcaccacagccaaaagctgcacctccaccgccaccaaaatctaccggcccaccaccaccagcaatgtctggttcatcgaatacacgtccaccaccgcttatgaagaaatcaggcaataagatggatgatggcgcaaattctcatgaagctaaaacaaagctaaagcccttcttttgggataaagtaacagcaaatgctaatcagtctatggtgtgggatcacctcaagtctggatctttccagtttaatgagggtaagatggaaagcctttttggttataactctgtggagaaaataggcggtgatggcaagaaagatttattatctaaggatatacctcaatttgtgaggatacttgaacctaagaaggcacagaaccttgcgatatcattaagggctctgagtgtttcaccagaggaagtatgtagtgcagttaaggaaggaaatgaacttccatcagacttgatagacacactactaaagtggatcccaagcaatgaggaggagcttaggcttcgactgtacactggggaactgtctcagcttggtcctgcagagcaattcctaaaatcgattatcgatattccatatattttccaacgtctggatgcattacttttcatgtccagtctaccagaggaaacttcaaatgtgaaacacgcttttgctactttagaggtggcttgccaagagcttaaaaacagccggcttttcttgaagttacttgaagcggtccttaaaacaggaaacaggatgaatgttggcacattccgtggaggagctcaggcttttaaacttgacacgctccttaagttatctgatgtcaaaggaactgatgggaagacaacacttctgcattttgtggttgaagaaattattcgttctgaaggtatccgtgctacaagggctgcaaaagatactgacggtaataatatgcgaactgaagatgattacaaacaacttgggctgaaagttgtgtccaatttaagtgatgagctacaaaatgtcaggaaggcagcgatcctggatgcagatcaattgacaatgtcagtagcaactcttggccacaagcttgtcaaaaccaaagaattccttaacacgggcatgagaagtctggatgaacacagtgggtttcaccgcaagctgaagcatttcgcagagcagtgccaaactgatgtttctttgttgcaagaggaagaaaagaaaattcggtccttggtcaggggcactgttgattatttccatgggagtacagggaaggacgagggcctgcggttatttgtggtagtacgagatttccttgcgatgctggacaaggtttgtaaagaggtgaaagaagcatcaaaagtggctccaaagaaaacaaagaccgctcagccatctcaagcatctttcaatgatcccaggcgcaaactattcccagcaattcaagacctaagggcagacagttcaagctctgatgaagacgattagctgtataccgaatcaaggagtccatgttttcaccttcgaatgcactgaatttgacccttcaaaacaatagtgcggtgatacataatacatggaaactgatgggaaatggtgaagtgacgctattttttgccatccactgatcaaaaaggcaacaatcaaattgggaaacctggcttggctttacactgacatgttggtaatgacaaatcatcagaccagatctggcattcttggccaatgggtttgtatggcactctcctatctagcaagaaggatgttcatatggtcgagacagcatctatataaaaggtgtggctggtggaaaatggataattcaaaggaaatggaagaaaactggctctagtttagaaccggtgtaaatgcaggaggaagtctgactaatactatttttctgttcattgtacacatgtaccattgtaccgaacgcagagaaatgcagcgcaaacttgtgaatccggtgccattacccttgcaaacaggaatacaaatgaagtgtttggtttgagaaataagctagttt

SEQ ID NO: 27142 - DNA, 2122 bp, Zea Mays
agaagtccttgtaaggtgactgcaccatttgtacccttcctgacaggcttatagagcaatactgttatcagctcacatataaacactacaaaaagagtaatattcatttgagaattcgacagcccttctgttacaaaaagcaagtcattttagacttctcattttgttactaaatgtaagccacggaagcaatttgaggctcgtttctgcttttattctttcttccttttgcccagctaaattaatgttaccactatcatgtgcgaataacccatctttgctgatgtagtctaaatgaagggcaacaaaatcatttatcttgttagactgtgtgtgggccggcactactgttggagtgtcgtcccattaaggttagggttctgtgtctatatatgcaaccaccacctctatacaatacaatcaaaaacactacattgtcccacatggtatcaaactaggttaagattaggtttttacctctccctacccaatagccgtcggctctctctcaaaactagcagccgccgcccgctcctcctaccttcagccaccggcaccgtccccgggaggctcatccttccctcccgccgcaacattcgcaccctcacgacgctgcgactgcggggtgatattgtaacaccccgtccactcccgaaccgacggtacttctggcagctctctagtattatatattgtccccacagaccaacacgattcttttgtgcgcactttgtcctcactcatgcgcacccgagaaaactttccggttggtcaaccatcctaaattgcttcaagccaagcacgcttaacttgaaggttcttttgagataggcttccgaaaaaagaaaatgcaccttgttgatatgagtactctattaattttattaaaccttgggctaggatatcaccattctctggggccaagatatcacagatatcaacccgtcggctcctaacttcgacttctgctccaatctcattgtgtgtggtgcccccgttgcgattgcgggggatgttagactgtgtgcgtgtgtgtggaccgacactgccggcccattagggttaaggattctgtgcctatatatgtaaccaccacctctatgcaatataatcaagagcactacatcctcacatatctacttcctcaattcttatgtacaaatataaaatgacttacatttggaatgaaatggggtaaaatctatacaagaaatggaaatgaaacagtaaatattctgtctaatatgtagaaaacaataatagtcataatctgttacacggtgtagcaaacatagtaacttagtataaaaaaactactccccattaatgctaattgtaaaaactcggcagcgcacacaaaaaaagggctctcaatactcatgtgtcctagtactctatattagatcatcatttcaaagaaaaataaagtgagctattacgccttaaactcaactcctttacaaaacagcatattagaattagtaatatattcgatggttgaacgcacaacccaccagggacaaaactgagcataaaattaggaaagtggacaaggtctgtggtttttgtcccaactctgcacatcaggagaaaggtttcacacgattgtctaaggaatggatgcattgtgcattttgtatgtgatactttgtactgtattaggcctgaccagcatactttgtactgtattaggcctggccagccaggcatattgtatgcttacctgatgaagaagtgatagatcttatgggttttcttaatgtgatgactcagttcttattcttatatgttagtccaatgccataaacaatttggatatggctagaagggtagcaagcccatgactttggagtctggacatttcagatcatttgaccagaaatcagatatggtggctctgtccagtcaaattggaggtgcacaagccatgcaaagtaggattgacagattaaggaaagtagacaaattttacagcctagcatgaactacatatataatcatgactgaagataacacatggacacattagtatgtaacgcaatatatcttgtcgcatggaaaaggacacgtaccttaagggatgtaataagccttggttgttcattactaagcacaccgattt

SEQ ID NO: 27143 - DNA, 1792 bp, Zea Mays
gtcatcccacccccagcagccagcacctaccttgcacgacttcttctttccggtaccttctccccttcctctccctccctagtccctagtcggcagtcccccgaccccgacctcgctaagcaaactcccagagcgatcgccgcagaagatcccgcatgcatgccccggcgccgccctcctccgtcgatctgccgttgtcggcgccgccgccgccggtgaaggcgccgtccccgcggcctccgccgccggcctcgctgcagcccgagtccccgggcgtctttttctccgccaccgcacccctgggcacctcccaccgccgcatcgccatcgccgtcgacctatccgacgagtccgccttcgccgtgcgctgggccgtcgccaactacctacgctccggggacgccgtcatcctgctccacgtgcgccccacctccgtgctctacggcgccgactggggcgccgtcgacgtctctctccccatccctagcgcctactccgaggatggctttggcggcggcgacgccgattccgaggccgccgctgcgcgcaggatggaggacgactacgacgccttcacggcctccaaggccgacgacatcgccaggccgctcaaggaggcgggcatcccctacaagatccacatcgtcagggaccacgacatgaaagagcgcctctgcctcgaggtcgagcgcctctcgctcagcgccgtcatcatggggagcaagggcttcggctccacgcggaggaccagcaaggggaggctcggcagcgtcagcgactactgcgtgcatcactgtatctgccccgttgtggtagtgcgcttccctgatgagtgatgacggctctgccgagtgtggggaggcaggtggtttgcccgccgcggttggtgctgaggatgtgctgcaccccgtgccggaggaggaggaggccgagtatcatgattcatgacgccgctgaggagcacaaggaatgtaaaggttgtagcattcgacagttggctgggtgctaggtgggatttctacccgagtgcatgtgaagtttgctgaacttccattacccgtgcccatgtatctgtgatttcgctttgtttgtagcttctgttacctttgttcatgtagcttgtctgacttccactgcctggtgaatatctttgtctgaacatttgtacttactttgcgttgcactgtgtttctgatgaaagttataggttaaccacttctatagaaccaactaatcaagggtgcaaattcctcctagtttatttttttgaattattttagtttcaagtaactggtagatgaggaaagtttcgctgttttttttggtgcaagactatctctagcagatcccctatccaatcctctatctcatcctatattttaaacttcactttataaacagtgccaaacaatattatctacagtttcatgatctctattttacacgaaacactgtgagacagagaagttagacttgtctttacaagagtctgtcatagttgaatatgttttcgtgcgtgaccctccacgcatgtcatgcacaacatagcacagtatagatggatacagatacttattcggatgttaaatttttggtcttcttttttcgattatgaacaaataatgtatataatttgatatgtaaatttatattcttatttttgtttttagcattgaggctattaatcctcacaaaaaataaatattaaatttgttatatatctttttaaataattgatataaaatttggatgtctatccgaatatggatccggatgttttttcaccttttta

SEQ ID NO: 27144 - DNA, 2531 bp, Zea Mays
tgtcatcccacccccagcagccagcacctaccttgcacgacttcttctttccggtaccttctccccttcctctccctccctagtccctagtcggcagtcccccgaccccgacctcgctaagcaaactcccagagcgatcgccgcagaagatcccgcatgcatgccccggcgccgccctcctccgtcgatctgccgttgtcggcgccgccgccgccggtgaaggcgccgtccccgcggcctccgccgccggcctcgctgcagcccgagtccccgggcgtctttttctccgccaccgcacccctgggcacctcccaccgccgcatcgccatcgccgtcgacctatccgacgagtccgccttcgccgtgcgctgggccgtcgccaactacctacgctccggggacgccgtcatcctgctccacgtgcgccccacctccgtgctctacggcgccgactggggcgccgtcgacgtctctctccccatccctagcgcctactccgaggatggctttggcggcggcgacgccgattccgaggccgccgctgcgcgcaggatggaggacgactacgacgccttcacggcctccaaggccgacgacatcgccaggccgctcaaggaggcgggcatcccctacaagatccacatcgtcagggaccacgacatgaaagagcgcctctgcctcgaggtcgagcgcctctcgctcagcgccgtcatcatggggagcaagggcttcggctccacgcggaggaccagcaaggggaggctcggcagcgtcagcgactactgcgtgcatcactgtatctgccccgttgtggtagtgcgcttccctgatgagtgatgacggctctgccgagtgtggggaggcaggtggtttgcccgccgcggttggtgctgaggatgtgctgcaccccgtgccggaggaggaggaggccgagtatcatgattcatgacgccgctgaggagcacaaggatacctgacctcgttgatgtattgtgaagtcctcttggattcagccttcagcctgcaggacgggagcacacgccagagcacgctggatgtagcgcaacagcagctgcccccctgccctcgggttgtgtgcgtggctgtgttttttagttggaaaaatttgataatagatggtgaataggtatggaaaatgacattttatgattatagttgtgtataggggaagaatttagagagaaccgttgtagagggtggagatataggggaagagagatagctgacgtggcgggatagtggggtatagggggagaaatttagaggagacgattgaagacagtctaaggctatccgcagcggttccctctaaaattctccccctatatcacttttttacgtcatatcatcaacattttatcccctacttcttcttctcctgcagcggttccccctaaattattcccctatacctcactacaaccataaaatatcattttttatacatacttttcatctattattaattttttctactaataattggaagtgggcccacgtcaacaatgcttggagggcagccgcacgcacgccagaacgagggggaaagagaagcggacctccacgtaggagccctgctaggggcagcgctgcagcgaattttggctcctgtagccggcatacaggggaggggccgggcggcggtaagggttgcgtacaccctaaggcatcaaactgtctccagagaatgtaaaggttgtagcattcgacagttggctgggtgctaggtgggatttctacccgagtgcatgtgaagtttgctgaacttccattacccgtgcccatgtatctgtgatttcgctttgtttgtagcttctgttacctttgttcatgtagcttgtctgacttccactgcctggtgaatatctttgtctgaacatttgtacttactttgcgttgcactgtgtttctgatgaaagttataggttaaccacttctatagaaccaactaatcaagggtgcaaattcctcctagtttatttttttgaattattttagtttcaagtaactggtagatgaggaaagtttcgctgttttttttggtgcaagactatctctagcagatcccctatccaatcctctatctcatcctatattttaaacttcactttataaacagtgccaaacaatattatctacagtttcatgatctctattttacacgaaacactgtgagacagagaagttagacttgtctttacaagagtctgtcatagttgaatatgttttcgtgcgtgaccctccacgcatgtcatgcacaacatagcacagtatagatggatacagatacttattcggatgttaaatttttggtcttcttttttcgattatgaacaaataatgtatataatttgatatgtaaatttatattcttatttttgtttttagcattgaggctattaatcctcacaaaaaataaatattaaatttgttatatatctttttaaataattgatataaaatttggatgtctatccgaatatggatccggatgttttttcaccttttta

SEQ ID NO: 27145 - DNA, 2773 bp, Zea Mays
tatgaacatgcattttgtcatcccacccccagcagccagcacctaccttgcacgacttcttctttccggtaccttctccccttcctctccctccctagtccctagtcggcagtcccccgaccccgacctcgctaagcaaactcccagagcgatcgccgcagaagatcccgcatgcatgccccggcgccgccctcctccgtcgatctgccgttgtcggcgccgccgccgccggtgaaggcgccgtccccgcggcctccgccgccggcctcgctgcagcccgagtccccgggcgtctttttctccgccaccgcacccctgggcacctcccaccgccgcatcgccatcgccgtcgacctatccgacgagtccgccttcgccgtgcgctgggccgtcgccaactacctacgctccggggacgccgtcatcctgctccacgtgcgccccacctccgtgctctacggcgccgactggggcgccgtcgacgtctctctccccatccctagcgcctactccgaggatggctttggcggcggcgacgccgattccgaggccgccgctgcgcgcaggatggaggacgactacgacgccttcacggcctccaaggccgacgacatcgccaggccgctcaaggaggcgggcatcccctacaagatccacatcgtcagggaccacgacatgaaagagcgcctctgcctcgaggtcgagcgcctctcgctcagcgccgtcatcatggggagcaagggcttcggctccacgcggaggaccagcaaggggaggctcggcagcgtcagcgactactgcgtgcatcactgtatctgccccgttgtggtagtgcgcttccctgatgagtgatgacggctctgccgagtgtggggaggcaggtggtttgcccgccgcggttggtgctgaggatgtgctgcaccccgtgccggaggaggaggaggccgagtatcatgattcatgacgccgctgaggagcacaaggatacctgacctcgttgatgtattgtgaagtcctcttggattcaggttagcatagaactaaaatgtcctatttgggctgtattgttgttgtatgatatgcatcagttatggaactatttctgtaactgttcggtctttggttaagactgctttcaacggctcccgccggcctcctcctccccttgccctgtagttgtttagggggggggggggggctcttggtccacaatggtaagtcctacacgctatgacgctacaccctcctctaccagccttcagcctgcaggacgggagcacacgccagagcacgctggatgtagcgcaacagcagctgcccccctgccctcgggttgtgtgcgtggctgtgttttttagttggaaaaatttgataatagatggtgaataggtatggaaaatgacattttatgattatagttgtgtataggggaagaatttagagagaaccgttgtagagggtggagatataggggaagagagatagctgacgtggcgggatagtggggtatagggggagaaatttagaggagacgattgaagacagtctaaggctatccgcagcggttccctctaaaattctccccctatatcacttttttacgtcatatcatcaacattttatcccctacttcttcttctcctgcagcggttccccctaaattattcccctatacctcactacaaccataaaatatcattttttatacatacttttcatctattattaattttttctactaataattggaagtgggcccacgtcaacaatgcttggagggcagccgcacgcacgccagaacgagggggaaagagaagcggacctccacgtaggagccctgctaggggcagcgctgcagcgaattttggctcctgtagccggcatacaggggaggggccgggcggcggtaagggttgcgtacaccctaaggcatcaaactgtctccagagaatgtaaaggttgtagcattcgacagttggctgggtgctaggtgggatttctacccgagtgcatgtgaagtttgctgaacttccattacccgtgcccatgtatctgtgatttcgctttgtttgtagcttctgttacctttgttcatgtagcttgtctgacttccactgcctggtgaatatctttgtctgaacatttgtacttactttgcgttgcactgtgtttctgatgaaagttataggttaaccacttctatagaaccaactaatcaagggtgcaaattcctcctagtttatttttttgaattattttagtttcaagtaactggtagatgaggaaagtttcgctgttttttttggtgcaagactatctctagcagatcccctatccaatcctctatctcatcctatattttaaacttcactttataaacagtgccaaacaatattatctacagtttcatgatctctattttacacgaaacactgtgagacagagaagttagacttgtctttacaagagtctgtcatagttgaatatgttttcgtgcgtgaccctccacgcatgtcatgcacaacatagcacagtatagatggatacagatacttattcggatgttaaatttttggtcttcttttttcgattatgaacaaataatgtatataatttgatatgtaaatttatattcttatttttgtttttagcattgaggctattaatcctcacaaaaaataaatattaaatttgttatatatctttttaaataattgatataaaatttggatgtctatccgaatatggatccggatgttttttcaccttttta

SEQ ID NO: 27146 - DNA, 366 bp, Zea Mays
atccaatgtccctgcttccctgcggggtggagttgcatgtagcggccactgaggacgtcatgtcttccgtccttaggcgccataccccccccaccccatccacctgccctgcttggattaaataacaactagttgtcatcaccaagttgaagatgctgagataacttggccttatctgatacctgacctcgttgatgtattgtgaagtcctcttggattcagccttcagcctgcaggacgggagcacacgccagagcacgctggatgtagcgcaacagcagctgcccccctgccctcgggttgtgtgcgtggctgtgttttttagttggaaaaatttgataatagatggtgaataggtatggaaaa

SEQ ID NO: 27147 - DNA, 1063 bp, Zea Mays
cggctcgccagtcgcctctctctatatcatctccttgctgtgtatcatcactagttactccctccttttatatactgctagctggttccgagtgattacccacagcaacagaagcagttctccaggcaatagactagctagatgcgcatcaccaaagagtagctttcgtctagaacgaagaaacaccccccactacatggccgcgctcagttcttgtgttgcttctggaggcctggcacttcaggccacccttgtggtttctcctcctcgccgccgcgggactccagtcgtcatctccgtatcatctcatggtcgccgcccaagtcttatcggctccaccatgaatccttcaggcatggctccgatcaaaagaactacacgaattcgtgcggttcatccatgccctgcaaattcgttaggaggaagcctcaccatcatcccaatacctgacctgctttcatcatgataacgtagagaagacggcggaggcggcgatcgaggtgatcgactcggtggcggaggcgaccgagaaggtcgccgacgaggttgcgcaagcgttccccggcagtgaaactctcaagcaggcagcctccaagattaagacgatcgcggatgagatcgaggaagatgccgacaaagctgaggccctgattgagaaggttgacgagataaagaaagaggtggattcaatcgtcgatcctatactcgacaaggtcgccaaagacaagtcctagagaaagagcccaactggaggagacaaataaaacatccagtaaattagtttaagaagcattagttgagcagtaaccggaagacactacgtacgggggcaacatgacacgtcgggtgtcatcacctatttctctcatcgattcattgctttcagtttcagtcacgtgtttgttcagttttagtgacttcctccctacgaaattctatgagagaacaaatttccttggatgttttattgtcaagtgcttgtgcagttgtgcttgtacatacagtcgctgacatcttaacaagaaccacggtagggcaaatttgctcgatcgccacttacgaa

SEQ ID NO: 27148 - DNA, 1980 bp, Zea Mays
aacccgcctccgtctctctctctatctcttgccacttcttcccccgtccccttccctcgcaactcgcgattcccaaatcccgatgcgccctcgcgcctagccccctccgccgccgccgccaacatcacctcccctgtcacgggacgcccccccccctccccctccaccgcgtcctatgacgtcgccgacctcgcaccacccggactcctccaccccgcacgccgggatcggcaacggcaacggcggcaaccaccacctccacccgccgactctgaccccggcgcccgcgagcaccccggccgctccccccgcgcatgcgcacgggggcccgcaggtgcgtctcatgtgcagcttcggcggccgcatcctgccgcgcccgggggaccgccagctgcgctacgtcggcggggagacccgcatcgtgtccttcccgcgcgccgcggcctccttcgccgccctcgtcgccgcgctcgccaaggccgcgcccgcgctcttcgcccccggggcgcccaggccgtccctcaagtaccagctgccccaggacgacctcgactccctcatctccgtcacctccgacgacgacgtcgaccacctcgtcgacgagctcgaccgcatccacgacctctccgccaacgtcgcccggccgccccgcctccgcgtcttcctcttcgcgcccgcgcccgcgcccgacgccgccttcggctccgtcctctccggcaccgccggcgacgccgcccccagcgaccagtggttcgtcgacgcgctcaacgcccccgcgccgcaccccatcgagcgcgtccgatccgagtcctcctcgatcgtctccgacgtccccgactacctcttcagcctcgacagcccgtccgacgaccccagccccggcccctcggcggctcgcgccaagtccgacgccacggagactccgcaccaccacggcgacgacgtgccgccttccgctcgacagataccgcacgtcgcaggaggagcgtcatcgtggcccgccccgccgccgccgtacatggcgcagcctatgtactacttccccgtgccgccaccggtccactatctcgaccagtctgcgcagagtggctacatgcctcgcccgatctaccacattgtcggtggcggaggaagcgaggcgcctggcggagatcttcacgcggccggcggagtctacggcgtctcgcaccacatgcaggggttcccgccgatgatgtacgcgccgccgcgcgcggtcatctacaactacaagtcggaggggatgccatcgctgcctccggaagatgcctaagctaaggagttttgcgtggtattttttttatcgattcgtctaagtcttgttcgttgttttgtatagatggaggggttgatggtgatggatagatattaatgcagctttcgtctagtggaaatatattcgtgaaatgtatatcatactaaatagtatagtatttggtgtgattaattagtattctagttaatgtaatgtgggattcatataatctaggtggttctggtcttatagaaaccatttttgggcattttatatttacataaactggatgttgggtgaatgttctaagcagtatgtgctgtgttgaacctcaatcacttatgagtggtttactaaatttgaatttgctgttctttgcttgagtgctgtattgactgaacgaattctctctagatttgataaaagagatcatgtttagcctgtttacttcttagttagtttgatgagttcatttgttttatgtctgtattgagtttgtatgatgtggtccttctcagattctgctgctgttcagtcctcctgaggatcctgtacttggaacaacatgtaaagcatctacttcggttctgatgaacatatgcatgctagtactagtagatagatcataaaacatatacacatactcagatgtaagaaatcatcatgtgtacatcaaaataaattcatttatataataagtgatcttt

SEQ ID NO: 27149 - DNA, 1481 bp, Zea Mays
ccgaatagaaacccgcctccgtctctctctctatctcttgccacttcttcccccgtccccttccctcgcaactcgcgattcccaaatcccgatgcgccctcgcgcctagccccctccgccgccgccgccaacatcacctcccctgtcacgggacgcccccccccctccccctccaccgcgtcctatgacgtcgccgacctcgcaccacccggactcctccaccccgcacgccgggatcggcaacggcaacggcggcaaccaccacctccacccgccgactctgaccccggcgcccgcgagcaccccggccgctccccccgcgcatgcgcacgggggcccgcaggtgcgtctcatgtgcagcttcggcggccgcatcctgccgcgcccgggggaccgccagctgcgctacgtcggcggggagacccgcatcgtgtccttcccgcgcgccgcggcctccttcgccgccctcgtcgccgcgctcgccaaggccgcgcccgcgctcttcgcccccggggcgcccaggccgtccctcaagtaccagctgccccaggacgacctcgactccctcatctccgtcacctccgacgacgacgtcgaccacctcgtcgacgagctcgaccgcatccacgacctctccgccaacgtcgcccggccgccccgcctccgcgtcttcctcttcgcgcccgcgcccgcgcccgacgccgccttcggctccgtcctctccggcaccgccggcgacgccgcccccagcgaccagtggttcgtcgacgcgctcaacgcccccgcgccgcaccccatcgagcgcgtccgatccgagtcctcctcgatcgtctccgacgtccccgactacctcttcagcctcgacagcccgtccgacgaccccagccccggcccctcggcggctcgcgccaagtccgacgccacggagactccgcaccaccacggcgacgacgtgccgccttccgctcgacagataccgcacgtcgcaggaggagcgtcatcgtggcccgccccgccgccgccgtacatggcgcagcctatgtactacttccccgtgccgccaccggtccactatctcgaccagtctgcgcagagtggctacatgcctcgcccgatctaccacattgtcggtggcggaggaagcgaggcgcctggcggagatcttcacgcggccggcggagtctacggcgtctcgcaccacatgcaggggttcccgccgatgatgtacgcgccgccgcgcgcggtcatctacaactacaagtcggaggggatgccatcgctgcctccggaagattctgctgctgttcagtcctcctgaggatcctgtacttggaacaacatgtaaagcatctacttcggttctgatgaacatatgcatgctagtactagtagatagatcataaaacatatacacatactcagatgtaagaaatcatcatgtgtacatcaaaataaattcatttatataataagtgatcttt

SEQ ID NO: 27150 - DNA, 2152 bp, Zea Mays
ccccccgtggtcccgtcgcccggccgtgagacccaacggcgtttggacgagtgcaacagccgcacgccacgagcgtgggcgtgagtcgtgaccacgtgcggcctgggccagtaccggatccgggcgcgggcggacaccggacggacacaccgcaccgccatcgcccatcggcatcgcctcccaaccgtggttgacgagctcctggagcagatcacccaaacgcgaaagccaaaagccaaagcgagcggagcacaatttatcgtgcgcagcatcggcgcagcccctttccccgcccgcccacaccgcgcaccgcccgaccagctacgggagcacgccgcccctcccccctccccctccccgccccgtgccgtcgctcaccagccccagcgtcgccgttccctgctaactctatcccctccgcctctcgtcgtgctgaggagggcggagacaactgcggtgcggtggtgcctcctcaaatccccgccgacactttctgccgcccccaggtggatcctgtccgcggatccaggaggtgctatctagctccctgatccaagctgaaattaggatctgaaccttccggggcgagctgatgtacggctcgccggtgtccaaggacctcaacgtcccggtgcagccgcccatgatctcgtccgggctgctgaggtacagatcggcgcccagcacggtgcttggcgacctctgcgaggacttcctcccttccgcgtccggcgccgccagccccgacaacgtcttctccaggttcctcgccgagcaccacacccgggacgacaagccgtcgccgccaccgcctgccgcggtccacttcccgagcgaagcggacatggcttcccagcagcagcagcaaatgatgttccactcccaccaccaccagcagcagcagcagatggtgggtgccaagtccggcctttaccgcaccgtgagctcagacatagaaaccgcggccgctgttggcaccggtggcgccagcaacctgattcggcagagcagctcccccgccggattcctcgatcatctgaacatggacaacggatacggggccatgctgagggcgggcatggccacggcggactccctcgcaggtagcggtagcaggctaaagggccagctgagcttctcgtcacggcaggggtcattgatgtcccagatctcagagatggacagcgaggaggtcggagggagcagcccagaggctgccggcggaggcagggggtacatccctgggtacccaatgggttctggttctgggtgggaggactcatcggcgctcatgtcagacaatttgtctggcctgaaacgcccccgggactcgtcggagcctggccagtcagtgcagagccgcatcacgcaccagttcagcctgcccaagacgtcgtctgagatggcaagtattgataaattcctccagttccaggacgcggtgccttgtaagatccgtgccaagcggggatgcgccacccatccgcgcagcatcgccgagagggtgaggagaacaaagatcagtgagcgaatccgaaagctgcaagaactcgttccgaacatggacaagcaaaccaacacatctgacatgctagatttggctgtcgactacatcaaggaactccagaagcaggttaaggtgttaaaggagacccaagctaattgcacctgcccagcaagcaagagccagcagcactcttgctgaagccctgatgcacactatacatgacctgcagaactcgaaagcatcttcacttgggatagaaaaagatgtaagacagctctcattttttttttgtgggtttgaactgtagcatttgaggcttatctaccagacagtgtgtagctttatatgagcacaggggaatggaacaatggcatcatcctcaagcattcaagtgatagggagaagggtaaaattggggagatatataggagaaacaactgtatagtttcgttgtagctttgctatatgtatactacactttcggtataaagtggttaatttacccctattgctagtcgtagcagctgtaaatgtgccgcagataagttgtagaaaaacttggatgcgttcaatgcgagcgatagtgtttcgactctgaacatatattatcattgaattaatgggcatcctctactgaggtctggg

SEQ ID NO: 27151 - DNA, 2071 bp, Zea Mays
ccccccgtggtcccgtcgcccggccgtgagacccaacggcgtttggacgagtgcaacagccgcacgccacgagcgtgggcgtgagtcgtgaccacgtgcggcctgggccagtaccggatccgggcgcgggcggacaccggacggacacaccgcaccgccatcgcccatcggcatcgcctcccaaccgtggttgacgagctcctggagcagatcacccaaacgcgaaagccaaaagccaaagcgagcggagcacaatttatcgtgcgcagcatcggcgcagcccctttccccgcccgcccacaccgcgcaccgcccgaccagctacgggagcacgccgcccctcccccctccccctccccgccccgtgccgtcgctcaccagccccagcgtcgccgttccctgctaactctatcccctccgcctctcgtcgtgctgaggagggcggagacaactgcggtgcggtggtgcctcctcaaatccccgccgacactttctgccgcccccaggtggatcctgtccgcggatccaggaggtgctatctagctccctgatccaagctgaaattaggatctgaaccttccggggcgagctgatgtacggctcgccggtgtccaaggacctcaacgtcccggtgcagccgcccatgatctcgtccgggctgctgaggtacagatcggcgcccagcacggtgcttggcgacctctgcgaggacttcctcccttccgcgtccggcgccgccagccccgacaacgtcttctccaggttcctcgccgagcaccacacccgggacgacaagccgtcgccgccaccgcctgccgcggtccacttcccgagcgaagcggacatggcttcccagcagcagcagcaaatgatgttccactcccaccaccaccagcagcagcagcagatggtgggtgccaagtccggcctttaccgcaccgtgagctcagacatagaaaccgcggccgctgttggcaccggtggcgccagcaacctgattcggcagagcagctcccccgccggattcctcgatcatctgaacatggacaacggatacggggccatgctgagggcgggcatggccacggcggactccctcgcaggtagcggtagcaggctaaagggccagctgagcttctcgtcacggcaggggtcattgatgtcccagatctcagagatggacagcgaggaggtcggagggagcagcccagaggctgccggcggaggcagggggtacatccctgggtacccaatgggttctggttctgggtgggaggactcatcggcgctcatgtcagacaatttgtctggcctgaaacgcccccgggactcgtcggagcctggccagttccaggacgcggtgccttgtaagatccgtgccaagcggggatgcgccacccatccgcgcagcatcgccgagagggtgaggagaacaaagatcagtgagcgaatccgaaagctgcaagaactcgttccgaacatggacaagcaaaccaacacatctgacatgctagatttggctgtcgactacatcaaggaactccagaagcaggttaaggtgttaaaggagacccaagctaattgcacctgcccagcaagcaagagccagcagcactcttgctgaagccctgatgcacactatacatgacctgcagaactcgaaagcatcttcacttgggatagaaaaagatgtaagacagctctcattttttttttgtgggtttgaactgtagcatttgaggcttatctaccagacagtgtgtagctttatatgagcacaggggaatggaacaatggcatcatcctcaagcattcaagtgatagggagaagggtaaaattggggagatatataggagaaacaactgtatagtttcgttgtagctttgctatatgtatactacactttcggtataaagtggttaatttacccctattgctagtcgtagcagctgtaaatgtgccgcagataagttgtagaaaaacttggatgcgttcaatgcgagcgatagtgtttcgactctgaacatatattatcattgaattaatgggcatcctctactgaggtctggg

SEQ ID NO: 27152 - DNA, 2076 bp, Zea Mays
ccccccgtggtcccgtcgcccggccgtgagacccaacggcgtttggacgagtgcaacagccgcacgccacgagcgtgggcgtgagtcgtgaccacgtgcggcctgggccagtaccggatccgggcgcgggcggacaccggacggacacaccgcaccgccatcgcccatcggcatcgcctcccaaccgtggttgacgagctcctggagcagatcacccaaacgcgaaagccaaaagccaaagcgagcggagcacaatttatcgtgcgcagcatcggcgcagcccctttccccgcccgcccacaccgcgcaccgcccgaccagctacgggagcacgccgcccctcccccctccccctccccgccccgtgccgtcgctcaccagccccagcgtcgccgttccctgctaactctatcccctccgcctctcgtcgtgctgaggagggcggagacaactgcggtgcggtggtgcctcctcaaatccccgccgacactttctgccgcccccaggtggatcctgtccgcggatccaggaggtgctatctagctccctgatccaagctgaaattaggatctgaaccttccggggcgagctgatgtacggctcgccggtgtccaaggacctcaacgtcccggtgcagccgcccatgatctcgtccgggctgctgaggtacagatcggcgcccagcacggtgcttggcgacctctgcgaggacttcctcccttccgcgtccggcgccgccagccccgacaacgtcttctccaggttcctcgccgagcaccacacccgggacgacaagccgtcgccgccaccgcctgccgcggtccacttcccgagcgaagcggacatggcttcccagcagcagcagcaaatgatgttccactcccaccaccaccagcagcagcagcagatggtgggtgccaagtccggcctttaccgcaccgtgagctcagacatagaaaccgcggccgctgttggcaccggtggcgccagcaacctgattcggcagagcagctcccccgccggattcctcgatcatctgaacatggacaacggatacggggccatgctgagggcgggcatggccacggcggactccctcgcaggtagcggtagcaggctaaagggccagctgagcttctcgtcacggcaggggtcattgatgtcccagatctcagagatggacagcgaggaggtcggagggagcagcccagaggctgccggcggaggcagggggtacatccctgggtacccaatgggttctggttctgggtgggaggactcatcggcgctcatgtcagacaatttgtctggcctgaaacgcccccgggactcgtcggagcctggccagagccgcatcacgcaccagttcagcctgcccaagacgtcgtctgagatggcaagtattgataaattcctccagttccaggacgcggtgccttgtaagatccgtgccaagcggggatgcgccacccatccgcgcagcatcgccgagagggtgaggagaacaaagatcagtgagcgaatccgaaagctgcaagaactcgttccgaacatggacaagcaaaccaacacatctgacatgctagatttggctgtcgactacatcaaggaactccagaagcaggttaaggtgttaaaggagacccaagctaattgcacctgcccagcaagcaagagccagcagcactcttgctgaagccctgatgcacactatacatgacctgcagaactcgaaagcatcttcacttgggatagaaaaagattgtgtagctttatatgagcacaggggaatggaacaatggcatcatcctcaagcattcaagtgatagggagaagggtaaaattggggagatatataggagaaacaactgtatagtttcgttgtagctttgctatatgtatactacactttcggtataaagtggttaatttacccctattgctagtcgtagcagctgtaaatgtgccgcagataagttgtagaaaaacttggatgcgttcaatgcgagcgatagtgtttcgactctgaacatatattatcattgaattaatgggcatcctctactgaggtctggg

SEQ ID NO: 27153 - DNA, 1998 bp, Zea Mays
ccccccgtggtcccgtcgcccggccgtgagacccaacggcgtttggacgagtgcaacagccgcacgccacgagcgtgggcgtgagtcgtgaccacgtgcggcctgggccagtaccggatccgggcgcgggcggacaccggacggacacaccgcaccgccatcgcccatcggcatcgcctcccaaccgtggttgacgagctcctggagcagatcacccaaacgcgaaagccaaaagccaaagcgagcggagcacaatttatcgtgcgcagcatcggcgcagcccctttccccgcccgcccacaccgcgcaccgcccgaccagctacgggagcacgccgcccctcccccctccccctccccgccccgtgccgtcgctcaccagccccagcgtcgccgttccctgctaactctatcccctccgcctctcgtcgtgctgaggagggcggagacaactgcggtgcggtggtgcctcctcaaatccccgccgacactttctgccgcccccaggtggatcctgtccgcggatccaggaggtgctatctagctccctgatccaagctgaaattaggatctgaaccttccggggcgagctgatgtacggctcgccggtgtccaaggacctcaacgtcccggtgcagccgcccatgatctcgtccgggctgctgaggtacagatcggcgcccagcacggtgcttggcgacctctgcgaggacttcctcccttccgcgtccggcgccgccagccccgacaacgtcttctccaggttcctcgccgagcaccacacccgggacgacaagccgtcgccgccaccgcctgccgcggtccacttcccgagcgaagcggacatggcttcccagcagcagcagcaaatgatgttccactcccaccaccaccagcagcagcagcagatggtgggtgccaagtccggcctttaccgcaccgtgagctcagacatagaaaccgcggccgctgttggcaccggtggcgccagcaacctgattcggcagagcagctcccccgccggattcctcgatcatctgaacatggacaacggatacggggccatgctgagggcgggcatggccacggcggactccctcgcaggtagcggtagcaggctaaagggccagctgagcttctcgtcacggcaggggtcattgatgtcccagatctcagagatggacagcgaggaggtcggagggagcagcccagaggctgccggcggaggcagggggtacatccctgggtacccaatgggttctggttctgggtgggaggactcatcggcgctcatgtcagacaatttgtctggcctgaaacgcccccgggactcgtcggagcctggccaggacgcggtgccttgtaagatccgtgccaagcggggatgcgccacccatccgcgcagcatcgccgagagggtgaggagaacaaagatcagtgagcgaatccgaaagctgcaagaactcgttccgaacatggacaagcaaaccaacacatctgacatgctagatttggctgtcgactacatcaaggaactccagaagcaggttaaggtgttaaaggagacccaagctaattgcacctgcccagcaagcaagagccagcagcactcttgctgaagccctgatgcacactatacatgacctgcagaactcgaaagcatcttcacttgggatagaaaaagattgtgtagctttatatgagcacaggggaatggaacaatggcatcatcctcaagcattcaagtgatagggagaagggtaaaattggggagatatataggagaaacaactgtatagtttcgttgtagctttgctatatgtatactacactttcggtataaagtggttaatttacccctattgctagtcgtagcagctgtaaatgtgccgcagataagttgtagaaaaacttggatgcgttcaatgcgagcgatagtgtttcgactctgaacatatattatcattgaattaatgggcatcctctactgaggtctggg

SEQ ID NO: 27154 - DNA, 2046 bp, Zea Mays
ccccccgtggtcccgtcgcccggccgtgagacccaacggcgtttggacgagtgcaacagccgcacgccacgagcgtgggcgtgagtcgtgaccacgtgcggcctgggccagtaccggatccgggcgcgggcggacaccggacggacacaccgcaccgccatcgcccatcggcatcgcctcccaaccgtggttgacgagctcctggagcagatcacccaaacgcgaaagccaaaagccaaagcgagcggagcacaatttatcgtgcgcagcatcggcgcagcccctttccccgcccgcccacaccgcgcaccgcccgaccagctacgggagcacgccgcccctcccccctccccctccccgccccgtgccgtcgctcaccagccccagcgtcgccgttccctgctaactctatcccctccgcctctcgtcgtgctgaggagggcggagacaactgcggtgcggtggtgcctcctcaaatccccgccgacactttctgccgcccccaggtggatcctgtccgcggatccaggaggtgctatctagctccctgatccaagctgaaattaggatctgaaccttccggggcgagctgatgtacggctcgccggtgtccaaggacctcaacgtcccggtgcagccgcccatgatctcgtccgggctgctgaggtacagatcggcgcccagcacggtgcttggcgacctctgcgaggacttcctcccttccgcgtccggcgccgccagccccgacaacgtcttctccaggttcctcgccgagcaccacacccgggacgacaagccgtcgccgccaccgcctgccgcggtccacttcccgagcgaagcggacatggcttcccagcagcagcagcaaatgatgttccactcccaccaccaccagcagcagcagcagatggtgggtgccaagtccggcctttaccgcaccgtgagctcagacatagaaaccgcggccgctgttggcaccggtggcgccagcaacctgattcggcagagcagctcccccgccggattcctcgatcatctgaacatggacaacggatacggggccatgctgagggcgggcatggccacggcggactccctcgcaggtagcggtagcaggctaaagggccagctgagcttctcgtcacggcaggggtcattgatgtcccagatctcagagatggacagcgaggaggtcggagggagcagcccagaggctgccggcggaggcagggggtacatccctgggtacccaatgggttctggttctgggtgggaggactcatcggcgctcatgtcagacaatttgtctggcctgaaacgcccccgggactcgtcggagcctggccagagccgcatcacgcaccagttcagcctgcccaagacgtcgtctgagatggcaagtattgataaattcctccagttccaggacgcggtgccttgtaagatccgtgccaagcggggatgcgccacccatccgcgcagcatcgccgagagggtgaggagaacaaagatcagtgagcgaatccgaaagctgcaagaactcgttccgaacatggacaagcaaaccaacacatctgacatgctagatttggctgtcgactacatcaaggaactccagaagcaggttaagaactcgaaagcatcttcacttgggatagaaaaagatgtaagacagctctcattttttttttgtgggtttgaactgtagcatttgaggcttatctaccagacagtgtgtagctttatatgagcacaggggaatggaacaatggcatcatcctcaagcattcaagtgatagggagaagggtaaaattggggagatatataggagaaacaactgtatagtttcgttgtagctttgctatatgtatactacactttcggtataaagtggttaatttacccctattgctagtcgtagcagctgtaaatgtgccgcagataagttgtagaaaaacttggatgcgttcaatgcgagcgatagtgtttcgactctgaacatatattatcattgaattaatgggcatcctctactgaggtctggg

SEQ ID NO: 27155 - DNA, 3455 bp, Zea Mays
gccatgtgatgtttttgaataaacattgcaatcaactgtaatacattgacaatagtactgcctcttcgtaatgctttcaccatcgagccgcaatggtcaatgacaacatgaaactagcctcgaatgacaacaagtcaacaatacgatccatgtgggctactgaatactgatagtaccgcacataaaaattatcaaggtaatcccttagacgaacgacaatacaaccaatccatcagctcccgcctctcggtaatgacaaaaataaagccataaccatatgtacaacgatgtttaacataacgactcccggatcaaagacgaaacatatccccaggtcacaggcctaaaatcaatagccatataggccgataacctagctaaattaagcaacctaccctctatcgaatccggaccgtatcatacacatcttcaggcttcatgctagtgaacatgtcagcttgcgctcccacctgaacgatgagccaaccatagctgcatcttcattcctcagacactgtttctgcctgggcagcagccaataatcttccattactctcaggtacaggtgacccatgagcctgagcatccttcactccagaatgattgcctgcagcatctagctcacattctgaactgagctcttcggactggctagatggagatgaatatattaggttcagcatggcgtcaccacatccacccagctcaatcgaagggcaagtaatactgccatcctcatggacagactcttgttgaatcaaccgattcttgaatttatcttcaggggtgttgtccgacatgtttccttcacgtatcttctgacagcaacttaggcacagcttaaacgggcatgttgggcagcaccttaataatcggctcatcgagagcttacagttattactgctttcagaaaacattcgacaagatcgttggttaaatgagaaattgcaacagaaaacagcagtagacaaatacatcaaaaggcagcataagcactaccacaatgcatattagattagctaagaaaaaggctaaactataagatgaaaagaaaacggaactttctagggtgaccaacacagatgcagtgttttcaagtcgtccggctaatcgcgagtcggactaatcggtggactggtaacgactagtgtcaccgaggcgactaggcaggcggactagaatgctggtcgtccgatttagtataggacgactagtttagacctgtatttgttgatgggcttttgcagttggtttgtaactgggccattgctttgtgcctttgtgggctttctagggttgaaactaaacagcacaggcacaaccgcacagccctccagtgtctagtcccacacacacatccacctggagacaccagcgtaggaccagggagccgctaggagcccatccgccgtcgccccaaggcagaggcgccgtcgcggcgtccccccaaggagtagcccccgcctgccgaccaatgcagagccggacgccaccccgaccaagacagagccggagttgccgtccccctcccgacagcaaccttcctggcgccctaccggcctaccctgaccctgtgcagcactcctctgtcctctccctcaatattgcttggatatgtatgttgtttagctgttctgttgtgttttcctaatggctttatgctaactgctggtagtcactttttagtttacacctatttttacagctacttttgtacttatttacttcaattatgtgttatttcagcagcaaatcagcaagaacatggagatttggacaaggaatggggagttatggacagcaaacacaaaggtaagtcaccatcttgtcatcttgatgcttgctgttgctatattgtgtgttgtaaaatgtaaattatatatatactagattatattactatatactccctccatcccaaaatataattagtcgaaagaactatattttgggacggagggagtactatataagtatatatgtccagaaacatatggacgaccagctcgactagggtcgattagtcgtgactaatcaactggtcagtacctatacgactaggttcgactagacgacttgaaaacattgtgcagatgtttcaatgcaaaagaatcataagggtaccataatccttttagcatacctatagttaggctaggccacaggcgaagtgatagggtcgacttgtttattcgacataaaattatgagcgtgtaaaaataactgacaaaattggaacataatactaagctagtgacaagacatcgaataacatgcagattaacatttgcctaaccaaagaaatatctaactgtaggtgcaattacaagattgatttattttcatgctcacaagtgtaagagtaaaatgcacccagcccttccaactttttccaggttctcatctatgtccagtctcagtgaggatctgggtccttatacatttaaattggttgcttaagacaacccctgagcattatattaaaaagaagacctcacacaagtccagaaaaccccccgaacctctaccagtctgctctagctatacacaacgacaccatagcccatgtgagaacgaacccgatcggagccgagcctaggccctgtttggcatagcttatttcacaacttcacatatttaagcagaagttttaccaaacaatagtattctacaacagcttatcagttcagttgcttcttcaaatgaactaaaagcagacaataatcaaaaactgcttttcactagataaaatgtttttccaactagcaacagctaccaaacagaacgttagacatgtgatttagcgtgggacaaagaagggttttttaaccccaacctgaaattcgctcccacaagaagtcgaattcatgacctgaggagtgctactcagaccacctaaccaactcagctagaggcccattcactgaaccaattgcaaagaggacctaaatcctcatttttaggagtttatggacctaggcgagaatacaaaaaaatggttttaagtcaaacactcaaaaaaagttcaaggaccccagttacactttactctgtataaaataacacgaagagaagggagaacttattatgctgtggccagcaaacatgcatatggccgtgcaaaataccgttttgcactgtatattgcactgtttacaaggtgaagtttaaaataggaggtgagatgagtaaaactgatggaggtagccttaaattgagagttgctagcttatatgtagccgatagcaacacgattagagcttaccagtagagtgactcactctgaccagtttcagcaacctggacgcagacattagatatttttgttcctaattaagagaagaaaattagattacaacagaaccacagagcttcaaattttaaaaaagtacaaacaaaccttgtattttagcttccagttccaactcatctagctgttcctggtcaagtcttac

SEQ ID NO: 27156 - DNA, 2396 bp, Zea Mays
aaaaaagcacacgcgttgcgcaaaaggggaaacaggggatctccacctctgccgccgacccgtgggaagagaggagcgtgcgacggcacgcagacgcatctagtctcccgccgcctctactgtcctcgccatcgccaccacagaagtgggtactacacagcagtgagggacaatggcttgtcaacaaggcgtaagattccagccatcttatctagaatgttctcacattacaaagtcattagcagaaagaacagagctgaggatcacaagtgtagaaccaggatgtcaagaggctaccacacactctctgtgtcagtgacgaattcatctgcaacccagcaagcacatttggcatggaagcagcttggtcatatgtacacatatagaggtccacggttcccactgctgggccgagcagcttgtgctgtaagcctgtccttcacgaggttccatataatccctggggtcatggctctagctgttggcaagatggcgcttgcacctcctgtccttgcagactcgcgacccttcattccaagaatggatggcatcatcacaaaggcacaagatactcgccaatttctgtcatctcttgtttgctcaatctgggagggcatcactttgcttgttagagctgtgcatttggcattcctattcttccctgcaactgcattagctccatttgctgacaagtttagtattgcattcaggagaaggtggcttagtcttatgcgccggacccttgaaaaggctgggccagcattcattaagtggggccagtgggctgcaacacgccctgatctttttccaagtgatctctgtgtagagcttgcaaagctccatagtgctgctccagcgcatggctttgcttacagcaaggctgccattgagaaggcattcggtcgtcagctttctgaaatatttgagtcctttgaggagaaccctgtagcttctggaagcattgcacaaatacatcgagccacactaaaacatcaacatcctggaaagcatgttgcagttaaggtgaggcatcctaatgttggagaatcaatcaagagagactttctactcattaatcttgtggcaaaggcttctgatatggtccctggattaagctggctgaggctggatgagagtgttcgccagttcgcagtattcatgatgtctcaagttgatctttctagggaagctgctcatttgagtcgttttatctacaacttccgcagatggagacatgtgtctttccctaagcccttatatccatttgtgcatccatctgtcctagttgagacttttgagaatggagaaagtgtttctcgttttatggaagaaatcgaagggaatgctcggatgaagaaagaccttgcacacattgggacatatgctttcctgaagatgcttctggaggacaattttattcatgcggatatgcaccctggcaacattcttgttcgtttaaatgagaacaagcttgcaaggagacgttttttcagagctaagccccatattgtgttccttgacgtgggcatgactgctgagctcacacgatctgaccgggataacttacaacagttcttcaaggcggtggctactagagatggccgtactgctgccaagtgtacccttcagttatcaaagaatcagagctgtccaaatccagtggccttcaccgaggagctagacaagacgtttacattttggggaacacctgaaggggatgtttttcatcctgttgaatgcatgcatgagttgcttgatacagttcggcgccacaaagtcaacattgatggcaacatatgtactgtaatggttaccattttggtccttgaggggtggcaacgcaagctggacccaggctttgatatcatgcaaacgttgaagactttactgctagagaaggacataaagcaaccaattgattttttctcataaacaaacctgtcagatcgttcttatgtatagaagcagtggaagatgatgccctaccaatcagaaggcgaaacatctaatccaactcgaagcaacctggcattaattgagcagatatattatgcagtacgtccgtggctccacgctatggggttcacatgatgtgttcccctcccctcttcgatccctggcggggttctgttctgtccaaggcaggaggatggggtggccggtttcgagtcacgagcaaccaaagaggactctggcgattcagacgtacgtggggggcgtacaaggctgtccaggcacacgaactagtctgcgtatggctctgcagcagtatacacatcgcgtatgcgaacccgtatgccattcgccatggcatctccccattgacggtctgtgccacacctgctgagactggaagcaaaacagataagcctatcatcggctacggttgcttgctt

SEQ ID NO: 27157 - DNA, 2694 bp, Zea Mays
aaaaaagcacacgcgttgcgcaaaaggggaaacaggggatctccacctctgccgccgacccgtgggaagagaggagcgtgcgacggcacgcagacgcatctagtctcccgccgcctctactgtcctcgccatcgccagcaccccaaggctcggtacgattcggctgcgtgcccgcgcgtcggcactgcaccgcggcgcgcaggcggaccgtgctggggttttggtggggtgtagggaggggcgtcctgcgctctgcggcggcttgatcctgtgaaggcggcggcagcagcagcaggcttctccgatgcagcggctagtgggggtgggcgagaggctattggcaatcggaacaaataggcgggcggccacttattcccattcgagccacagaagtgggtactacacagcagtgagggacaatggcttgtcaacaaggcgtaagattccagccatcttatctagaatgttctcacattacaaagtcattagcagaaagaacagagctgaggatcacaagtgtagaaccaggatgtcaagaggctaccacacactctctgtgtcagtgacgaattcatctgcaacccagcaagcacatttggcatggaagcagcttggtcatatgtacacatatagaggtccacggttcccactgctgggccgagcagcttgtgctgtaagcctgtccttcacgaggttccatataatccctggggtcatggctctagctgttggcaagatggcgcttgcacctcctgtccttgcagactcgcgacccttcattccaagaatggatggcatcatcacaaaggcacaagatactcgccaatttctgtcatctcttgtttgctcaatctgggagggcatcactttgcttgttagagctgtgcatttggcattcctattcttccctgcaactgcattagctccatttgctgacaagtttagtattgcattcaggagaaggtggcttagtcttatgcgccggacccttgaaaaggctgggccagcattcattaagtggggccagtgggctgcaacacgccctgatctttttccaagtgatctctgtgtagagcttgcaaagctccatagtgctgctccagcgcatggctttgcttacagcaaggctgccattgagaaggcattcggtcgtcagctttctgaaatatttgagtcctttgaggagaaccctgtagcttctggaagcattgcacaaatacatcgagccacactaaaacatcaacatcctggaaagcatgttgcagttaaggtgaggcatcctaatgttggagaatcaatcaagagagactttctactcattaatcttgtggcaaaggcttctgatatggtccctggattaagctggctgaggctggatgagagtgttcgccagttcgcagtattcatgatgtctcaagttgatctttctagggaagctgctcatttgagtcgttttatctacaacttccgcagatggagacatgtgtctttccctaagcccttatatccatttgtgcatccatctgtcctagttgagacttttgagaatggagaaagtgtttctcgttttatggaagaaatcgaagggaatgctcggatgaagaaagaccttgcacacattgggacatatgctttcctgaagatgcttctggaggacaattttattcatgcggatatgcaccctggcaacattcttgttcgtttaaatgagaacaagcttgcaaggagacgttttttcagagctaagccccatattgtgttccttgacgtgggcatgactgctgagctcacacgatctgaccgggataacttacaacagttcttcaaggcggtggctactagagatggccgtactgctgccaagtgtacccttcagttatcaaagaatcagagctgtccaaatccagtggccttcaccgaggagctagacaagacgtttacattttggggaacacctgaaggggatgtttttcatcctgttgaatgcatgcatgagttgcttgatacagttcggcgccacaaagtcaacattgatggcaacatatgtactgtaatggttaccattttggtccttgaggggtggcaacgcaagctggacccaggctttgatatcatgcaaacgttgaagactttactgctagagaaggacataaagcaaccaattgattttttctcataaacaaacctgtcagatcgttcttatgtatagaagcagtggaagatgatgccctaccaatcagaaggcgaaacatctaatccaactcgaagcaacctggcattaattgagcagatatattatgcatatgaaaattttgccgaccacgaccacccaggcgggtccagccatggtgttctttaaaattcttgggaagttcctgtccaccaaacttcgtagaagagcaaacagatgtagaatagtagtcattgaattgaggccgagttgaactacattatggcacacataggtttggttccagacttgtgattcataccggcaactaaggaattcctcaatcaaggaacaggaagagacagggatggggtaaaaatggctaagctataagtttggttgtccgttttatgcgtggctacgttaaagttttggaccgtcttcagtgttcagtgcgggtgagccgttatttaggtaatgttatgttccagattatgcttaaatagtgaatcgtctcgctccat

SEQ ID NO: 27158 - DNA, 1518 bp, Zea Mays
aaggaatcattctctaagtttgatgtgaataagcttgctcggctcgcgggtatctattataatgatttttcttttgatgatcgcaagactataaaagatcagctaagaacttttattattcatgtacgaagaattgaagagttcaaagcttgttatgatcttgcgtgcctatcaaagacaatggttcaacttgagagacgtattgtgtttccattggtatatagacttattgagttaacattgttgttaccagtggcgactgcaacagttgaaagagccttctctgctatgaagattattaagactgagttgtgcaacaagatgtcttggttaaatgacttgatggtgtgctacattgaaagggagatttttaaaagactcgatcttcagaaaattaagaaggcatttcaaaacaagaaaactagacaaacgcaattgcctaggtctcctagaactggactcaactatagattttattcgatatatggcatttggttataaatggattgtggtcgttattactctttaataagcaacaccttgatttttcgacgtcctccgccattgggcaacaacaactgcaaaagggggagtggagagtacatctcaagattggacaacaaaaatgttcgtattctttgatccttctaatttttgtgccgctatagtgttaggatttgtgtgtatcctcgtctagcctatgttcataaggcgtcgcctcgccacgcgcctaatttgcctaggcgtccagaaggtggcggaacgccgcacctcgccttaccgccttaataactatgtgcatgggcttgtatgatgtttccatttaatgttgaatgttgttgaccctgtgaaaaagatagtatgttattttagcatctttctatattgatgaggtatggggtttcaatgttttgtatttggtacttacttttacgattcaaatgatcatgtctactataatgttagtgggtatgggtacccgctacacatggtgggtatgggtatggcgtaattttgtacccatgatgggtagcgggtatgaggcatttttctctagtgggtacgggtatggctttgtgtgcggtgtgcccattgggtaccttacccactaccatccctacctccaatccccttcaatccacccctaaccgaacataataattaatagtgtgctcctcttgtgtgaacttgaaaataagcaaatagtgcacacaatttcaatggctataataacatgtaagcagaaatttgtgcagaaaccatgcaatgtgcatcgtcatgccattgctagttactgtatcgcacttcattaatgcacacatggttatttctgggctcccctctgttcaactcaaaatcattgcattgtaaatcgcacagcctactcagcaagaaaccatctcgatcacagatattcagcatttatagaatcgcatagctctacgggcattgcaaaatcaaacgcaaaggtagggccatgaaaccctatcctcaatattaggtcgagacagttattcg

SEQ ID NO: 27159 - DNA, 1521 bp, Zea Mays
cacgagcagaggtttaccgtcaccatcagggagaacacaacctgctgtttccccacgtggccaaagctttggacaaagaattatgggcaatatgatggataatcttttggttagaagtcttacatccaaatcaaaaggtcgagtcgatgatattgctccaccctcacctgtgaaggcccctgatgatgatgagacagacaaggctgaaggggaagagagccctatgatggaaactgtccggagcaaatgtatcacacagttgctgctgctcggggcaattgacagcatacaggtaagcagtttcctccactttatatgcatgctcttagatctgagtccatccattgtttctctgacaatgtggactggaagcacctttgtctgtgatacaattgaggacttctagttgcaaataaggaattcatcaccctaatatattagccagccctacttgggttgatatactgtgattaactattgatgaaacatttcagaagaggtattggagcaggttaaaagctacacaacagatagcaataatggatatcttgctctcactgctagaatttgcttcttcgtataactcaccttcaaattttcggacgagaatgcaccatatacctctagaaaggaaaagatcaagtacctagcagaagggaagctggtttctttttgtgggcagattttgaaagaggcgtctgttctccagcctagcactggggaggctgccagtgcagacatacatcgtgtattagacttacgggcacctgttattgtaaaggttttgaaaggaatgtgcatcatggatgctcagatcttcagaaggcacctgaaagagttctatccattaattaccaaacttatctgttgtgatcagatggatgttcgtggagcccttggtgatctctttagcaaacagcttactccactcatgccctgaagtctggcagtatttcctcccttgcatagatcttgttggaacatattcttcgtcagcatttttgtgcaaacatggagcaccggttgggtgcttgacatccttaacgcgctttctggtgcaacagctactccctaggaacttaagagcttgatcagcgggaacggcaggtccctaggccacatcttttttttttggatgacgcaagggaagtagcttgactgatgcgcacaccgtgtttttcctagcaggcttgtactttggagctatttatctgtgcccggacagggatgatgcttccattatacagtagagtagtgttggtaatatgtacacattgttgagaacgttgtacttgaggcctgttgttattatacggcaatagtagattgtttgcggcaagcctcgttttttgtgcgtctaattctctgacttgcagaattgcggtggcaaatacccattgccctccaagttgtgcgttagcgtatttatccgtagttgacagcaatgaacatattactactgctttctgtattttctattaacgcatgcacatagtttattgggtttccatattttcaatc

SEQ ID NO: 27160 - DNA, 1847 bp, Zea Mays
gtaaccttcacctacatattcatgagagaggtatcctttatgcttccacctcttctcagtttgctgcttgaatgtgcgaaaaaaacagaccaaactgtcgtttcaatttctcttggcgctttagttcatctgattgaagttggtggtcaccagttcagtgatggtgattgggaaacattattaaagagtattagggatgcgtcatacacaactcagcctcttgaactgctcaattcattaggattccataaatcaaacaaccagcagttactttcaagagaagaaagcaatgcacatggcaatagttaccatggcagccggggggaaccctccatcgttaataatggtgagcatagtcatgcagaggcaggtccacaaactagcctggagaattcggaaggtttaccgtcaccatcagggagaacacaacctgctgtttccccacgtggccaaagctttggacaaagaattatgggcaatatgatggataatcttttggttagaagtcttacatccaaatcaaaaggtcgagtcgatgatattgctccaccctcacctgtgaaggcccctgatgatgatgagacagacaaggctgaaggggaagagagccctatgatggaaactgtccggagcaaatgtatcacacagttgctgctgctcggggcaattgacagcatacagaagaggtattggagcaggttaaaagctacacaacagatagcaataatggatatcttgctctcactgctagaatttgcttcttcgtataactcaccttcaaattttcggacgagaatgcaccatatacctctagaaagacctccactgaatcttctccgtcaagaactagttggaacaacaatttatttagatatccttcataagtcaacagtggagcaggacaaaattgactccattgaggaaacaaatggtttaaatgtggaatctggtgaccaggaaaagatcaagtacctagcagaagggaagctggtttctttttgtgggcagattttgaaagaggcgtctgttctccagcctagcactggggaggctgccagtgcagacatacatcgtgtattagacttacgggcacctgttattgtaaaggttttgaaaggaatgtgcatcatggatgctcagatcttcagaaggcacctgaaagagttctatccattaattaccaaacttatctgttgtgatcagatggatgttcgtggagcccttggtgatctctttagcaaacagcttactccactcatgccctgaagtctggcagtatttcctcccttgcatagatcttgttggaacatattcttcgtcagcatttttgtgcaaacatggagcaccggttgggtgcttgacatccttaacgcgctttctggtgcaacagctactccctaggaacttaagagcttgatcagcgggaacggcaggtccctaggccacatcttttttttttggatgacgcaagggaagtagcttgactgatgcgcacaccgtgtttttcctagcaggcttgtactttggagctatttatctgtgcccggacagggatgatgcttccattatacagtagagtagtgttggtaatatgtacacattgttgagaacgttgtacttgaggcctgttgttattatacggcaatagtagattgtttgcggcaagcctcgttttttgtgcgtctaattctctgacttgcagaattgcggtggcaaatacccattgccctccaagttgtgcgttagcgtatttatccgtagttgacagcaatgaacatattactactgctttctgtattttctattaacgcatgcacatagtttattgggtttccatattttcaatc

SEQ ID NO: 27161 - DNA, 4300 bp, Zea Mays
cttgaggggccaaatctttttgaacgcacgtgcgctatcaagaatagcacaaggatctcaaattgctgatactaactccatcgtgtcatcccaaacagtttctgtaaaaagctcctctctccagtgtttggtgattattctgaagtcattggctgattgggagcaacttcgaagagattcctcaaagcaagggagcattgttgaatctcatgaagaggatgcttcaaggagattgacaactgatgagatgaagaaccaagaggatggtcggaatcagtttgagagagccaaagctcataagtcgacaatggaggctgcaatctctgagtttaatcgtaaaccaagtaaagggattgaatatttgttgtcaaataaattggtagaaaataaggcatcatctgtagctcagtttctcaagagcaatcccagcttggataaggttatgattggtgaatacttgggacagcatgaggagttccctcttgctgtgatgcattcctatgttgactccatgaagtttatagggttgaaatttgatgctgcaattcgtgcgttcctgaaaggatttcgccttcctggtgaggcgcagaagatagatcgcataatggaaaagtttgctgagcggtactgtgctgataatcctgagcttttcaaaaatgcagatactgcttatgttcttgcttatgctgttataatgttgaatactgatgcacataatccaatggtgtggcctaagatgtcaaaatcagattttgttcgtatgaacactgcaagtgatgcagaagaatgtgtcccaaatgagctcttggaagaaatttatgattccattgtcaaggaagagataaagatgaaagacgattctcatgatacttcaaaatccaccaagagacctgaaacagaagaaagaggccgtcttgtcaatattctcaatttagcccttccaagactgaagtcagctagtgatacaaaggcagagagtgaaaagatcatcaaacagacccaggcacttttcaagaaccagggacagaagaaaggtgtttttcatgttgcgcagcaggttgagcttgttagaccaatgcttgaagctgtaggatggcctttgcttgcaacattttctgtgaccatggaggaaggtgacagtaagcctagggttgtatcatgcatggaaggatttcgtgctggtatccatcttactcgtgttcttggaatggacaccatgcgctatgctttcttgacgtccttagtgcggtttacatttttgcacgctcccaaggagatgcgcagtaaaaatgttgaggcactgaggactcttcttggtttagctgacactgatatggatgctttacaagatacttggaatgctgttttagaatgtgtctcaagactcgagtatatcacttcgaacccttcaatttctgcaactgtaatgctgggatcaaatcaaatatcgagggattctgtagtccaatcgctgaaagagttggctggaaagcctgctgaacaaatctttgtaaacagtgtaaaactgccaagtgattcaattgttgaattcttcaccgccctatgtggtgtttctgctgaagaactaaaacaaacacctgctcgtgtctttagcttgcagaagcttgtagagataagctattataacatggctcgcattcggctggtgtgggctagaatatggtctgtgttggcccagcactttattgctgctggaagccacaatgaggagaaagttgcaatgtatgccattgattcactaagacagcttggtatgaagtacttggagcgtgctgaattaaacaatttcacatttcagagtgacatactgaaaccttttgtcattttaatgaggaatacccacaactcaaaaatccgaggtttaattgttgattgcattgttcagttgatcaagtcaaaagttggtagcataaagtcagggtggcgttgcgtattcatgatatttactgcagcagctgatgatgaggatgaatcaattgttgagagtgcttttgaaaatgtagaacaagttatcttggaacattttgaccaagttgttggtgattgcttcatggattgcgtcaactgtcttattggttttgcaaataacaagtgcactcctcggattagtttgaaggctattgctctcctgcgtatatgtgaagatcgtttggcagagggattcattccaggcggcgctattaaacctattgatgttgttccagaggccaattttgatgtgactgagcattattggtttcctatgctagctggtttgtctgatttgactttagactccagaccagaagcatgctggaagggatgggctttcttcttctggggatgattggcttcgtgatactagcattcattcgctgcagttaatctgcaaccttttcaatacattctataaggtagcatgtgttcttccttttagttgcttgacaaacatcctttgtataattcagaatataagtgtgatgaaactggtcatccgctacttctatagatatcacattgaaacttgtttggttggccatcgtctgactgtggcacttacaggaggtatcctttatgcttccacctcttctcagtttgctgcttgaatgtgcgaaaaaaacagaccaaactgtcgtttcaatttctcttggcgctttagttcatctgattgaagttggtggtcaccagttcagtgatggtgattgggaaacattattaaagagtattagggatgcgtcatacacaactcagcctcttgaactgctcaattcattaggattccataaatcaaacaaccagcagttactttcaagagaagaaagcaatgcacatggcaatagttaccatggcagccggggggaaccctccatcgttaataatggtgagcatagtcatgcagaggcaggtccacaaactagcctggagaattcggaaggtttaccgtcaccatcagggagaacacaacctgctgtttccccacgtggccaaagctttggacaaagaattatgggcaatatgatggataatcttttggttagaagtcttacatccaaatcaaaaggtcgagtcgatgatattgctccaccctcacctgtgaaggcccctgatgatgatgagacagacaaggctgaaggggaagagagccctatgatggaaactgtccggagcaaatgtatcacacagttgctgctgctcggggcaattgacagcatacagaagaggtattggagcaggttaaaagctacacaacagatagcaataatggatatcttgctctcactgctagaatttgcttcttcgtataactcaccttcaaattttcggacgagaatgcaccatatacctctagaaaggacaaaattgactccattgaggaaacaaatggtttaaatgtggaatctggtgaccaggaaaagatcaagtacctagcagaagggaagctggtttctttttgtgggcagattttgaaagaggcgtctgttctccagcctagcactggggaggctgccagtgcagacatacatcgtgtattagacttacgggcacctgttattgtaaaggttttgaaaggaatgtgcatcatggatgctcagatcttcagaaggcacctgaaagagttctatccattaattaccaaacttatctgttgtgatcagatggatgttcgtggagcccttggtgatctctttagcaaacagcttactccactcatgccctgaagtctggcagtatttcctcccttgcatagatcttgttggaacatattcttcgtcagcatttttgtgcaaacatggagcaccggttgggtgcttgacatccttaacgcgctttctggtgcaacagctactccctaggaacttaagagcttgatcagcgggaacggcaggtccctaggccacatcttttttttttggatgacgcaagggaagtagcttgactgatgcgcacaccgtgtttttcctagcaggcttgtactttggagctatttatctgtgcccggacagggatgatgcttccattatacagtagagtagtgttggtaatatgtacacattgttgagaacgttgtacttgaggcctgttgttattatacggcaatagtagattgtttgcggcaagcctcgttttttgtgcgtctaattctctgacttgcagaattgcggtggcaaatacccattgccctccaagttgtgcgttagcgtatttatccgtagttgacagcaatgaacatattactactgctttctgtattttctattaacgcatgcacatagtttattgggtttccatattttcaatc

SEQ ID NO: 27162 - DNA, 4607 bp, Zea Mays
agttgtttttcagtatgcttgtggtatgttttcagttctgttgctccggtttagagagagtctgaagagggggaaattggtgtcttctttcctttgatagttttaaggtctctggatagctctgatagccccctcagccagaaggctagtgttcttaggatgttggagaaagtttgcaaagatccccaaatgcttgcagatgtgtttgtgaactatgactgtgatcttgaggggccaaatctttttgaacgcacgtgcgctatcaagaatagcacaaggatctcaaattgctgatactaactccatcgtgtcatcccaaacagtttctgtaaaaagctcctctctccagtgtttggtgattattctgaagtcattggctgattgggagcaacttcgaagagattcctcaaagcaagggagcattgttgaatctcatgaagaggatgcttcaaggagattgacaactgatgagatgaagaaccaagaggatggtcggaatcagtttgagagagccaaagctcataagtcgacaatggaggctgcaatctctgagtttaatcgtaaaccaagtaaagggattgaatatttgttgtcaaataaattggtagaaaataaggcatcatctgtagctcagtttctcaagagcaatcccagcttggataaggttatgattggtgaatacttgggacagcatgaggagttccctcttgctgtgatgcattcctatgttgactccatgaagtttatagggttgaaatttgatgctgcaattcgtgcgttcctgaaaggatttcgccttcctggtgaggcgcagaagatagatcgcataatggaaaagtttgctgagcggtactgtgctgataatcctgagcttttcaaaaatgcagatactgcttatgttcttgcttatgctgttataatgttgaatactgatgcacataatccaatggtgtggcctaagatgtcaaaatcagattttgttcgtatgaacactgcaagtgatgcagaagaatgtgtcccaaatgagctcttggaagaaatttatgattccattgtcaaggaagagataaagatgaaagacgattctcatgatacttcaaaatccaccaagagacctgaaacagaagaaagaggccgtcttgtcaatattctcaatttagcccttccaagactgaagtcagctagtgatacaaaggcagagagtgaaaagatcatcaaacagacccaggcacttttcaagaaccagggacagaagaaaggtgtttttcatgttgcgcagcaggttgagcttgttagaccaatgcttgaagctgtaggatggcctttgcttgcaacattttctgtgaccatggaggaaggtgacagtaagcctagggttgtatcatgcatggaaggatttcgtgctggtatccatcttactcgtgttcttggaatggacaccatgcgctatgctttcttgacgtccttagtgcggtttacatttttgcacgctcccaaggagatgcgcagtaaaaatgttgaggcactgaggactcttcttggtttagctgacactgatatggatgctttacaagatacttggaatgctgttttagaatgtgtctcaagactcgagtatatcacttcgaacccttcaatttctgcaactgtaatgctgggatcaaatcaaatatcgagggattctgtagtccaatcgctgaaagagttggctggaaagcctgctgaacaaatctttgtaaacagtgtaaaactgccaagtgattcaattgttgaattcttcaccgccctatgtggtgtttctgctgaagaactaaaacaaacacctgctcgtgtctttagcttgcagaagcttgtagagataagctattataacatggctcgcattcggctggtgtgggctagaatatggtctgtgttggcccagcactttattgctgctggaagccacaatgaggagaaagttgcaatgtatgccattgattcactaagacagcttggtatgaagtacttggagcgtgctgaattaaacaatttcacatttcagagtgacatactgaaaccttttgtcattttaatgaggaatacccacaactcaaaaatccgaggtttaattgttgattgcattgttcagttgatcaagtcaaaagttggtagcataaagtcagggtggcgttgcgtattcatgatatttactgcagcagctgatgatgaggatgaatcaattgttgagagtgcttttgaaaatgtagaacaagttatcttggaacattttgaccaagttgttggtgattgcttcatggattgcgtcaactgtcttattggttttgcaaataacaagtgcactcctcggattagtttgaaggctattgctctcctgcgtatatgtgaagatcgtttggcagagggattcattccaggcggcgctattaaacctattgatgttgttccagaggccaattttgatgtgactgagcattattggtttcctatgctagctggtttgtctgatttgactttagactccagaccagaagcatgctggaagggatgggctttcttcttctggggatgattggcttcgtgatactagcattcattcgctgcagttaatctgcaaccttttcaatacattctataaggtagcatgtgttcttccttttagttgcttgacaaacatcctttgtataattcagaatataagtgtgatgaaactggtcatccgctacttctatagatatcacattgaaacttgtttggttggccatcgtctgactgtggcacttacaggaggtatcctttatgcttccacctcttctcagtttgctgcttgaatgtgcgaaaaaaacagaccaaactgtcgtttcaatttctcttggcgctttagttcatctgattgaagttggtggtcaccagttcagtgatggtgattgggaaacattattaaagagtattagggatgcgtcatacacaactcagcctcttgaactgctcaattcattaggattccataaatcaaacaaccagcagttactttcaagagaagaaagcaatgcacatggcaatagttaccatggcagccggggggaaccctccatcgttaataatggtgagcatagtcatgcagaggcaggtccacaaactagcctggagaattcggaaggtttaccgtcaccatcagggagaacacaacctgctgtttccccacgtggccaaagctttggacaaagaattatgggcaatatgatggataatcttttggttagaagtcttacatccaaatcaaaaggtcgagtcgatgatattgctccaccctcacctgtgaaggcccctgatgatgatgagacagacaaggctgaaggggaagagagccctatgatggaaactgtccggagcaaatgtatcacacagttgctgctgctcggggcaattgacagcatacagaagaggtattggagcaggttaaaagctacacaacagatagcaataatggatatcttgctctcactgctagaatttgcttcttcgtataactcaccttcaaattttcggacgagaatgcaccatatacctctagaaagacctccactgaatcttctccgtcaagaactagttggaacaacaatttatttagatatccttcataagtcaacagtggagcaggacaaaattgactccattgaggaaacaaatggtttaaatgtggaatctggtgaccaggaaaagatcaagtacctagcagaagggaagctggtttctttttgtgggcagattttgaaagaggcgtctgttctccagcctagcactggggaggctgccagtgcagacatacatcgtgtattagacttacgggcacctgttattgtaaaggttttgaaaggaatgtgcatcatggatgctcagatcttcagaaggcacctgaaagagttctatccattaattaccaaacttatctgttgtgatcagatggatgttcgtggagcccttggtgatctctttagcaaacagcttactccactcatgccctgaagtctggcagtatttcctcccttgcatagatcttgttggaacatattcttcgtcagcatttttgtgcaaacatggagcaccggttgggtgcttgacatccttaacgcgctttctggtgcaacagctactccctaggaacttaagagcttgatcagcgggaacggcaggtccctaggccacatcttttttttttggatgacgcaagggaagtagcttgactgatgcgcacaccgtgtttttcctagcaggcttgtactttggagctatttatctgtgcccggacagggatgatgcttccattatacagtagagtagtgttggtaatatgtacacattgttgagaacgttgtacttgaggcctgttgttattatacggcaatagtagattgtttgcggcaagcctcgttttttgtgcgtctaattctctgacttgcagaattgcggtggcaaatacccattgccctccaagttgtgcgttagcgtatttatccgtagttgacagcaatgaacatattactactgctttctgtattttctattaacgcatgcacatagtttattgggtttccatattttcaatc

SEQ ID NO: 27163 - DNA, 5925 bp, Zea Mays
tggcgatctcccagctgaactgaaagagcaagcgtgcgtgtgagacaaccaggtccgatccgcccccgccgagccgaggacagcagcgggggctctcggtctcctcctaggctcctacagatctcgtaccccgtcacagatctcgcgccctctccatcccatgcccaccccccctcgtcggatctgaccactccgcccctcctcccgtctccgccgccggagctgatatccgcggtcatggcgggcgccgcgggcgggttcgtcacgcgggccttcgaggccatgctcaaggagtgcgctgccaaccgcggcaagttcgccgcgctgcagcaatccatccagtcatacctcgatagtatcaagggggctacagcagagggcgcggtcatcaccgaggcgctcgggtcagctgggcgcgtgctcgacgggccgcaggccgagctggtgctgcagccgctccgcctcgccgtcgagaccaagcacgtcaagctcgtcgagcccgcgctcgactgcctccacaaacttattgcttatgaccatttagaaggcgatcctggtttagaaggtggtaaaaattccccaatatttacagacatcctgaacatggtatgtggttgcgtcgataacacctcctctgacagtactgttctccaagtcttgaaagtgcttcttaatgctgttgcttcaaataagtttagagttcatggagagccattgcttggggtcattagagtatgctataacattgctcttaataggtacctgttatatcgctaccttcttgtttgcagtatgttgccttgttgccctttggaccatgtatgataatttattcatttgtattttcttagcaagagccctgtgaaccaggctacctcaaaggctatgttaacccagatgatcagcattgtattcaggagaatggaatctgagcaggtttctgtatcgcccggaagctctgtggttaaagatatgccttcatctatcacaaatgattctgaaaatggagaaatatctactgatggccaagatgaggaaaaggttactctgggagatgcattgtccatgaatcggccttctgaagctcctccaacgtctgttgaagagcttcagaatcttgcaggtggagcagatattaaggggctggaagctgttctagataaggctgttgaacttgaagacgggaaaaaagtgtcacgtggaattgacctggacactgtgaatataatacagcgtgatgcactattgctctttcgaactctctgcaagatgagcatgaaagaagaaagtgatgaggttgctaccaagacaaggctgctatcacttgaactgctccagagggagtcagcaatgtgttcatcaaaaattttcacttcattgattcagtcaaagcatatctttcgtatgctcttctgcgagcatctgtctcttcatctccagttgtttttcagtatgcttgtggtatgttttcagttctgttgctccggtttagagagagtctgaagggggaaattggtgtcttctttcctttgatagttttaaggtctctggatagctctgatagccccctcagccagaaggctagtgttcttaggatgttggagaaagtttgcaaagatccccaaatgcttgcagatgtgtttgtgaactatgactgtgatcttgaggggccaaatctttttgaacgcacggttagtgcgctatcaagaatagcacaaggatctcaaattgctgatactaactccatcgtgtcatcccaaacagtttctgtaaaaagctcctctctccagtgtttggtgattattctgaagtcattggctgattgggagcaacttcgaagagattcctcaaagcaagggagcattgttgaatctcatgaagaggatgcttcaaggagattgacaactgatgagatgaagaaccaagaggatggtcggaatcagtttgagagagccaaagctcataagtcgacaatggaggctgcaatctctgagtttaatcgtaaaccaagtaaagggattgaatatttgttgtcaaataaattggtagaaaataaggcatcatctgtagctcagtttctcaagagcaatcccagcttggataaggttatgattggtgaatacttgggacagcatgaggagttccctcttgctgtgatgcattcctatgttgactccatgaagtttatagggttgaaatttgatgctgcaattcgtgcgttcctgaaaggatttcgccttcctggtgaggcgcagaagatagatcgcataatggaaaagtttgctgagcggtactgtgctgataatcctgagcttttcaaaaatgcagatactgcttatgttcttgcttatgctgttataatgttgaatactgatgcacataatccaatggtgtggcctaagatgtcaaaatcagattttgttcgtatgaacactgcaagtgatgcagaagaatgtgtcccaaatgagctcttggaagaaatttatgattccattgtcaaggaagagataaagatgaaagacgattctcatgatacttcaaaatccaccaagagacctgaaacagaagaaagaggccgtcttgtcaatattctcaatttagcccttccaagactgaagtcagctagtgatacaaaggcagagagtgaaaagatcatcaaacagacccaggcacttttcaagaaccagggacagaagaaaggtgtttttcatgttgcgcagcaggttgagcttgttagaccaatgcttgaagctgtaggatggcctttgcttgcaacattttctgtgaccatggaggaaggtgacagtaagcctagggttgtatcatgcatggaaggatttcgtgctggtatccatcttactcgtgttcttggaatggacaccatgcgctatgctttcttgacgtccttagtgcggtttacatttttgcacgctcccaaggagatgcgcagtaaaaatgttgaggcactgaggactcttcttggtttagctgacactgatatggatgctttacaagatacttggaatgctgttttagaatgtgtctcaagactcgagtatatcacttcgaacccttcaatttctgcaactgtaatgctgggatcaaatcaaatatcgagggattctgtagtccaatcgctgaaagagttggctggaaagcctgctgaacaaatctttgtaaacagtgtaaaactgccaagtgattcaattgttgaattcttcaccgccctatgtggtgtttctgctgaagaactaaaacaaacacctgctcgtgtctttagcttgcagaagcttgtagagataagctattataacatggctcgcattcggctggtgtgggctagaatatggtctgtgttggcccagcactttattgctgctggaagccacaatgaggagaaagttgcaatgtatgccattgattcactaagacagcttggtatgaagtacttggagcgtgctgaattaaacaatttcacatttcagagtgacatactgaaaccttttgtcattttaatgaggaatacccacaactcaaaaatccgaggtttaattgttgattgcattgttcagttgatcaagtcaaaagttggtagcataaagtcagggtggcgttgcgtattcatgatatttactgcagcagctgatgatgaggatgaatcaattgttgagagtgcttttgaaaatgtagaacaagttatcttggaacattttgaccaagttgttggtgattgcttcatggattgcgtcaactgtcttattggttttgcaaataacaagtgcactcctcggattagtttgaaggctattgctctcctgcgtatatgtgaagatcgtttggcagagggattcattccaggcggcgctattaaacctattgatgttgttccagaggccaattttgatgtgactgagcattattggtttcctatgctagctggtttgtctgatttgactttagactccagaccagaagtcagacactgtgcactggaagtgttgtttgatttgttgaatgaaagaggacataagttctcttctcccttctgggagagtatttttcatcgtgtactatttccaatttttgatcatgtaaggcatgctggaagggatgggctttcttcttctggggatgattggcttcgtgatactagcattcattcgctgcagttaatctgcaaccttttcaatacattctataagttcatctgattgaagttggtggtcaccagttcagtgatggtgattgggaaacattattaaagagtattagggatgcgtcatacacaactcagcctcttgaactgctcaattcattaggattccataaatcaaacaaccagcagttactttcaagagaagaaagcaatgcacatggcaatagttaccatggcagccggggggaaccctccatcgttaataatggtgagcatagtcatgcagaggcaggtccacaaactagcctggagaattcggaaggtttaccgtcaccatcagggagaacacaacctgctgtttccccacgtggccaaagctttggacaaagaattatgggcaatatgatggataatcttttggttagaagtcttacatccaaatcaaaaggtcgagtcgatgatattgctccaccctcacctgtgaaggcccctgatgatgatgagacagacaaggctgaaggggaagagagccctatgatggaaactgtccggagcaaatgtatcacacagttgctgctgctcggggcaattgacagcatacagaagaggtattggagcaggttaaaagctacacaacagatagcaataatggatatcttgctctcactgctagaatttgcttcttcgtataactcaccttcaaattttcggacgagaatgcaccatatacctctagaaagacctccactgaatcttctccgtcaagaactagttggaacaacaatttatttagatatccttcataagtcaacagtggagcaggacaaaattgactccattgaggaaacaaatggtttaaatgtggaatctggtgaccaggaaaagatcaagtacctagcagaagggaagctggtttctttttgtgggcagattttgaaagaggcgtctgttctccagcctagcactggggaggctgccagtgcagacatacatcgtgtattagacttacgggcacctgttattgtaaaggttttgaaaggaatgtgcatcatggatgctcagatcttcagaaggcacctgaaagagttctatccattaattaccaaacttatctgttgtgatcagatggatgttcgtggagcccttggtgatctctttagcaaacagcttactccactcatgccctgaagtctggcagtatttcctcccttgcatagatcttgttggaacatattcttcgtcagcatttttgtgcaaacatggagcaccggttgggtgcttgacatccttaacgcgctttctggtgcaacagctactccctaggaacttaagagcttgatcagcgggaacggcaggtccctaggccacatcttttttttttggatgacgcaagggaagtagcttgactgatgcgcacaccgtgtttttcctagcaggcttgtactttggagctatttatctgtgcccggacagggatgatgcttccattatacagtagagtagtgttggtaatatgtacacattgttgagaacgttgtacttgaggcctgttgttattatacggcaatagtagattgtttgcggcaagcctcgttttttgtgcgtctaattctctgacttgcagaattgcggtggcaaatacccattgccctccaagttgtgcgttagcgtatttatccgtagttgacagcaatgaacatattactactgctttctgtattttctattaacgcatgcacatagtttattgggtttccatattttcaatc

SEQ ID NO: 27164 - DNA, 6031 bp, Zea Mays
tggcgatctcccagctgaactgaaagagcaagcgtgcgtgtgagacaaccaggtccgatccgcccccgccgagccgaggacagcagcgggggctctcggtctcctcctaggctcctacagatctcgtaccccgtcacagatctcgcgccctctccatcccatgcccaccccccctcgtcggatctgaccactccgcccctcctcccgtctccgccgccggagctgatatccgcggtcatggcgggcgccgcgggcgggttcgtcacgcgggccttcgaggccatgctcaaggagtgcgctgccaaccgcggcaagttcgccgcgctgcagcaatccatccagtcatacctcgatagtatcaagggggctacagcagagggcgcggtcatcaccgaggcgctcgggtcagctgggcgcgtgctcgacgggccgcaggccgagctggtgctgcagccgctccgcctcgccgtcgagaccaagcacgtcaagctcgtcgagcccgcgctcgactgcctccacaaacttattgcttatgaccatttagaaggcgatcctggtttagaaggtggtaaaaattccccaatatttacagacatcctgaacatggtatgtggttgcgtcgataacacctcctctgacagtactgttctccaagtcttgaaagtgcttcttaatgctgttgcttcaaataagtttagagttcatggagagccattgcttggggtcattagagtatgctataacattgctcttaataggtacctgttatatcgctaccttcttgtttgcagtatgttgccttgttgccctttggaccatgtatgataatttattcatttgtattttcttagcaagagccctgtgaaccaggctacctcaaaggctatgttaacccagatgatcagcattgtattcaggagaatggaatctgagcaggtttctgtatcgcccggaagctctgtggttaaagatatgccttcatctatcacaaatgattctgaaaatggagaaatatctactgatggccaagatgaggaaaaggttactctgggagatgcattgtccatgaatcggccttctgaagctcctccaacgtctgttgaagagcttcagaatcttgcaggtggagcagatattaaggggctggaagctgttctagataaggctgttgaacttgaagacgggaaaaaagtgtcacgtggaattgacctggacactgtgaatataatacagcgtgatgcactattgctctttcgaactctctgcaagatgagcatgaaagaagaaagtgatgaggttgctaccaagacaaggctgctatcacttgaactgctccagtcaaagcatatctttcgtatgctcttctgcgagcatctgtctcttcatctccagttgtttttcagtatgcttgtggtatgttttcagttctgttgctccggtttagagagagtctgaagagggggaaattggtgtcttctttcctttgatagttttaaggtctctggatagctctgatagccccctcagccagaaggctagtgttcttaggatgttggagaaagtttgcaaagatccccaaatgcttgcagatgtgtttgtgaactatgactgtgatcttgaggggccaaatctttttgaacgcacgtgcgctatcaagaatagcacaaggatctcaaattgctgatactaactccatcgtgtcatcccaaacagtttctgtaaaaagctcctctctccagtgtttggtgattattctgaagtcattggctgattgggagcaacttcgaagagattcctcaaagcaagggagcattgttgaatctcatgaagaggatgcttcaaggagattgacaactgatgagatgaagaaccaagaggatggtcggaatcagtttgagagagccaaagctcataagtcgacaatggaggctgcaatctctgagtttaatcgtaaaccaagtaaagggattgaatatttgttgtcaaataaattggtagaaaataaggcatcatctgtagctcagtttctcaagagcaatcccagcttggataaggttatgattggtgaatacttgggacagcatgaggagttccctcttgctgtgatgcattcctatgttgactccatgaagtttatagggttgaaatttgatgctgcaattcgtgcgttcctgaaaggatttcgccttcctggtgaggcgcagaagatagatcgcataatggaaaagtttgctgagcgatactgcttatgttcttgcttatgctgttataatgttgaatactgatgcacataatccaatggtgtggcctaagatgtcaaaatcagattttgttcgtatgaacactgcaagtgatgcagaagaatgtgtcccaaatgagctcttggaagaaatttatgattccattgtcaaggaagagataaagatgaaagacgattctcatgatacttcaaaatccaccaagagacctgaaacagaagaaagaggccgtcttgtcaatattctcaatttagcccttccaagactgaagtcagctagtgatacaaaggcagagagtgaaaagatcatcaaacagacccaggcacttttcaagaaccagggacagaagaaaggtgtttttcatgttgcgcagcaggttgagcttgttagaccaatgcttgaagctgtaggatggcctttgcttgcaacattttctgtgaccatggaggaaggtgacagtaagcctagggttgtatcatgcatggaaggatttcgtgctggtatccatcttactcgtgttcttggaatggacaccatgcgctatgctttcttgacgtccttagtgcggtttacatttttgcacgctcccaaggagatgcgcagtaaaaatgttgaggcactgaggactcttcttggtttagctgacactgatatggatgctttacaagatacttggaatgctgttttagaatgtgtctcaagactcgagtatatcacttcgaacccttcaatttctgcaactgtaatgctgggatcaaatcaaatatcgagggattctgtagtccaatcgctgaaagagttggctggaaagcctgctgaacaaatctttgtaaacagtgtaaaactgccaagtgattcaattgttgaattcttcaccgccctatgtggtgtttctgctgaagaactaaaacaaacacctgctcgtgtctttagcttgcagaagcttgtagagataagctattataacatggctcgcattcggctggtgtgggctagaatatggtctgtgttggcccagcactttattgctgctggaagccacaatgaggagaaagttgcaatgtatgccattgattcactaagacagcttggtatgaagtacttggagcgtgctgaattaaacaatttcacatttcagagtgacatactgaaaccttttgtcattttaatgaggaatacccacaactcaaaaatccgaggtttaattgttgattgcattgttcagttgatcaagtcaaaagttggtagcataaagtcagggtggcgttgcgtattcatgatatttactgcagcagctgatgatgaggatgaatcaattgttgagagtgcttttgaaaatgtagaacaagttatcttggaacattttgaccaagttgttggtgattgcttcatggattgcgtcaactgtcttattggttttgcaaataacaagtgcactcctcggattagtttgaaggctattgctctcctgcgtatatgtgaagatcgtttggcagagggattcattccaggcggcgctattaaacctattgatgttgttccagaggccaattttgatgtgactgagcattattggtttcctatgctagctggtttgtctgatttgactttagactccagaccagaagcatgctggaagggatgggctttcttcttctggggatgattggcttcgtgatactagcattcattcgctgcagttaatctgcaaccttttcaatacattctataaggtagaggtatcctttatgcttccacctcttctcagtttgctgcttgaatgtgcgaaaaaaacagaccaaactgtcgtttcaatttctcttggcgctttagttcatctgattgaagttggtggtcaccagttcagtgatggtgattgggaaacattattaaagagtattagggatgcgtcatacacaactcagcctcttgaactgctcaattcattaggattccataaatcaaacaaccagcagttactttcaagagaagaaagcaatgcacatggcaatagttaccatggcagccggggggaaccctccatcgttaataatggtgagcatagtcatgcagaggcaggtccacaaactagcctggagaattcggaaggtaccacgagcagaggtttaccgtcaccatcagggagaacacaacctgctgtttccccacgtggccaaagctttggacaaagaattatgggcaatatgatggataatcttttggttagaagtcttacatccaaatcaaaaggtcgagtcgatgatattgctccaccctcacctgtgaaggcccctgatgatgatgagacagacaaggctgaaggggaagagagccctatgatggaaactgtccggagcaaatgtatcacacagttgctgctgctcggggcaattgacagcatacaggtaagcagtttcctccactttatatgcatgctcttagatctgagtccatccattgtttctctgacaatgtggactggaagcacctttgtctgtgatacaattgaggacttctagttgcaaataaggaattcatcaccctaatatattagccagccctacttgggttgatatactgtgattaactattgatgaaacatttcagaagaggtattggagcaggttaaaagctacacaacagatagcaataatggatatcttgctctcactgctagaatttgcttcttcgtataactcaccttcaaattttcggacgagaatgcaccatatacctctagaaagacctccactgaatcttctccgtcaagaactagttggaacaacaatttatttagatatccttcataagtcaacagtggagcaggacaaaattgactccattgaggaaacaaatggtttaaatgtggaatctggtgaccaggaaaagatcaagtacctagcagaagggaagctggtttctttttgtgggcagattttgaaagaggcgtctgttctccagcctagcactggggaggctgccagtgcagacatacatcgtgtattagacttacgggcacctgttattgtaaaggttttgaaaggaatgtgcatcatggatgctcagatcttcagaaggcacctgaaagagttctatccattaattaccaaacttatctgttgtgatcagatggatgttcgtggagcccttggtgatctctttagcaaacagcttactccactcatgccctgaagtctggcagtatttcctcccttgcatagatcttgttggaacatattcttcgtcagcatttttgtgcaaacatggagcaccggttgggtgcttgacatccttaacgcgctttctggtgcaacagctactccctaggaacttaagagcttgatcagcgggaacggcaggtccctaggccacatcttttttttttggatgacgcaagggaagtagcttgactgatgcgcacaccgtgtttttcctagcaggcttgtactttggagctatttatctgtgcccggacagggatgatgcttccattatacagtagagtagtgttggtaatatgtacacattgttgagaacgttgtacttgaggcctgttgttattatacggcaatagtagattgtttgcggcaagcctcgttttttgtgcgtctaattctctgacttgcagaattgcggtggcaaatacccattgccctccaagttgtgcgttagcgtatttatccgtagttgacagcaatgaacatattactactgctttctgtattttctattaacgcatgcacatagtttattgggtttccatattttcaatc

SEQ ID NO: 27165 - DNA, 5972 bp, Zea Mays
tggcgatctcccagctgaactgaaagagcaagcgtgcgtgtgagacaaccaggtccgatccgcccccgccgagccgaggacagcagcgggggctctcggtctcctcctaggctcctacagatctcgtaccccgtcacagatctcgcgccctctccatcccatgcccaccccccctcgtcggatctgaccactccgcccctcctcccgtctccgccgccggagctgatatccgcggtcatggcgggcgccgcgggcgggttcgtcacgcgggccttcgaggccatgctcaaggagtgcgctgccaaccgcggcaagttcgccgcgctgcagcaatccatccagtcatacctcgatagtatcaagggggctacagcagagggcgcggtcatcaccgaggcgctcgggtcagctgggcgcgtgctcgacgggccgcaggccgagctggtgctgcagccgctccgcctcgccgtcgagaccaagcacgtcaagctcgtcgagcccgcgctcgactgcctccacaaacttattgcttatgaccatttagaaggcgatcctggtttagaaggtggtaaaaattccccaatatttacagacatcctgaacatggtatgtggttgcgtcgataacacctcctctgacagtactgttctccaagtcttgaaagtgcttcttaatgctgttgcttcaaataagtttagagttcatggagagccattgcttggggtcattagagtatgctataacattgctcttaataggtacctgttatatcgctaccttcttgtttgcagtatgttgccttgttgccctttggaccatgtatgataatttattcatttgtattttcttagcaagagccctgtgaaccaggctacctcaaaggctatgttaacccagatgatcagcattgtattcaggagaatggaatctgagcaggtttctgtatcgcccggaagctctgtggttaaagatatgccttcatctatcacaaatgattctgaaaatggagaaatatctactgatggccaagatgaggaaaaggttactctgggagatgcattgtccatgaatcggccttctgaagctcctccaacgtctgttgaagagcttcagaatcttgcaggtggagcagatattaaggggctggaagctgttctagataaggctgttgaacttgaagacgggaaaaaagtgtcacgtggaattgacctggacactgtgaatataatacagcgtgatgcactattgctctttcgaactctctgcaagatgagcatgaaagaagaaagtgatgaggttgctaccaagacaaggctgctatcacttgaactgctccagggattgctagagggagtcagcaatgtgttcatcaaaaattttcacttcattgattcagtcaaagcatatctttcgtatgctcttctgcgagcatctgtctcttcatctccagttgtttttcagtatgcttgtggtatgttttcagttctgttgctccggtttagagagagtctgaagggggaaattggtgtcttctttcctttgatagttttaaggtctctggatagctctgatagccccctcagccagaaggctagtgttcttaggatgttggagaaagtttgcaaagatccccaaatgcttgcagatgtgtttgtgaactatgactgtgatcttgaggggccaaatctttttgaacgcacgtgcgctatcaagaatagcacaaggatctcaaattgctgatactaactccatcgtgtcatcccaaacagtttctgtaaaaagctcctctctccagtgtttggtgattattctgaagtcattggctgattgggagcaacttcgaagagattcctcaaagcaagggagcattgttgaatctcatgaagaggatgcttcaaggagattgacaactgatgagatgaagaaccaagaggatggtcggaatcagtttgagagagccaaagctcataagtcgacaatggaggctgcaatctctgagtttaatcgtaaaccaagtaaagggattgaatatttgttgtcaaataaattggtagaaaataaggcatcatctgtagctcagtttctcaagagcaatcccagcttggataaggttatgattggtgaatacttgggacagcatgaggagttccctcttgctgtgatgcattcctatgttgactccatgaagtttatagggttgaaatttgatgctgcaattcgtgcgttcctgaaaggatttcgccttcctggtgaggcgcagaagatagatcgcataatggaaaagtttgctgagcgatactgcttatgttcttgcttatgctgttataatgttgaatactgatgcacataatccaatggtgtggcctaagatgtcaaaatcagattttgttcgtatgaacactgcaagtgatgcagaagaatgtgtcccaaatgagctcttggaagaaatttatgattccattgtcaaggaagagataaagatgaaagacgattctcatgatacttcaaaatccaccaagagacctgaaacagaagaaagaggccgtcttgtcaatattctcaatttagcccttccaagactgaagtcagctagtgatacaaaggcagagagtgaaaagatcatcaaacagacccaggcacttttcaagaaccagggacagaagaaaggtgtttttcatgttgcgcagcaggttgagcttgttagaccaatgcttgaagctgtaggatggcctttgcttgcaacattttctgtgaccatggaggaaggtgacagtaagcctagggttgtatcatgcatggaaggatttcgtgctggtatccatcttactcgtgttcttggaatggacaccatgcgctatgctttcttgacgtccttagtgcggtttacatttttgcacgctcccaaggagatgcgcagtaaaaatgttgaggcactgaggactcttcttggtttagctgacactgatatggatgctttacaagatacttggaatgctgttttagaatgtgtctcaagactcgagtatatcacttcgaacccttcaatttctgcaactgtaatgctgggatcaaatcaaatatcgagggattctgtagtccaatcgctgaaagagttggctggaaagcctgctgaacaaatctttgtaaacagtgtaaaactgccaagtgattcaattgttgaattcttcaccgccctatgtggtgtttctgctgaagaactaaaacaaacacctgctcgtgtctttagcttgcagaagcttgtagagataagctattataacatggctcgcattcggctggtgtgggctagaatatggtctgtgttggcccagcactttattgctgctggaagccacaatgaggagaaagttgcaatgtatgccattgattcactaagacagcttggtatgaagtacttggagcgtgctgaattaaacaatttcacatttcagagtgacatactgaaaccttttgtcattttaatgaggaatacccacaactcaaaaatccgaggtttaattgttgattgcattgttcagttgatcaagtcaaaagttggtagcataaagtcagggtggcgttgcgtattcatgatatttactgcagcagctgatgatgaggatgaatcaattgttgagagtgcttttgaaaatgtagaacaagttatcttggaacattttgaccaagttgttggtgattgcttcatggattgcgtcaactgtcttattggttttgcaaataacaagtgcactcctcggattagtttgaaggctattgctctcctgcgtatatgtgaagatcgtttggcagagggattcattccaggcggcgctattaaacctattgatgttgttccagaggccaattttgatgtgactgagcattattggtttcctatgctagctggtttgtctgatttgactttagactccagaccagaagtcagacactgtgcactggaagtgttgtttgatttgttgaatgaaagaggacataagttctcttctcccttctgggagagtatttttcatcgtgtactatttccaatttttgatcatgtaaggcatgctggaagggatgggctttcttcttctggggatgattggcttcgtgatactagcattcattcgctgcagttaatctgcaaccttttcaatacattctataagtttgctgcttgaatgtgcgaaaaaaacagaccaaactgtcgtttcaatttctcttggcgctttagttcatctgattgaagttggtggtcaccagttcagtgatggtgattgggaaacattattaaagagtattagggatgcgtcatacacaactcagcctcttgaactgctcaattcattaggattccataaatcaaacaaccagcagttactttcaagagaagaaagcaatgcacatggcaatagttaccatggcagccggggggaaccctccatcgttaataatggtgagcatagtcatgcagaggcaggtccacaaactagcctggagaattcggaaggtaccacgagcagaggtttaccgtcaccatcagggagaacacaacctgctgtttccccacgtggccaaagctttggacaaagaattatgggcaatatgatggataatcttttggttagaagtcttacatccaaatcaaaaggtcgagtcgatgatattgctccaccctcacctgtgaaggcccctgatgatgatgagacagacaaggctgaaggggaagagagccctatgatggaaactgtccggagcaaatgtatcacacagttgctgctgctcggggcaattgacagcatacagaagaggtattggagcaggttaaaagctacacaacagatagcaataatggatatcttgctctcactgctagaatttgcttcttcgtataactcaccttcaaattttcggacgagaatgcaccatatacctctagaaagacctccactgaatcttctccgtcaagaactagttggaacaacaatttatttagatatccttcataagtcaacagtggagcaggacaaaattgactccattgaggaaacaaatggtttaaatgtggaatctggtgaccaggaaaagatcaagtacctagcagaagggaagctggtttctttttgtgggcagattttgaaagaggcgtctgttctccagcctagcactggggaggctgccagtgcagacatacatcgtgtattagacttacgggcacctgttattgtaaaggttttgaaaggaatgtgcatcatggatgctcagatcttcagaaggcacctgaaagagttctatccattaattaccaaacttatctgttgtgatcagatggatgttcgtggagcccttggtgatctctttagcaaacagcttactccactcatgccctgaagtctggcagtatttcctcccttgcatagatcttgttggaacatattcttcgtcagcatttttgtgcaaacatggagcaccggttgggtgcttgacatccttaacgcgctttctggtgcaacagctactccctaggaacttaagagcttgatcagcgggaacggcaggtccctaggccacatcttttttttttggatgacgcaagggaagtagcttgactgatgcgcacaccgtgtttttcctagcaggcttgtactttggagctatttatctgtgcccggacagggatgatgcttccattatacagtagagtagtgttggtaatatgtacacattgttgagaacgttgtacttgaggcctgttgttattatacggcaatagtagattgtttgcggcaagcctcgttttttgtgcgtctaattctctgacttgcagaattgcggtggcaaatacccattgccctccaagttgtgcgttagcgtatttatccgtagttgacagcaatgaacatattactactgctttctgtattttctattaacgcatgcacatagtttattgggtttccatattttcaatc

SEQ ID NO: 27166 - DNA, 5876 bp, Zea Mays
gaaaaattcagagatggtcctcgactcctggtgggtggtggcgatctcccagctgaactgaaagagcaagcgtgcgtgtgagacaaccaggtccgatccgcccccgccgagccgaggacagcagcgggggctctcggtctcctcctaggctcctacagatctcgtaccccgtcacagatctcgcgccctctccatcccatgcccaccccccctcgtcggatctgaccactccgcccctcctcccgtctccgccgccggagctgatatccgcggtcatggcgggcgccgcgggcgggttcgtcacgcgggccttcgaggccatgctcaaggagtgcgctgccaaccgcggcaagttcgccgcgctgcagcaatccatccagtcatacctcgatagtatcaagggggctacagcagagggcgcggtcatcaccgaggcgctcgggtcagctgggcgcgtgctcgacgggccgcaggccgagctggtgctgcagccgctccgcctcgccgtcgagaccaagcacgtcaagctcgtcgagcccgcgctcgactgcctccacaaacttattgcttatgaccatttagaaggcgatcctggtttagaaggtggtaaaaattccccaatatttacagacatcctgaacatggtatgtggttgcgtcgataacacctcctctgacagtactgttctccaagtcttgaaagtgcttcttaatgctgttgcttcaaataagtttagagttcatggagagccattgcttggggtcattagagtatgctataacattgctcttaatagagccctgtgaaccaggctacctcaaaggctatgttaacccagatgatcagcattgtattcaggagaatggaatctgagcaggtttctgtatcgcccggaagctctgtggttaaagatatgccttcatctatcacaaatgattctgaaaatggagaaatatctactgatggccaagatgaggaaaaggttactctgggagatgcattgtccatgaatcggccttctgaagctcctccaacgtctgttgaagagcttcagaatcttgcaggtggagcagatattaaggggctggaagctgttctagataaggctgttgaacttgaagacgggaaaaaagtgtcacgtggaattgacctggacactgtgaatataatacagcgtgatgcactattgctctttcgaactctctgcaagatgagcatgaaagaagaaagtgatgaggttgctaccaagacaaggctgctatcacttgaactgctccagggattgctagagggagtcagcaatgtgttcatcaaaaattttcacttcattgattcagtcaaagcatatctttcgtatgctcttctgcgagcatctgtctcttcatctccagttgtttttcagtatgcttgtggtatgttttcagttctgttgctccggtttagagagagtctgaagggggaaattggtgtcttctttcctttgatagttttaaggtctctggatagctctgatagccccctcagccagaaggctagtgttcttaggatgttggagaaagtttgcaaagatccccaaatgcttgcagatgtgtttgtgaactatgactgtgatcttgaggggccaaatctttttgaacgcacggttagtgcgctatcaagaatagcacaaggatctcaaattgctgatactaactccatcgtgtcatcccaaacagtttctgtaaaaagctcctctctccagtgtttggtgattattctgaagtcattggctgattgggagcaacttcgaagagattcctcaaagcaagggagcattgttgaatctcatgaagaggatgcttcaaggagattgacaactgatgagatgaagaaccaagaggatggtcggaatcagtttgagagagccaaagctcataagtcgacaatggaggctgcaatctctgagtttaatcgtaaaccaagtaaagggattgaatatttgttgtcaaataaattggtagaaaataaggcatcatctgtagctcagtttctcaagagcaatcccagcttggataaggttatgattggtgaatacttgggacagcatgaggagttccctcttgctgtgatgcattcctatgttgactccatgaagtttatagggttgaaatttgatgctgcaattcgtgcgttcctgaaaggatttcgccttcctggtgaggcgcagaagatagatcgcataatggaaaagtttgctgagcggtactgtgctgataatcctgagcttttcaaaaatgcagatactgcttatgttcttgcttatgctgttataatgttgaatactgatgcacataatccaatggtgtggcctaagatgtcaaaatcagattttgttcgtatgaacactgcaagtgatgcagaagaatgtgtcccaaatgagctcttggaagaaatttatgattccattgtcaaggaagagataaagatgaaagacgattctcatgatacttcaaaatccaccaagagacctgaaacagaagaaagaggccgtcttgtcaatattctcaatttagcccttccaagactgaagtcagctagtgatacaaaggcagagagtgaaaagatcatcaaacagacccaggcacttttcaagaaccagggacagaagaaaggtgtttttcatgttgcgcagcaggttgagcttgttagaccaatgcttgaagctgtaggatggcctttgcttgcaacattttctgtgaccatggaggaaggtgacagtaagcctagggttgtatcatgcatggaaggatttcgtgctggtatccatcttactcgtgttcttggaatggacaccatgcgctatgctttcttgacgtccttagtgcggtttacatttttgcacgctcccaaggagatgcgcagtaaaaatgttgaggcactgaggactcttcttggtttagctgacactgatatggatgctttacaagatacttggaatgctgttttagaatgtgtctcaagactcgagtatatcacttcgaacccttcaatttctgcaactgtaatgctgggatcaaatcaaatatcgagggattctgtagtccaatcgctgaaagagttggctggaaagcctgctgaacaaatctttgtaaacagtgtaaaactgccaagtgattcaattgttgaattcttcaccgccctatgtggtgtttctgctgaagaactaaaacaaacacctgctcgtgtctttagcttgcagaagcttgtagagataagctattataacatggctcgcattcggctggtgtgggctagaatatggtctgtgttggcccagcactttattgctgctggaagccacaatgaggagaaagttgcaatgtatgccattgattcactaagacagcttggtatgaagtacttggagcgtgctgaattaaacaatttcacatttcagagtgacatactgaaaccttttgtcattttaatgaggaatacccacaactcaaaaatccgaggtttaattgttgattgcattgttcagttgatcaagtcaaaagttggtagcataaagtcagggtggcgttgcgtattcatgatatttactgcagcagctgatgatgaggatgaatcaattgttgagagtgcttttgaaaatgtagaacaagttatcttggaacattttgaccaagttgttggtgattgcttcatggattgcgtcaactgtcttattggttttgcaaataacaagtgcactcctcggattagtttgaaggctattgctctcctgcgtatatgtgaagatcgtttggcagagggattcattccaggcggcgctattaaacctattgatgttgttccagaggccaattttgatgtgactgagcattattggtttcctatgctagctggtttgtctgatttgactttagactccagaccagaagtcagacactgtgcactggaagtgttgtttgatttgttgaatgaaagaggacataagttctcttctcccttctgggagagtatttttcatcgtgtactatttccaatttttgatcatgtaaggcatgctggaagggatgggctttcttcttctggggatgattggcttcgtgatactagcattcattcgctgcagttaatctgcaaccttttcaatacattctataagttcatctgattgaagttggtggtcaccagttcagtgatggtgattgggaaacattattaaagagtattagggatgcgtcatacacaactcagcctcttgaactgctcaattcattaggattccataaatcaaacaaccagcagttactttcaagagaagaaagcaatgcacatggcaatagttaccatggcagccggggggaaccctccatcgttaataatggtgagcatagtcatgcagaggcaggtccacaaactagcctggagaattcggaaggtttaccgtcaccatcagggagaacacaacctgctgtttccccacgtggccaaagctttggacaaagaattatgggcaatatgatggataatcttttggttagaagtcttacatccaaatcaaaaggtcgagtcgatgatattgctccaccctcacctgtgaaggcccctgatgatgatgagacagacaaggctgaaggggaagagagccctatgatggaaactgtccggagcaaatgtatcacacagttgctgctgctcggggcaattgacagcatacagaagaggtattggagcaggttaaaagctacacaacagatagcaataatggatatcttgctctcactgctagaatttgcttcttcgtataactcaccttcaaattttcggacgagaatgcaccatatacctctagaaagacctccactgaatcttctccgtcaagaactagttggaacaacaatttatttagatatccttcataagtcaacagtggagcaggacaaaattgactccattgaggaaacaaatggtttaaatgtggaatctggtgaccaggaaaagatcaagtacctagcagaagggaagctggtttctttttgtgggcagattttgaaagaggcgtctgttctccagcctagcactggggaggctgccagtgcagacatacatcgtgtattagacttacgggcacctgttattgtaaaggttttgaaaggaatgtgcatcatggatgctcagatcttcagaaggcacctgaaagagttctatccattaattaccaaacttatctgttgtgatcagatggatgttcgtggagcccttggtgatctctttagcaaacagcttactccactcatgccctgaagtctggcagtatttcctcccttgcatagatcttgttggaacatattcttcgtcagcatttttgtgcaaacatggagcaccggttgggtgcttgacatccttaacgcgctttctggtgcaacagctactccctaggaacttaagagcttgatcagcgggaacggcaggtccctaggccacatcttttttttttggatgacgcaagggaagtagcttgactgatgcgcacaccgtgtttttcctagcaggcttgtactttggagctatttatctgtgcccggacagggatgatgcttccattatacagtagagtagtgttggtaatatgtacacattgttgagaacgttgtacttgaggcctgttgttattatacggcaatagtagattgtttgcggcaagcctcgttttttgtgcgtctaattctctgacttgcagaattgcggtggcaaatacccattgccctccaagttgtgcgttagcgtatttatccgtagttgacagcaatgaacatattactactgctttctgtattttctattaacgcatgcacatagtttattgggtttccatattttcaatc

SEQ ID NO: 27167 - DNA, 6430 bp, Zea Mays
gaaaaattcagagatggtcctcgactcctggtgggtggtggcgatctcccagctgaactgaaagagcaagcgtgcgtgtgagacaaccaggtccgatccgcccccgccgagccgaggacagcagcgggggctctcggtctcctcctaggctcctacagatctcgtaccccgtcacagatctcgcgccctctccatcccatgcccaccccccctcgtcggatctgaccactccgcccctcctcccgtctccgccgccggagctgatatccgcggtcatggcgggcgccgcgggcgggttcgtcacgcgggccttcgaggccatgctcaaggagtgcgctgccaaccgcggcaagttcgccgcgctgcagcaatccatccagtcatacctcgatagtatcaagggggctacagcagagggcgcggtcatcaccgaggcgctcgggtcagctgggcgcgtgctcgacgggccgcaggccgagctggtgctgcagccgctccgcctcgccgtcgagaccaagcacgtcaagctcgtcgagcccgcgctcgactgcctccacaaacttattgcttatgaccatttagaaggcgatcctggtttagaaggtggtaaaaattccccaatatttacagacatcctgaacatggtatgtggttgcgtcgataacacctcctctgacagtactgttctccaagtcttgaaagtgcttcttaatgctgttgcttcaaataagtttagagttcatggagagccattgcttggggtcattagagtatgctataacattgctcttaataggtacctgttatatcgctaccttcttgtttgcagtatgttgccttgttgccctttggaccatgtatgataatttattcatttgtattttcttagcaagagccctgtgaaccaggctacctcaaaggctatgttaacccagatgatcagcattgtattcaggagaatggaatctgagcaggtttctgtatcgcccggaagctctgtggttaaagatatgccttcatctatcacaaatgattctgaaaatggagaaatatctactgatggccaagatgaggaaaaggttactctgggagatgcattgtccatgaatcggccttctgaagctcctccaacgtctgttgaagagcttcagaatcttgcaggtggagcagatattaaggggctggaagctgttctagataaggctgttgaacttgaagacgggaaaaaagtgtcacgtggaattgacctggacactgtgaatataatacagcgtgatgcactattgctctttcgaactctctgcaagatgagcatgaaagaagaaagtgatgaggttgctaccaagacaaggctgctatcacttgaactgctccagggattgctagagggagtcagcaatgtgttcatcaaaaattttcacttcattgattcagtcaaagcatatctttcgtatgctcttctgcgagcatctgtctcttcatctccagttgtttttcagtatgcttgtggtatgttttcagttctgttgctccggtttagagagagtctgaagggggaaattggtgtcttctttcctttgatagttttaaggtctctggatagctctgatagccccctcagccagaaggctagtgttcttaggatgttggagaaagtttgcaaagatccccaaatgcttgcagatgtgtttgtgaactatgactgtgatcttgaggggccaaatctttttgaacgcacgtgcgctatcaagaatagcacaaggatctcaaattgctgatactaactccatcgtgtcatcccaaacagtttctgtaaaaagctcctctctccagtgtttggtgattattctgaagtcattggctgattgggagcaacttcgaagagattcctcaaagcaagggagcattgttgaatctcatgaagaggatgcttcaaggagattgacaactgatgagatgaagaaccaagaggatggtcggaatcagtttgagagagccaaagctcataagtcgacaatggaggctgcaatctctgagtttaatcgtaaaccaagtaaagggattgaatatttgttgtcaaataaattggtagaaaataaggcatcatctgtagctcagtttctcaagagcaatcccagcttggataaggttatgattggtgaatacttgggacagcatgaggagttccctcttgctgtgatgcattcctatgttgactccatgaagtttatagggttgaaatttgatgctgcaattcgtgcgttcctgaaaggatttcgccttcctggtgaggcgcagaagatagatcgcataatggaaaagtttgctgagcggtactgtgctgataatcctgagcttttcaaaaatgcagatactgcttatgttcttgcttatgctgttataatgttgaatactgatgcacataatccaatggtgtggcctaagatgtcaaaatcagattttgttcgtatgaacactgcaagtgatgcagaagaatgtgtcccaaatgagctcttggaagaaatttatgattccattgtcaaggaagagataaagatgaaagacgattctcatgatacttcaaaatccaccaagagacctgaaacagaagaaagaggccgtcttgtcaatattctcaatttagcccttccaagactgaagtcagctagtgatacaaaggcagagagtgaaaagatcatcaaacagacccaggcacttttcaagaaccagggacagaagaaaggtgtttttcatgttgcgcagcaggttgagcttgttagaccaatgcttgaagctgtaggatggcctttgcttgcaacattttctgtgaccatggaggaaggtgacagtaagcctagggttgtatcatgcatggaaggatttcgtgctggtatccatcttactcgtgttcttggaatggacaccatgcgctatgctttcttgacgtccttagtgcggtttacatttttgcacgctcccaaggagatgcgcagtaaaaatgttgaggcactgaggactcttcttggtttagctgacactgatatggatgctttacaagatacttggaatgctgttttagaatgtgtctcaagactcgagtatatcacttcgaacccttcaatttctgcaactgtaatgctgggatcaaatcaaatatcgagggattctgtagtccaatcgctgaaagagttggctggaaagcctgctgaacaaatctttgtaaacagtgtaaaactgccaagtgattcaattgttgaattcttcaccgccctatgtggtgtttctgctgaagaactaaaacaaacacctgctcgtgtctttagcttgcagaagcttgtagagataagctattataacatggctcgcattcggctggtgtgggctagaatatggtctgtgttggcccagcactttattgctgctggaagccacaatgaggagaaagttgcaatgtatgccattgattcactaagacagcttggtatgaagtacttggagcgtgctgaattaaacaatttcacatttcagagtgacatactgaaaccttttgtcattttaatgaggaatacccacaactcaaaaatccgaggtttaattgttgattgcattgttcagttgatcaagtcaaaagttggtagcataaagtcagggtggcgttgcgtattcatgatatttactgcagcagctgatgatgaggatgaatcaattgttgagagtgcttttgaaaatgtagaacaagttatcttggaacattttgaccaagttgttggtgattgcttcatggattgcgtcaactgtcttattggttttgcaaataacaagtgcactcctcggattagtttgaaggctattgctctcctgcgtatatgtgaagatcgtttggcagagggattcattccaggcggcgctattaaacctattgatgttgttccagaggccaattttgatgtgactgagcattattggtttcctatgctagctggtttgtctgatttgactttagactccagaccagaagtcagacactgtgcactggaagtgttgtttgatttgttgaatgaaagaggacataagttctcttctcccttctgggagagtatttttcatcgtgtactatttccaatttttgatcatgtaaggcatgctggaagggatgggctttcttcttctggggatgattggcttcgtgatactagcattcattcgctgcagttaatctgcaaccttttcaatacattctataaggtagcatgtgttcttccttttagttgcttgacaaacatcctttgtataattcagaatataagtgtgatgaaactggtcatccgctacttctatagatatcacattgaaacttgtttggttggccatcgtctgactgtggcacttacaggaggtatcctttatgcttccacctcttctcagtttgctgcttgaatgtgcgaaaaaaacagaccaaactgtcgtttcaatttctcttggcgctttagttcatctgattgaagttggtggtcaccagttcagtgatggtgattgggaaacattattaaagagtattagggatgcgtcatacacaactcagcctcttgaactgctcaattcattaggattccataaatcaaacaaccagcagttactttcaagagaagaaagcaatgcacatggcaatagttaccatggcagccggggggaaccctccatcgttaataatggtgagcatagtcatgcagaggcaggtccacaaactagcctggagaattcggaaggtaccacgagcagaggtttaccgtcaccatcagggagaacacaacctgctgtttccccacgtggccaaagctttggacaaagaattatgggcaatatgatggataatcttttggttagaagtcttacatccaaatcaaaaggtcgagtcgatgatattgctccaccctcacctgtgaaggcccctgatgatgatgagacagacaaggctgaaggggaagagagccctatgatggaaactgtccggagcaaatgtatcacacagttgctgctgctcggggcaattgacagcatacaggtaagcagtttcctccactttatatgcatgctcttagatctgagtccatccattgtttctctgacaatgtggactggaagcacctttgtctgtgatacaattgaggacttctagttgcaaataaggaattcatcaccctaatatattagccagccctacttgggttgatatactgtgattaactattgatgaaacatttcagaagaggtattggagcaggttaaaagctacacaacagatagcaataatggatatcttgctctcactgctagaatttgcttcttcgtataactcaccttcaaattttcggacgagaatgcaccatatacctctagaaagacctccactgaatcttctccgtcaagaactagttggaacaacaatttatttagatatccttcataagtcaacagtggagcaggacaaaattgactccattgaggaaacaaatggtttaaatgtggaatctggtgaccaggaaaagatcaagtacctagcagaagggaagctggtttctttttgtgggcagattttgaaagaggcgtctgttctccagcctagcactggggaggctgccagtgcagacatacatcgtgtattagacttacgggcacctgttattgtaaaggttttgaaaggaatgtgcatcatggatgctcagatcttcagaaggcacctgaaagagttctatccattaattaccaaacttatctgttgtgatcagatggatgttcgtggagcccttggtgatctctttagcaaacagcttactccactcatgccctgaagtctggcagtatttcctcccttgcatagatcttgttggaacatattcttcgtcagcatttttgtgcaaacatggagcaccggttgggtgcttgacatccttaacgcgctttctggtgcaacagctactccctaggaacttaagagcttgatcagcgggaacggcaggtccctaggccacatcttttttttttggatgacgcaagggaagtagcttgactgatgcgcacaccgtgtttttcctagcaggcttgtactttggagctatttatctgtgcccggacagggatgatgcttccattatacagtagagtagtgttggtaatatgtacacattgttgagaacgttgtacttgaggcctgttgttattatacggcaatagtagattgtttgcggcaagcctcgttttttgtgcgtctaattctctgacttgcagaattgcggtggcaaatacccattgccctccaagttgtgcgttagcgtatttatccgtagttgacagcaatgaacatattactactgctttctgtattttctattaacgcatgcacatagtttattgggtttccatattttcaatc

SEQ ID NO: 27168 - DNA, 5879 bp, Zea Mays
gaaaaattcagagatggtcctcgactcctggtgggtggtggcgatctcccagctgaactgaaagagcaagcgtgcgtgtgagacaaccaggtccgatccgcccccgccgagccgaggacagcagcgggggctctcggtctcctcctaggctcctacagatctcgtaccccgtcacagatctcgcgccctctccatcccatgcccaccccccctcgtcggatctgaccactccgcccctcctcccgtctccgccgccggagctgatatccgcggtcatggcgggcgccgcgggcgggttcgtcacgcgggccttcgaggccatgctcaaggagtgcgctgccaaccgcggcaagttcgccgcgctgcagcaatccatccagtcatacctcgatagtatcaagggggctacagcagagggcgcggtcatcaccgaggcgctcgggtcagctgggcgcgtgctcgacgggccgcaggccgagctggtgctgcagccgctccgcctcgccgtcgagaccaagcacgtcaagctcgtcgagcccgcgctcgactgcctccacaaacttattgcttatgaccatttagaaggcgatcctggtttagaaggtggtaaaaattccccaatatttacagacatcctgaacatggtatgtggttgcgtcgataacacctcctctgacagtactgttctccaagtcttgaaagtgcttcttaatgctgttgcttcaaataagtttagagttcatggagagccattgcttggggtcattagagtatgctataacattgctcttaataggtacctgttatatcgctaccttcttgtttgcagtatgttgccttgttgccctttggaccatgtatgataatttattcatttgtattttcttagcaagagccctgtgaaccaggctacctcaaaggctatgttaacccagatgatcagcattgtattcaggagaatggaatctgagcaggtttctgtatcgcccggaagctctgtggttaaagatatgccttcatctatcacaaatgattctgaaaatggagaaatatctactgatggccaagatgaggaaaaggttactctgggagatgcattgtccatgaatcggccttctgaagctcctccaacgtctgttgaagagcttcagaatcttgcaggtggagcagatattaaggggctggaagctgttctagataaggctgttgaacttgaagacgggaaaaaagtgtcacgtggaattgacctggacactgtgaatataatacagcgtgatgcactattgctctttcgaactctctgcaagatgagcatgaaagaagaaagtgatgaggttgctaccaagacaaggctgctatcacttgaactgctccagggattgctagagggagtcagcaatgtgttcatcaaaaattttcacttcattgattcagtcaaagcatatctttcgtatgctcttctgcgagcatctgtctcttcatctccagttgtttttcagtatgcttgtggtatgttttcagttctgttgctccggtttagagagagtctgaaggatgttggagaaagtttgcaaagatccccaaatgcttgcagatgtgtttgtgaactatgactgtgatcttgaggggccaaatctttttgaacgcacggttagtgcgctatcaagaatagcacaaggatctcaaattgctgatactaactccatcgtgtcatcccaaacagtttctgtaaaaagctcctctctccagtgtttggtgattattctgaagtcattggctgattgggagcaacttcgaagagattcctcaaagcaagggagcattgttgaatctcatgaagaggatgcttcaaggagattgacaactgatgagatgaagaaccaagaggatggtcggaatcagtttgagagagccaaagctcataagtcgacaatggaggctgcaatctctgagtttaatcgtaaaccaagtaaagggattgaatatttgttgtcaaataaattggtagaaaataaggcatcatctgtagctcagtttctcaagagcaatcccagcttggataaggttatgattggtgaatacttgggacagcatgaggagttccctcttgctgtgatgcattcctatgttgactccatgaagtttatagggttgaaatttgatgctgcaattcgtgcgttcctgaaaggatttcgccttcctggtgaggcgcagaagatagatcgcataatggaaaagtttgctgagcggtactgtgctgataatcctgagcttttcaaaaatgcagatactgcttatgttcttgcttatgctgttataatgttgaatactgatgcacataatccaatggtgtggcctaagatgtcaaaatcagattttgttcgtatgaacactgcaagtgatgcagaagaatgtgtcccaaatgagctcttggaagaaatttatgattccattgtcaaggaagagataaagatgaaagacgattctcatgatacttcaaaatccaccaagagacctgaaacagaagaaagaggccgtcttgtcaatattctcaatttagcccttccaagactgaagtcagctagtgatacaaaggcagagagtgaaaagatcatcaaacagacccaggcacttttcaagaaccagggacagaagaaaggtgtttttcatgttgcgcagcaggttgagcttgttagaccaatgcttgaagctgtaggatggcctttgcttgcaacattttctgtgaccatggaggaaggtgacagtaagcctagggttgtatcatgcatggaaggatttcgtgctggtatccatcttactcgtgttcttggaatggacaccatgcgctatgctttcttgacgtccttagtgcggtttacatttttgcacgctcccaaggagatgcgcagtaaaaatgttgaggcactgaggactcttcttggtttagctgacactgatatggatgctttacaagatacttggaatgctgttttagaatgtgtctcaagactcgagtatatcacttcgaacccttcaatttctgcaactgtaatgctgggatcaaatcaaatatcgagggattctgtagtccaatcgctgaaagagttggctggaaagcctgctgaacaaatctttgtaaacagtgtaaaactgccaagtgattcaattgttgaattcttcaccgccctatgtggtgtttctgctgaagaactaaaacaaacacctgctcgtgtctttagcttgcagaagcttgtagagataagctattataacatggctcgcattcggctggtgtgggctagaatatggtctgtgttggcccagcactttattgctgctggaagccacaatgaggagaaagttgcaatgtatgccattgattcactaagacagcttggtatgaagtacttggagcgtgctgaattaaacaatttcacatttcagagtgacatactgaaaccttttgtcattttaatgaggaatacccacaactcaaaaatccgaggtttaattgttgattgcattgttcagttgatcaagtcaaaagttggtagcataaagtcagggtggcgttgcgtattcatgatatttactgcagcagctgatgatgaggatgaatcaattgttgagagtgcttttgaaaatgtagaacaagttatcttggaacattttgaccaagttgttggtgattgcttcatggattgcgtcaactgtcttattggttttgcaaataacaagtgcactcctcggattagtttgaaggctattgctctcctgcgtatatgtgaagatcgtttggcagagggattcattccaggcggcgctattaaacctattgatgttgttccagaggccaattttgatgtgactgagcattattggtttcctatgctagctggtttgtctgatttgactttagactccagaccagaagtcagacactgtgcactggaagtgttgtttgatttgttgaatgaaagaggacataagttctcttctcccttctgggagagtatttttcatcgtgtactatttccaatttttgatcatgtaaggcatgctggaagggatgggctttcttcttctggggatgattggcttcgtgatactagcattcattcgctgcagttaatctgcaaccttttcaatacattctataagtttgctgcttgaatgtgcgaaaaaaacagaccaaactgtcgtttcaatttctcttggcgctttagttcatctgattgaagttggtggtcaccagttcagtgatggtgattgggaaacattattaaagagtattagggatgcgtcatacacaactcagcctcttgaactgctcaattcattaggattccataaatcaaacaaccagcagttactttcaagagaagaaagcaatgcacatggcaatagttaccatggcagccggggggaaccctccatcgttaataatggtgagcatagtcatgcagaggcaggtccacaaactagcctggagaattcggaaggtttaccgtcaccatcagggagaacacaacctgctgtttccccacgtggccaaagctttggacaaagaattatgggcaatatgatggataatcttttggttagaagtcttacatccaaatcaaaaggtcgagtcgatgatattgctccaccctcacctgtgaaggcccctgatgatgatgagacagacaaggctgaaggggaagagagccctatgatggaaactgtccggagcaaatgtatcacacagttgctgctgctcggggcaattgacagcatacagaatttgcttcttcgtataactcaccttcaaattttcggacgagaatgcaccatatacctctagaaagacctccactgaatcttctccgtcaagaactagttggaacaacaatttatttagatatccttcataagtcaacagtggagcaggacaaaattgactccattgaggaaacaaatggtttaaatgtggaatctggtgaccaggaaaagatcaagtacctagcagaagggaagctggtttctttttgtgggcagattttgaaagaggcgtctgttctccagcctagcactggggaggctgccagtgcagacatacatcgtgtattagacttacgggcacctgttattgtaaaggttttgaaaggaatgtgcatcatggatgctcagatcttcagaaggcacctgaaagagttctatccattaattaccaaacttatctgttgtgatcagatggatgttcgtggagcccttggtgatctctttagcaaacagcttactccactcatgccctgaagtctggcagtatttcctcccttgcatagatcttgttggaacatattcttcgtcagcatttttgtgcaaacatggagcaccggttgggtgcttgacatccttaacgcgctttctggtgcaacagctactccctaggaacttaagagcttgatcagcgggaacggcaggtccctaggccacatcttttttttttggatgacgcaagggaagtagcttgactgatgcgcacaccgtgtttttcctagcaggcttgtactttggagctatttatctgtgcccggacagggatgatgcttccattatacagtagagtagtgttggtaatatgtacacattgttgagaacgttgtacttgaggcctgttgttattatacggcaatagtagattgtttgcggcaagcctcgttttttgtgcgtctaattctctgacttgcagaattgcggtggcaaatacccattgccctccaagttgtgcgttagcgtatttatccgtagttgacagcaatgaacatattactactgctttctgtattttctattaacgcatgcacatagtttattgggtttccatattttcaatc

SEQ ID NO: 27169 - DNA, 5781 bp, Zea Mays
gaaaaattcagagatggtcctcgactcctggtgggtggtggcgatctcccagctgaactgaaagagcaagcgtgcgtgtgagacaaccaggtccgatccgcccccgccgagccgaggacagcagcgggggctctcggtctcctcctaggctcctacagatctcgtaccccgtcacagatctcgcgccctctccatcccatgcccaccccccctcgtcggatctgaccactccgcccctcctcccgtctccgccgccggagctgatatccgcggtcatggcgggcgccgcgggcgggttcgtcacgcgggccttcgaggccatgctcaaggagtgcgctgccaaccgcggcaagttcgccgcgctgcagcaatccatccagtcatacctcgatagtatcaagggggctacagcagagggcgcggtcatcaccgaggcgctcgggtcagctgggcgcgtgctcgacgggccgcaggccgagctggtgctgcagccgctccgcctcgccgtcgagaccaagcacgtcaagctcgtcgagcccgcgctcgactgcctccacaaacttattgcttatgaccatttagaaggcgatcctggtttagaaggtggtaaaaattccccaatatttacagacatcctgaacatggtatgtggttgcgtcgataacacctcctctgacagtactgttctccaagtcttgaaagtgcttcttaatgctgttgcttcaaataagtttagagttcatggagagccattgcttggggtcattagagtatgctataacattgctcttaatagagccctgtgaaccaggctacctcaaaggctatgttaacccagatgatcagcattgtattcaggagaatggaatctgagcaggtttctgtatcgcccggaagctctgtggttaaagatatgccttcatctatcacaaatgattctgaaaatggagaaatatctactgatggccaagatgaggaaaaggttactctgggagatgcattgtccatgaatcggccttctgaagctcctccaacgtctgttgaagagcttcagaatcttgcaggtggagcagatattaaggggctggaagctgttctagataaggctgttgaacttgaagacgggaaaaaagtgtcacgtggaattgacctggacactgtgaatataatacagcgtgatgcactattgctctttcgaactctctgcaagatgagcatgaaagaagaaagtgatgaggttgctaccaagacaaggctgctatcacttgaactgctccagggattgctagagggagtcagcaatgtgttcatcaaaaattttcacttcattgattcagtcaaagcatatctttcgtatgctcttctgcgagcatctgtctcttcatctccagttgtttttcagtatgcttgtggtatgttttcagttctgttgctccggtttagagagagtctgaagggggaaattggtgtcttctttcctttgatagttttaaggtctctggatagctctgatagccccctcagccagaaggctagtgttcttaggatgttggagaaagtttgcaaagatccccaaatgcttgcagatgtgtttgtgaactatgactgtgatcttgaggggccaaatctttttgaacgcacggttagtgcgctatcaagaatagcacaaggatctcaaattgctgatactaactccatcgtgtcatcccaaacagtttctgtaaaaagctcctctctccagtgtttggtgattattctgaagtcattggctgattgggagcaacttcgaagagattcctcaaagcaagggagcattgttgaatctcatgaagaggatgcttcaaggagattgacaactgatgagatgaagaaccaagaggatggtcggaatcagtttgagagagccaaagctcataagtcgacaatggaggctgcaatctctgagtttaatcgtaaaccaagtaaagggattgaatatttgttgtcaaataaattggtagaaaataaggcatcatctgtagctcagtttctcaagagcaatcccagcttggataaggttatgattggtgaatacttgggacagcatgaggagttccctcttgctgtgatgcattcctatgttgactccatgaagtttatagggttgaaatttgatgctgcaattcgtgcgttcctgaaaggatttcgccttcctggtgaggcgcagaagatagatcgcataatggaaaagtttgctgagcgatactgcttatgttcttgcttatgctgttataatgttgaatactgatgcacataatccaatggtgtggcctaagatgtcaaaatcagattttgttcgtatgaacactgcaagtgatgcagaagaatgtgtcccaaatgagctcttggaagaaatttatgattccattgtcaaggaagagataaagatgaaagacgattctcatgatacttcaaaatccaccaagagacctgaaacagaagaaagaggccgtcttgtcaatattctcaatttagcccttccaagactgaagtcagctagtgatacaaaggcagagagtgaaaagatcatcaaacagacccaggcacttttcaagaaccagggacagaagaaaggtgtttttcatgttgcgcagcaggttgagcttgttagaccaatgcttgaagctgtaggatggcctttgcttgcaacattttctgtgaccatggaggaaggtgacagtaagcctagggttgtatcatgcatggaaggatttcgtgctggtatccatcttactcgtgttcttggaatggacaccatgcgctatgctttcttgacgtccttagtgcggtttacatttttgcacgctcccaaggagatgcgcagtaaaaatgttgaggcactgaggactcttcttggtttagctgacactgatatggatgctttacaagatacttggaatgctgttttagaatgtgtctcaagactcgagtatatcacttcgaacccttcaatttctgcaactgtaatgctgggatcaaatcaaatatcgagggattctgtagtccaatcgctgaaagagttggctggaaagcctgctgaacaaatctttgtaaacagtgtaaaactgccaagtgattcaattgttgaattcttcaccgccctatgtggtgtttctgctgaagaactaaaacaaacacctgctcgtgtctttagcttgcagaagcttgtagagataagctattataacatggctcgcattcggctggtgtgggctagaatatggtctgtgttggcccagcactttattgctgctggaagccacaatgaggagaaagttgcaatgtatgccattgattcactaagacagcttggtatgaagtacttggagcgtgctgaattaaacaatttcacatttcagagtgacatactgaaaccttttgtcattttaatgaggaatacccacaactcaaaaatccgaggtttaattgttgattgcattgttcagttgatcaagtcaaaagttggtagcataaagtcagggtggcgttgcgtattcatgatatttactgcagcagctgatgatgaggatgaatcaattgttgagagtgcttttgaaaatgtagaacaagttatcttggaacattttgaccaagttgttggtgattgcttcatggattgcgtcaactgtcttattggttttgcaaataacaagtgcactcctcggattagtttgaaggctattgctctcctgcgtatatgtgaagatcgtttggcagagggattcattccaggcggcgctattaaacctattgatgttgttccagaggccaattttgatgtgactgagcattattggtttcctatgctagctggtttgtctgatttgactttagactccagaccagaagcatgctggaagggatgggctttcttcttctggggatgattggcttcgtgatactagcattcattcgctgcagttaatctgcaaccttttcaatacattctataagtttgctgcttgaatgtgcgaaaaaaacagaccaaactgtcgtttcaatttctcttggcgctttagttcatctgattgaagttggtggtcaccagttcagtgatggtgattgggaaacattattaaagagtattagggatgcgtcatacacaactcagcctcttgaactgctcaattcattaggattccataaatcaaacaaccagcagttactttcaagagaagaaagcaatgcacatggcaatagttaccatggcagccggggggaaccctccatcgttaataatggtgagcatagtcatgcagaggcaggtccacaaactagcctggagaattcggaaggtttaccgtcaccatcagggagaacacaacctgctgtttccccacgtggccaaagctttggacaaagaattatgggcaatatgatggataatcttttggttagaagtcttacatccaaatcaaaaggtcgagtcgatgatattgctccaccctcacctgtgaaggcccctgatgatgatgagacagacaaggctgaaggggaagagagccctatgatggaaactgtccggagcaaatgtatcacacagttgctgctgctcggggcaattgacagcatacagaagaggtattggagcaggttaaaagctacacaacagatagcaataatggatatcttgctctcactgctagaatttgcttcttcgtataactcaccttcaaattttcggacgagaatgcaccatatacctctagaaagacctccactgaatcttctccgtcaagaactagttggaacaacaatttatttagatatccttcataagtcaacagtggagcaggacaaaattgactccattgaggaaacaaatggtttaaatgtggaatctggtgaccaggaaaagatcaagtacctagcagaagggaagctggtttctttttgtgggcagattttgaaagaggcgtctgttctccagcctagcactggggaggctgccagtgcagacatacatcgtgtattagacttacgggcacctgttattgtaaaggttttgaaaggaatgtgcatcatggatgctcagatcttcagaaggcacctgaaagagttctatccattaattaccaaacttatctgttgtgatcagatggatgttcgtggagcccttggtgatctctttagcaaacagcttactccactcatgccctgaagtctggcagtatttcctcccttgcatagatcttgttggaacatattcttcgtcagcatttttgtgcaaacatggagcaccggttgggtgcttgacatccttaacgcgctttctggtgcaacagctactccctaggaacttaagagcttgatcagcgggaacggcaggtccctaggccacatcttttttttttggatgacgcaagggaagtagcttgactgatgcgcacaccgtgtttttcctagcaggcttgtactttggagctatttatctgtgcccggacagggatgatgcttccattatacagtagagtagtgttggtaatatgtacacattgttgagaacgttgtacttgaggcctgttgttattatacggcaatagtagattgtttgcggcaagcctcgttttttgtgcgtctaattctctgacttgcagaattgcggtggcaaatacccattgccctccaagttgtgcgttagcgtatttatccgtagttgacagcaatgaacatattactactgctttctgtattttctattaacgcatgcacatagtttattgggtttccatattttcaatc

SEQ ID NO: 27170 - DNA, 6437 bp, Zea Mays
gaaaaattcagagatggtcctcgactcctggtgggtggtggcgatctcccagctgaactgaaagagcaagcgtgcgtgtgagacaaccaggtccgatccgcccccgccgagccgaggacagcagcgggggctctcggtctcctcctaggctcctacagatctcgtaccccgtcacagatctcgcgccctctccatcccatgcccaccccccctcgtcggatctgaccactccgcccctcctcccgtctccgccgccggagctgatatccgcggtcatggcgggcgccgcgggcgggttcgtcacgcgggccttcgaggccatgctcaaggagtgcgctgccaaccgcggcaagttcgccgcgctgcagcaatccatccagtcatacctcgatagtatcaagggggctacagcagagggcgcggtcatcaccgaggcgctcgggtcagctgggcgcgtgctcgacgggccgcaggccgagctggtgctgcagccgctccgcctcgccgtcgagaccaagcacgtcaagctcgtcgagcccgcgctcgactgcctccacaaacttattgcttatgaccatttagaaggcgatcctggtttagaaggtggtaaaaattccccaatatttacagacatcctgaacatggtatgtggttgcgtcgataacacctcctctgacagtactgttctccaagtcttgaaagtgcttcttaatgctgttgcttcaaataagtttagagttcatggagagccattgcttggggtcattagagtatgctataacattgctcttaataggtacctgttatatcgctaccttcttgtttgcagtatgttgccttgttgccctttggaccatgtatgataatttattcatttgtattttcttagcaagagccctgtgaaccaggctacctcaaaggctatgttaacccagatgatcagcattgtattcaggagaatggaatctgagcaggtttctgtatcgcccggaagctctgtggttaaagatatgccttcatctatcacaaatgattctgaaaatggagaaatatctactgatggccaagatgaggaaaaggttactctgggagatgcattgtccatgaatcggccttctgaagctcctccaacgtctgttgaagagcttcagaatcttgcaggtggagcagatattaaggggctggaagctgttctagataaggctgttgaacttgaagacgggaaaaaagtgtcacgtggaattgacctggacactgtgaatataatacagcgtgatgcactattgctctttcgaactctctgcaagatgagcatgaaagaagaaagtgatgaggttgctaccaagacaaggctgctatcacttgaactgctccagggattgctagagggagtcagcaatgtgttcatcaaaaattttcacttcattgattcagtcaaagcatatctttcgtatgctcttctgcgagcatctgtctcttcatctccagttgtttttcagtatgcttgtggtatgttttcagttctgttgctccggtttagagagagtctgaagagggggaaattggtgtcttctttcctttgatagttttaaggtctctggatagctctgatagccccctcagccagaaggctagtgttcttaggatgttggagaaagtttgcaaagatccccaaatgcttgcagatgtgtttgtgaactatgactgtgatcttgaggggccaaatctttttgaacgcacggttagtgcgctatcaagaatagcacaaggatctcaaattgctgatactaactccatcgtgtcatcccaaacagtttctgtaaaaagctcctctctccagtgtttggtgattattctgaagtcattggctgattgggagcaacttcgaagagattcctcaaagcaagggagcattgttgaatctcatgaagaggatgcttcaaggagattgacaactgatgagatgaagaaccaagaggatggtcggaatcagtttgagagagccaaagctcataagtcgacaatggaggctgcaatctctgagtttaatcgtaaaccaagtaaagggattgaatatttgttgtcaaataaattggtagaaaataaggcatcatctgtagctcagtttctcaagagcaatcccagcttggataaggttatgattggtgaatacttgggacagcatgaggagttccctcttgctgtgatgcattcctatgttgactccatgaagtttatagggttgaaatttgatgctgcaattcgtgcgttcctgaaaggatttcgccttcctggtgaggcgcagaagatagatcgcataatggaaaagtttgctgagcggtactgtgctgataatcctgagcttttcaaaaatgcagatactgcttatgttcttgcttatgctgttataatgttgaatactgatgcacataatccaatggtgtggcctaagatgtcaaaatcagattttgttcgtatgaacactgcaagtgatgcagaagaatgtgtcccaaatgagctcttggaagaaatttatgattccattgtcaaggaagagataaagatgaaagacgattctcatgatacttcaaaatccaccaagagacctgaaacagaagaaagaggccgtcttgtcaatattctcaatttagcccttccaagactgaagtcagctagtgatacaaaggcagagagtgaaaagatcatcaaacagacccaggcacttttcaagaaccagggacagaagaaaggtgtttttcatgttgcgcagcaggttgagcttgttagaccaatgcttgaagctgtaggatggcctttgcttgcaacattttctgtgaccatggaggaaggtgacagtaagcctagggttgtatcatgcatggaaggatttcgtgctggtatccatcttactcgtgttcttggaatggacaccatgcgctatgctttcttgacgtccttagtgcggtttacatttttgcacgctcccaaggagatgcgcagtaaaaatgttgaggcactgaggactcttcttggtttagctgacactgatatggatgctttacaagatacttggaatgctgttttagaatgtgtctcaagactcgagtatatcacttcgaacccttcaatttctgcaactgtaatgctgggatcaaatcaaatatcgagggattctgtagtccaatcgctgaaagagttggctggaaagcctgctgaacaaatctttgtaaacagtgtaaaactgccaagtgattcaattgttgaattcttcaccgccctatgtggtgtttctgctgaagaactaaaacaaacacctgctcgtgtctttagcttgcagaagcttgtagagataagctattataacatggctcgcattcggctggtgtgggctagaatatggtctgtgttggcccagcactttattgctgctggaagccacaatgaggagaaagttgcaatgtatgccattgattcactaagacagcttggtatgaagtacttggagcgtgctgaattaaacaatttcacatttcagagtgacatactgaaaccttttgtcattttaatgaggaatacccacaactcaaaaatccgaggtttaattgttgattgcattgttcagttgatcaagtcaaaagttggtagcataaagtcagggtggcgttgcgtattcatgatatttactgcagcagctgatgatgaggatgaatcaattgttgagagtgcttttgaaaatgtagaacaagttatcttggaacattttgaccaagttgttggtgattgcttcatggattgcgtcaactgtcttattggttttgcaaataacaagtgcactcctcggattagtttgaaggctattgctctcctgcgtatatgtgaagatcgtttggcagagggattcattccaggcggcgctattaaacctattgatgttgttccagaggccaattttgatgtgactgagcattattggtttcctatgctagctggtttgtctgatttgactttagactccagaccagaagtcagacactgtgcactggaagtgttgtttgatttgttgaatgaaagaggacataagttctcttctcccttctgggagagtatttttcatcgtgtactatttccaatttttgatcatgtaaggcatgctggaagggatgggctttcttcttctggggatgattggcttcgtgatactagcattcattcgctgcagttaatctgcaaccttttcaatacattctataaggtagcatgtgttcttccttttagttgcttgacaaacatcctttgtataattcagaatataagtgtgatgaaactggtcatccgctacttctatagatatcacattgaaacttgtttggttggccatcgtctgactgtggcacttacaggaggtatcctttatgcttccacctcttctcagtttgctgcttgaatgtgcgaaaaaaacagaccaaactgtcgtttcaatttctcttggcgctttagttcatctgattgaagttggtggtcaccagttcagtgatggtgattgggaaacattattaaagagtattagggatgcgtcatacacaactcagcctcttgaactgctcaattcattaggattccataaatcaaacaaccagcagttactttcaagagaagaaagcaatgcacatggcaatagttaccatggcagccggggggaaccctccatcgttaataatggtgagcatagtcatgcagaggcaggtccacaaactagcctggagaattcggaaggtaccacgagcagaggtttaccgtcaccatcagggagaacacaacctgctgtttccccacgtggccaaagctttggacaaagaattatgggcaatatgatggataatcttttggttagaagtcttacatccaaatcaaaaggtcgagtcgatgatattgctccaccctcacctgtgaaggcccctgatgatgatgagacagacaaggctgaaggggaagagagccctatgatggaaactgtccggagcaaatgtatcacacagttgctgctgctcggggcaattgacagcatacaggtaagcagtttcctccactttatatgcatgctcttagatctgagtccatccattgtttctctgacaatgtggactggaagcacctttgtctgtgatacaattgaggacttctagttgcaaataaggaattcatcaccctaatatattagccagccctacttgggttgatatactgtgattaactattgatgaaacatttcagaagaggtattggagcaggttaaaagctacacaacagatagcaataatggatatcttgctctcactgctagaatttgcttcttcgtataactcaccttcaaattttcggacgagaatgcaccatatacctctagaaagacctccactgaatcttctccgtcaagaactagttggaacaacaatttatttagatatccttcataagtcaacagtggagcaggacaaaattgactccattgaggaaacaaatggtttaaatgtggaatctggtgaccaggaaaagatcaagtacctagcagaagggaagctggtttctttttgtgggcagattttgaaagaggcgtctgttctccagcctagcactggggaggctgccagtgcagacatacatcgtgtattagacttacgggcacctgttattgtaaaggttttgaaaggaatgtgcatcatggatgctcagatcttcagaaggcacctgaaagagttctatccattaattaccaaacttatctgttgtgatcagatggatgttcgtggagcccttggtgatctctttagcaaacagcttactccactcatgccctgaagtctggcagtatttcctcccttgcatagatcttgttggaacatattcttcgtcagcatttttgtgcaaacatggagcaccggttgggtgcttgacatccttaacgcgctttctggtgcaacagctactccctaggaacttaagagcttgatcagcgggaacggcaggtccctaggccacatcttttttttttggatgacgcaagggaagtagcttgactgatgcgcacaccgtgtttttcctagcaggcttgtactttggagctatttatctgtgcccggacagggatgatgcttccattatacagtagagtagtgttggtaatatgtacacattgttgagaacgttgtacttgaggcctgttgttattatacggcaatagtagattgtttgcggcaagcctcgttttttgtgcgtctaattctctgacttgcagaattgcggtggcaaatacccattgccctccaagttgtgcgttagcgtatttatccgtagttgacagcaatgaacatattactactgctttctgtattttctattaacgcatgcacatagtttattgggtttccatattttcaatc

SEQ ID NO: 27171 - DNA, 5833 bp, Zea Mays
gaaaaattcagagatggtcctcgactcctggtgggtggtggcgatctcccagctgaactgaaagagcaagcgtgcgtgtgagacaaccaggtccgatccgcccccgccgagccgaggacagcagcgggggctctcggtctcctcctaggctcctacagatctcgtaccccgtcacagatctcgcgccctctccatcccatgcccaccccccctcgtcggatctgaccactccgcccctcctcccgtctccgccgccggagctgatatccgcggtcatggcgggcgccgcgggcgggttcgtcacgcgggccttcgaggccatgctcaaggagtgcgctgccaaccgcggcaagttcgccgcgctgcagcaatccatccagtcatacctcgatagtatcaagggggctacagcagagggcgcggtcatcaccgaggcgctcgggtcagctgggcgcgtgctcgacgggccgcaggccgagctggtgctgcagccgctccgcctcgccgtcgagaccaagcacgtcaagctcgtcgagcccgcgctcgactgcctccacaaacttattgcttatgaccatttagaaggcgatcctggtttagaaggtggtaaaaattccccaatatttacagacatcctgaacatggtatgtggttgcgtcgataacacctcctctgacagtactgttctccaagtcttgaaagtgcttcttaatgctgttgcttcaaataagtttagagttcatggagagccattgcttggggtcattagagtatgctataacattgctcttaatagagccctgtgaaccaggctacctcaaaggctatgttaacccagatgatcagcattgtattcaggagaatggaatctgagcaggtttctgtatcgcccggaagctctgtggttaaagatatgccttcatctatcacaaatgattctgaaaatggagaaatatctactgatggccaagatgaggaaaaggttactctgggagatgcattgtccatgaatcggccttctgaagctcctccaacgtctgttgaagagcttcagaatcttgcaggtggagcagatattaaggggctggaagctgttctagataaggctgttgaacttgaagacgggaaaaaagtgtcacgtggaattgacctggacactgtgaatataatacagcgtgatgcactattgctctttcgaactctctgcaagatgagcatgaaagaagaaagtgatgaggttgctaccaagacaaggctgctatcacttgaactgctccagggattgctagagggagtcagcaatgtgttcatcaaaaattttcacttcattgattcagtcaaagcatatctttcgtatgctcttctgcgagcatctgtctcttcatctccagttgtttttcagtatgcttgtggtatgttttcagttctgttgctccggtttagagagagtctgaagggggaaattggtgtcttctttcctttgatagttttaaggtctctggatagctctgatagccccctcagccagaaggctagtgttcttaggatgttggagaaagtttgcaaagatccccaaatgcttgcagatgtgtttgtgaactatgactgtgatcttgaggggccaaatctttttgaacgcacggttagtgcgctatcaagaatagcacaaggatctcaaattgctgatactaactccatcgtgtcatcccaaacagtttctgtaaaaagctcctctctccagtgtttggtgattattctgaagtcattggctgattgggagcaacttcgaagagattcctcaaagcaagggagcattgttgaatctcatgaagaggatgcttcaaggagattgacaactgatgagatgaagaaccaagaggatggtcggaatcagtttgagagagccaaagctcataagtcgacaatggaggctgcaatctctgagtttaatcgtaaaccaagtaaagggattgaatatttgttgtcaaataaattggtagaaaataaggcatcatctgtagctcagtttctcaagagcaatcccagcttggataaggttatgattggtgaatacttgggacagcatgaggagttccctcttgctgtgatgcattcctatgttgactccatgaagtttatagggttgaaatttgatgctgcaattcgtgcgttcctgaaaggatttcgccttcctggtgaggcgcagaagatagatcgcataatggaaaagtttgctgagcgatactgcttatgttcttgcttatgctgttataatgttgaatactgatgcacataatccaatggtgtggcctaagatgtcaaaatcagattttgttcgtatgaacactgcaagtgatgcagaagaatgtgtcccaaatgagctcttggaagaaatttatgattccattgtcaaggaagagataaagatgaaagacgattctcatgatacttcaaaatccaccaagagacctgaaacagaagaaagaggccgtcttgtcaatattctcaatttagcccttccaagactgaagtcagctagtgatacaaaggcagagagtgaaaagatcatcaaacagacccaggcacttttcaagaaccagggacagaagaaaggtgtttttcatgttgcgcagcaggttgagcttgttagaccaatgcttgaagctgtaggatggcctttgcttgcaacattttctgtgaccatggaggaaggtgacagtaagcctagggttgtatcatgcatggaaggatttcgtgctggtatccatcttactcgtgttcttggaatggacaccatgcgctatgctttcttgacgtccttagtgcggtttacatttttgcacgctcccaaggagatgcgcagtaaaaatgttgaggcactgaggactcttcttggtttagctgacactgatatggatgctttacaagatacttggaatgctgttttagaatgtgtctcaagactcgagtatatcacttcgaacccttcaatttctgcaactgtaatgctgggatcaaatcaaatatcgagggattctgtagtccaatcgctgaaagagttggctggaaagcctgctgaacaaatctttgtaaacagtgtaaaactgccaagtgattcaattgttgaattcttcaccgccctatgtggtgtttctgctgaagaactaaaacaaacacctgctcgtgtctttagcttgcagaagcttgtagagataagctattataacatggctcgcattcggctggtgtgggctagaatatggtctgtgttggcccagcactttattgctgctggaagccacaatgaggagaaagttgcaatgtatgccattgattcactaagacagcttggtatgaagtacttggagcgtgctgaattaaacaatttcacatttcagagtgacatactgaaaccttttgtcattttaatgaggaatacccacaactcaaaaatccgaggtttaattgttgattgcattgttcagttgatcaagtcaaaagttggtagcataaagtcagggtggcgttgcgtattcatgatatttactgcagcagctgatgatgaggatgaatcaattgttgagagtgcttttgaaaatgtagaacaagttatcttggaacattttgaccaagttgttggtgattgcttcatggattgcgtcaactgtcttattggttttgcaaataacaagtgcactcctcggattagtttgaaggctattgctctcctgcgtatatgtgaagatcgtttggcagagggattcattccaggcggcgctattaaacctattgatgttgttccagaggccaattttgatgtgactgagcattattggtttcctatgctagctggtttgtctgatttgactttagactccagaccagaagcatgctggaagggatgggctttcttcttctggggatgattggcttcgtgatactagcattcattcgctgcagttaatctgcaaccttttcaatacattctataagttcatctgattgaagttggtggtcaccagttcagtgatggtgattgggaaacattattaaagagtattagggatgcgtcatacacaactcagcctcttgaactgctcaattcattaggattccataaatcaaacaaccagcagttactttcaagagaagaaagcaatgcacatggcaatagttaccatggcagccggggggaaccctccatcgttaataatggtgagcatagtcatgcagaggcaggtccacaaactagcctggagaattcggaaggtttaccgtcaccatcagggagaacacaacctgctgtttccccacgtggccaaagctttggacaaagaattatgggcaatatgatggataatcttttggttagaagtcttacatccaaatcaaaaggtcgagtcgatgatattgctccaccctcacctgtgaaggcccctgatgatgatgagacagacaaggctgaaggggaagagagccctatgatggaaactgtccggagcaaatgtatcacacagttgctgctgctcggggcaattgacagcatacaggtaagcagtttcctccactttatatgcatgctcttagatctgagtccatccattgtttctctgacaatgtggactggaagcacctttgtctgtgatacaattgaggacttctagttgcaaataaggaattcatcaccctaatatattagccagccctacttgggttgatatactgtgattaactattgatgaaacatttcagaagaggtattggagcaggttaaaagctacacaacagatagcaataatggatatcttgctctcactgctagaatttgcttcttcgtataactcaccttcaaattttcggacgagaatgcaccatatacctctagaaagacctccactgaatcttctccgtcaagaactagttggaacaacaatttatttagatatccttcataagtcaacagtggagcaggacaaaattgactccattgaggaaacaaatggtttaaatgtggaatctggtgaccaggaaaagatcaagtacctagcagaagggaagctggtttctttttgtgggcagattttgaaagaggcgtctgttctccagcctagcactggggaggctgccagtgcagacatacatcgtgtattagacttacgggcacctgttattgtaaaggttttgaaaggaatgtgcatcatggatgctcagatcttcagaaggcacctgaaagagttctatccattaattaccaaacttatctgttgtgatcagatggatgttcgtggagcccttggtgatctctttagcaaacagcttactccactcatgccctgaagtctggcagtatttcctcccttgcatagatcttgttggaacatattcttcgtcagcatttttgtgcaaacatggagcaccggttgggtgcttgacatccttaacgcgctttctggtgcaacagctactccctaggaacttaagagcttgatcagcgggaacggcttgtactttggagctatttatctgtgcccggacagggatgatgcttccattatacagtagagtagtgttggtaatatgtacacattgttgagaacgttgtacttgaggcctgttgttattatacggcaatagtagattgtttgcggcaagcctcgttttttgtgcgtctaattctctgacttgcagaattgcggtggcaaatacccattgccctccaagttgtgcgttagcgtatttatccgtagttgacagcaatgaacatattactactgctttctgtattttctattaacgcatgcacatagtttattgggtttccatattttcaatc

SEQ ID NO: 27172 - DNA, 6314 bp, Zea Mays
agaaaaattcagagatggtcctcgactcctggtgggtggtggcgatctcccagctgaactgaaagagcaagcgtgcgtgtgagacaaccaggtccgatccgcccccgccgagccgaggacagcagcgggggctctcggtctcctcctaggctcctacagatctcgtaccccgtcacagatctcgcgccctctccatcccatgcccaccccccctcgtcggatctgaccactccgcccctcctcccgtctccgccgccggagctgatatccgcggtcatggcgggcgccgcgggcgggttcgtcacgcgggccttcgaggccatgctcaaggagtgcgctgccaaccgcggcaagttcgccgcgctgcagcaatccatccagtcatacctcgatagtatcaagggggctacagcagagggcgcggtcatcaccgaggcgctcgggtcagctgggcgcgtgctcgacgggccgcaggccgagctggtgctgcagccgctccgcctcgccgtcgagaccaagcacgtcaagctcgtcgagcccgcgctcgactgcctccacaaacttattgcttatgaccatttagaaggcgatcctggtttagaaggtggtaaaaattccccaatatttacagacatcctgaacatggtatgtggttgcgtcgataacacctcctctgacagtactgttctccaagtcttgaaagtgcttcttaatgctgttgcttcaaataagtttagagttcatggagagccattgcttggggtcattagagtatgctataacattgctcttaataggtacctgttatatcgctaccttcttgtttgcagtatgttgccttgttgccctttggaccatgtatgataatttattcatttgtattttcttagcaagagccctgtgaaccaggctacctcaaaggctatgttaacccagatgatcagcattgtattcaggagaatggaatctgagcaggtttctgtatcgcccggaagctctgtggttaaagatatgccttcatctatcacaaatgattctgaaaatggagaaatatctactgatggccaagatgaggaaaaggttactctgggagatgcattgtccatgaatcggccttctgaagctcctccaacgtctgttgaagagcttcagaatcttgcaggtggagcagatattaaggggctggaagctgttctagataaggctgttgaacttgaagacgggaaaaaagtgtcacgtggaattgacctggacactgtgaatataatacagcgtgatgcactattgctctttcgaactctctgcaagatgagcatgaaagaagaaagtgatgaggttgctaccaagacaaggctgctatcacttgaactgctccagggattgctagagggagtcagcaatgtgttcatcaaaaattttcacttcattgattcagtcaaagcatatctttcgtatgctcttctgcgagcatctgtctcttcatctccagttgtttttcagtatgcttgtggtatgttttcagttctgttgctccggtttagagagagtctgaagggggaaattggtgtcttctttcctttgatagttttaaggtctctggatagctctgatagccccctcagccagaaggctagtgttcttaggatgttggagaaagtttgcaaagatccccaaatgcttgcagatgtgtttgtgaactatgactgtgatcttgaggggccaaatctttttgaacgcacggttagtgcgctatcaagaatagcacaaggatctcaaattgctgatactaactccatcgtgtcatcccaaacagtttctgtaaaaagctcctctctccagtgtttggtgattattctgaagtcattggctgattgggagcaacttcgaagagattcctcaaagcaagggagcattgttgaatctcatgaagaggatgcttcaaggagattgacaactgatgagatgaagaaccaagaggatggtcggaatcagtttgagagagccaaagctcataagtcgacaatggaggctgcaatctctgagtttaatcgtaaaccaagtaaagggattgaatatttgttgtcaaataaattggtagaaaataaggcatcatctgtagctcagtttctcaagagcaatcccagcttggataaggttatgattggtgaatacttgggacagcatgaggagttccctcttgctgtgatgcattcctatgttgactccatgaagtttatagggttgaaatttgatgctgcaattcgtgcgttcctgaaaggatttcgccttcctggtgaggcgcagaagatagatcgcataatggaaaagtttgctgagcggtactgtgctgataatcctgagcttttcaaaaatgcagatactgcttatgttcttgcttatgctgttataatgttgaatactgatgcacataatccaatggtgtggcctaagatgtcaaaatcagattttgttcgtatgaacactgcaagtgatgcagaagaatgtgtcccaaatgagctcttggaagaaatttatgattccattgtcaaggaagagataaagatgaaagacgattctcatgatacttcaaaatccaccaagagacctgaaacagaagaaagaggccgtcttgtcaatattctcaatttagcccttccaagactgaagtcagctagtgatacaaaggcagagagtgaaaagatcatcaaacagacccaggcacttttcaagaaccagggacagaagaaaggtgtttttcatgttgcgcagcaggttgagcttgttagaccaatgcttgaagctgtaggatggcctttgcttgcaacattttctgtgaccatggaggaaggtgacagtaagcctagggttgtatcatgcatggaaggatttcgtgctggtatccatcttactcgtgttcttggaatggacaccatgcgctatgctttcttgacgtccttagtgcggtttacatttttgcacgctcccaaggagatgcgcagtaaaaatgttgaggcactgaggactcttcttggtttagctgacactgatatggatgctttacaagatacttggaatgctgttttagaatgtgtctcaagactcgagtatatcacttcgaacccttcaatttctgcaactgtaatgctgggatcaaatcaaatatcgagggattctgtagtccaatcgctgaaagagttggctggaaagcctgctgaacaaatctttgtaaacagtgtaaaactgccaagtgattcaattgttgaattcttcaccgccctatgtggtgtttctgctgaagaactaaaacaaacacctgctcgtgtctttagcttgcagaagcttgtagagataagctattataacatggctcgcattcggctggtgtgggctagaatatggtctgtgttggcccagcactttattgctgctggaagccacaatgaggagaaagttgcaatgtatgccattgattcactaagacagcttggtatgaagtacttggagcgtgctgaattaaacaatttcacatttcagagtgacatactgaaaccttttgtcattttaatgaggaatacccacaactcaaaaatccgaggtttaattgttgattgcattgttcagttgatcaagtcaaaagttggtagcataaagtcagggtggcgttgcgtattcatgatatttactgcagcagctgatgatgaggatgaatcaattgttgagagtgcttttgaaaatgtagaacaagttatcttggaacattttgaccaagttgttggtgattgcttcatggattgcgtcaactgtcttattggttttgcaaataacaagtgcactcctcggattagtttgaaggctattgctctcctgcgtatatgtgaagatcgtttggcagagggattcattccaggcggcgctattaaacctattgatgttgttccagaggccaattttgatgtgactgagcattattggtttcctatgctagctggtttgtctgatttgactttagactccagaccagaagcatgctggaagggatgggctttcttcttctggggatgattggcttcgtgatactagcattcattcgctgcagttaatctgcaaccttttcaatacattctataaggtagcatgtgttcttccttttagttgcttgacaaacatcctttgtataattcagaatataagtgtgatgaaactggtcatccgctacttctatagatatcacattgaaacttgtttggttggccatcgtctgactgtggcacttacaggaggtatcctttatgcttccacctcttctcagtttgctgcttgaatgtgcgaaaaaaacagaccaaactgtcgtttcaatttctcttggcgctttagttcatctgattgaagttggtggtcaccagttcagtgatggtgattgggaaacattattaaagagtattagggatgcgtcatacacaactcagcctcttgaactgctcaattcattaggattccataaatcaaacaaccagcagttactttcaagagaagaaagcaatgcacatggcaatagttaccatggcagccggggggaaccctccatcgttaataatggtgagcatagtcatgcagaggcaggtccacaaactagcctggagaattcggaaggtaccacgagcagaggtttaccgtcaccatcagggagaacacaacctgctgtttccccacgtggccaaagctttggacaaagaattatgggcaatatgatggataatcttttggttagaagtcttacatccaaatcaaaaggtcgagtcgatgatattgctccaccctcacctgtgaaggcccctgatgatgatgagacagacaaggctgaaggggaagagagccctatgatggaaactgtccggagcaaatgtatcacacagttgctgctgctcggggcaattgacagcatacaggtaagcagtttcctccactttatatgcatgctcttagatctgagtccatccattgtttctctgacaatgtggactggaagcacctttgtctgtgatacaattgaggacttctagttgcaaataaggaattcatcaccctaatatattagccagccctacttgggttgatatactgtgattaactattgatgaaacatttcagaagaggtattggagcaggttaaaagctacacaacagatagcaataatggatatcttgctctcactgctagaatttgcttcttcgtataactcaccttcaaattttcggacgagaatgcaccatatacctctagaaagacctccactgaatcttctccgtcaagaactagttggaacaacaatttatttagatatccttcataagtcaacagtggagcaggacaaaattgactccattgaggaaacaaatggtttaaatgtggaatctggtgaccaggaaaagatcaagtacctagcagaagggaagctggtttctttttgtgggcagattttgaaagaggcgtctgttctccagcctagcactggggaggctgccagtgcagacatacatcgtgtattagacttacgggcacctgttattgtaaaggttttgaaaggaatgtgcatcatggatgctcagatcttcagaaggcacctgaaagagttctatccattaattaccaaacttatctgttgtgatcagatggatgttcgtggagcccttggtgatctctttagcaaacagcttactccactcatgccctgaagtctggcagtatttcctcccttgcatagatcttgttggaacatattcttcgtcagcatttttgtgcaaacatggagcaccggttgggtgcttgacatccttaacgcgctttctggtgcaacagctactccctaggaacttaagagcttgatcagcgggaacggcaggtccctaggccacatcttttttttttggatgacgcaagggaagtagcttgactgatgcgcacaccgtgtttttcctagcaggcttgtactttggagctatttatctgtgcccggacagggatgatgcttccattatacagtagagtagtgttggtaatatgtacacattgttgagaacgttgtacttgaggcctgttgttattatacggcaatagtagattgtttgcggcaagcctcgttttttgtgcgtctaattctctgacttgcagaattgcggtggcaaatacccattgccctccaagttgtgcgttagcgtatttatccgtagttgacagcaatgaacatattactactgctttctgtattttctattaacgcatgcacatagtttattgggtttccatattttcaatc

SEQ ID NO: 27173 - DNA, 5781 bp, Zea Mays
gccatggtacgtgcctgcgtaaaagaaaaattcagagatggtcctcgactcctggtgggtggtggcgatctcccagctgaactgaaagagcaagcgtgcgtgtgagacaaccaggtccgatccgcccccgccgagccgaggacagcagcgggggctctcggtctcctcctaggctcctacagatctcgtaccccgtcacagatctcgcgccctctccatcccatgcccaccccccctcgtcggatctgaccactccgcccctcctcccgtctccgccgccggagctgatatccgcggtcatggcgggcgccgcgggcgggttcgtcacgcgggccttcgaggccatgctcaaggagtgcgctgccaaccgcggcaagttcgccgcgctgcagcaatccatccagtcatacctcgatagtatcaagggggctacagcagagggcgcggtcatcaccgaggcgctcgggtcagctgggcgcgtgctcgacgggccgcaggccgagctggtgctgcagccgctccgcctcgccgtcgagaccaagcacgtcaagctcgtcgagcccgcgctcgactgcctccacaaacttattgcttatgaccatttagaaggcgatcctggtttagaaggtggtaaaaattccccaatatttacagacatcctgaacatggtatgtggttgcgtcgataacacctcctctgacagtactgttctccaagtcttgaaagtgcttcttaatgctgttgcttcaaataagtttagagttcatggagagccattgcttggggtcattagagtatgctataacattgctcttaatagagccctgtgaaccaggctacctcaaaggctatgttaacccagatgatcagcattgtattcaggagaatggaatctgagcaggtttctgtatcgcccggaagctctgtggttaaagatatgccttcatctatcacaaatgattctgaaaatggagaaatatctactgatggccaagatgaggaaaaggttactctgggagatgcattgtccatgaatcggccttctgaagctcctccaacgtctgttgaagagcttcagaatcttgcaggtggagcagatattaaggggctggaagctgttctagataaggctgttgaacttgaagacgggaaaaaagtgtcacgtggaattgacctggacactgtgaatataatacagcgtgatgcactattgctctttcgaactctctgcaagatgagcatgaaagaagaaagtgatgaggttgctaccaagacaaggctgctatcacttgaactgctccagggattgctagagggagtcagcaatgtgttcatcaaaaattttcacttcattgattcagtcaaagcatatctttcgtatgctcttctgcgagcatctgtctcttcatctccagttgtttttcagtatgcttgtggtatgttttcagttctgttgctccggtttagagagagtctgaagggggaaattggtgtcttctttcctttgatagttttaaggtctctggatagctctgatagccccctcagccagaaggctagtgttcttaggatgttggagaaagtttgcaaagatccccaaatgcttgcagatgtgtttgtgaactatgactgtgatcttgaggggccaaatctttttgaacgcacggttagtgcgctatcaagaatagcacaaggatctcaaattgctgatactaactccatcgtgtcatcccaaacagtttctgtaaaaagctcctctctccagtgtttggtgattattctgaagtcattggctgattgggagcaacttcgaagagattcctcaaagcaagggagcattgttgaatctcatgaagaggatgcttcaaggagattgacaactgatgagatgaagaaccaagaggatggtcggaatcagtttgagagagccaaagctcataagtcgacaatggaggctgcaatctctgagtttaatcgtaaaccaagtaaagggattgaatatttgttgtcaaataaattggtagaaaataaggcatcatctgtagctcagtttctcaagagcaatcccagcttggataaggttatgattggtgaatacttgggacagcatgaggagttccctcttgctgtgatgcattcctatgttgactccatgaagtttatagggttgaaatttgatgctgcaattcgtgcgttcctgaaaggatttcgccttcctggtgaggcgcagaagatagatcgcataatggaaaagtttgctgagcggtactgtgctgataatcctgagcttttcaaaaatgcagatactgcttatgttcttgcttatgctgttataatgttgaatactgatgcacataatccaatggtgtggcctaagatgtcaaaatcagattttgttcgtatgaacactgcaagtgatgcagaagaatgtgtcccaaatgagctcttggaagaaatttatgattccattgtcaaggaagagataaagatgaaagacgattctcatgatacttcaaaatccaccaagagacctgaaacagaagaaagaggccgtcttgtcaatattctcaatttagcccttccaagactgaagtcagctagtgatacaaaggcagagagtgaaaagatcatcaaacagacccaggcacttttcaagaaccagggacagaagaaaggtgtttttcatgttgcgcagcaggttgagcttgttagaccaatgcttgaagctgtaggatggcctttgcttgcaacattttctgtgaccatggaggaaggtgacagtaagcctagggttgtatcatgcatggaaggatttcgtgctggtatccatcttactcgtgttcttggaatggacaccatgcgctatgctttcttgacgtccttagtgcggtttacatttttgcacgctcccaaggagatgcgcagtaaaaatgttgaggcactgaggactcttcttggtttagctgacactgatatggatgctttacaagatacttggaatgctgttttagaatgtgtctcaagactcgagtatatcacttcgaacccttcaatttctgcaactgtaatgctgggatcaaatcaaatatcgagggattctgtagtccaatcgctgaaagagttggctggaaagcctgctgaacaaatctttgtaaacagtgtaaaactgccaagtgattcaattgttgaattcttcaccgccctatgtggtgtttctgctgaagaactaaaacaaacacctgctcgtgtctttagcttgcagaagcttgtagagataagctattataacatggctcgcattcggctggtgtgggctagaatatggtctgtgttggcccagcactttattgctgctggaagccacaatgaggagaaagttgcaatgtatgccattgattcactaagacagcttggtatgaagtacttggagcgtgctgaattaaacaatttcacatttcagagtgacatactgaaaccttttgtcattttaatgaggaatacccacaactcaaaaatccgaggtttaattgttgattgcattgttcagttgatcaagtcaaaagttggtagcataaagtcagggtggcgttgcgtattcatgatatttactgcagcagctgatgatgaggatgaatcaattgttgagagtgcttttgaaaatgtagaacaagttatcttggaacattttgaccaagttgttggtgattgcttcatggattgcgtcaactgtcttattggttttgcaaataacaagtgcactcctcggattagtttgaaggctattgctctcctgcgtatatgtgaagatcgtttggcagagggattcattccaggcggcgctattaaacctattgatgttgttccagaggccaattttgatgtgactgagcattattggtttcctatgctagctggtttgtctgatttgactttagactccagaccagaagcatgctggaagggatgggctttcttcttctggggatgattggcttcgtgatactagcattcattcgctgcagttaatctgcaaccttttcaatacattctataaggagttcatctgattgaagttggtggtcaccagttcagtgatggtgattgggaaacattattaaagagtattagggatgcgtcatacacaactcagcctcttgaactgctcaattcattaggattccataaatcaaacaaccagcagttactttcaagagaagaaagcaatgcacatggcaatagttaccatggcagccggggggaaccctccatcgttaataatggtgagcatagtcatgcagaggcaggtccacaaactagcctggagaattcggaaggtttaccgtcaccatcagggagaacacaacctgctgtttccccacgtggccaaagctttggacaaagaattatgggcaatatgatggataatcttttggttagaagtcttacatccaaatcaaaaggtcgagtcgatgatattgctccaccctcacctgtgaaggcccctgatgatgatgagacagacaaggctgaaggggaagagagccctatgatggaaactgtccggagcaaatgtatcacacagttgctgctgctcggggcaattgacagcatacagaagaggtattggagcaggttaaaagctacacaacagatagcaataatggatatcttgctctcactgctagaatttgcttcttcgtataactcaccttcaaattttcggacgagaatgcaccatatacctctagaaagacctccactgaatcttctccgtcaagaactagttggaacaacaatttatttagatatccttcataagtcaacagtggagcaggacaaaattgactccattgaggaaacaaatggtttaaatgtggaatctggtgaccaggaaaagatcaagtacctagcagaagggaagctggtttctttttgtgggcagattttgaaagaggcgtctgttctccagcctagcactggggaggctgccagtgcagacatacatcgtgtattagacttacgggcacctgttattgtaaaggttttgaaaggaatgtgcatcatggatgctcagatcttcagaaggcacctgaaagagttctatccattaattaccaaacttatctgttgtgatcagatggatgttcgtggagcccttggtgatctctttagcaaacagcttactccactcatgccctgaagtctggcagtatttcctcccttgcatagatcttgttggaacatattcttcgtcagcatttttgtgcaaacatggagcaccggttgggtgcttgacatccttaacgcgctttctggtgcaacagctactccctaggaacttaagagcttgatcagcgggaacggcaggtccctaggccacatcttttttttttggatgacgcaagggaagtagcttgactgatgcgcacaccgtgtttttcctagcaggcttgtactttggagctatttatctgtgcccggacagggatgatgcttccattatacagtagagtagtgttggtaatatgtacacattgttgagaacgttgtacttgaggcctgttgttattatacggcaatagtagattgtttgcggcaagcctcgttttttgtgcgtctaattctctgacttgcagaattgcggtggcaaatacccattgccctccaagttgtgcgttagcgtatttatccgtagttgacagcaatgaacatattactactgctttctgtattttctattaacgcatgcacatagtttattgggtttccatattttcaatc

SEQ ID NO: 27174 - DNA, 6264 bp, Zea Mays
gccatggtacgtgcctgcgtaaaagaaaaattcagagatggtcctcgactcctggtgggtggtggcgatctcccagctgaactgaaagagcaagcgtgcgtgtgagacaaccaggtccgatccgcccccgccgagccgaggacagcagcgggggctctcggtctcctcctaggctcctacagatctcgtaccccgtcacagatctcgcgccctctccatcccatgcccaccccccctcgtcggatctgaccactccgcccctcctcccgtctccgccgccggagctgatatccgcggtcatggcgggcgccgcgggcgggttcgtcacgcgggccttcgaggccatgctcaaggagtgcgctgccaaccgcggcaagttcgccgcgctgcagcaatccatccagtcatacctcgatagtatcaagggggctacagcagagggcgcggtcatcaccgaggcgctcgggtcagctgggcgcgtgctcgacgggccgcaggccgagctggtgctgcagccgctccgcctcgccgtcgagaccaagcacgtcaagctcgtcgagcccgcgctcgactgcctccacaaacttattgcttatgaccatttagaaggcgatcctggtttagaaggtggtaaaaattccccaatatttacagacatcctgaacatggtatgtggttgcgtcgataacacctcctctgacagtactgttctccaagtcttgaaagtgcttcttaatgctgttgcttcaaataagtttagagttcatggagagccattgcttggggtcattagagtatgctataacattgctcttaataggtacctgttatatcgctaccttcttgtttgcagtatgttgccttgttgccctttggaccatgtatgataatttattcatttgtattttcttagcaagagccctgtgaaccaggctacctcaaaggctatgttaacccagatgatcagcattgtattcaggagaatggaatctgagcaggtttctgtatcgcccggaagctctgtggttaaagatatgccttcatctatcacaaatgattctgaaaatggagaaatatctactgatggccaagatgaggaaaaggttactctgggagatgcattgtccatgaatcggccttctgaagctcctccaacgtctgttgaagagcttcagaatcttgcaggtggagcagatattaaggggctggaagctgttctagataaggctgttgaacttgaagacgggaaaaaagtgtcacgtggaattgacctggacactgtgaatataatacagcgtgatgcactattgctctttcgaactctctgcaagatgagcatgaaagaagaaagtgatgaggttgctaccaagacaaggctgctatcacttgaactgctccagggattgctagagggagtcagcaatgtgttcatcaaaaattttcacttcattgattcagtcaaagcatatctttcgtatgctcttctgcgagcatctgtctcttcatctccagttgtttttcagtatgcttgtggtatgttttcagttctgttgctccggtttagagagagtctgaagggggaaattggtgtcttctttcctttgatagttttaaggtctctggatagctctgatagccccctcagccagaaggctagtgttcttaggatgttggagaaagtttgcaaagatccccaaatgcttgcagatgtgtttgtgaactatgactgtgatcttgaggggccaaatctttttgaacgcacggttagtgcgctatcaagaatagcacaaggatctcaaattgctgatactaactccatcgtgtcatcccaaacagtttctgtaaaaagctcctctctccagtgtttggtgattattctgaagtcattggctgattgggagcaacttcgaagagattcctcaaagcaagggagcattgttgaatctcatgaagaggatgcttcaaggagattgacaactgatgagatgaagaaccaagaggatggtcggaatcagtttgagagagccaaagctcataagtcgacaatggaggctgcaatctctgagtttaatcgtaaaccaagtaaagggattgaatatttgttgtcaaataaattggtagaaaataaggcatcatctgtagctcagtttctcaagagcaatcccagcttggataaggttatgattggtgaatacttgggacagcatgaggagttccctcttgctgtgatgcattcctatgttgactccatgaagtttatagggttgaaatttgatgctgcaattcgtgcgttcctgaaaggatttcgccttcctggtgaggcgcagaagatagatcgcataatggaaaagtttgctgagcggtactgtgctgataatcctgagcttttcaaaaatgcagatactgcttatgttcttgcttatgctgttataatgttgaatactgatgcacataatccaatggtgtggcctaagatgtcaaaatcagattttgttcgtatgaacactgcaagtgatgcagaagaatgtgtcccaaatgagctcttggaagaaatttatgattccattgtcaaggaagagataaagatgaaagacgattctcatgatacttcaaaatccaccaagagacctgaaacagaagaaagaggccgtcttgtcaatattctcaatttagcccttccaagactgaagtcagctagtgatacaaaggcagagagtgaaaagatcatcaaacagacccaggcacttttcaagaaccagggacagaagaaaggtgtttttcatgttgcgcagcaggttgagcttgttagaccaatgcttgaagctgtaggatggcctttgcttgcaacattttctgtgaccatggaggaaggtgacagtaagcctagggttgtatcatgcatggaaggatttcgtgctggtatccatcttactcgtgttcttggaatggacaccatgcgctatgctttcttgacgtccttagtgcggtttacatttttgcacgctcccaaggagatgcgcagtaaaaatgttgaggcactgaggactcttcttggtttagctgacactgatatggatgctttacaagatacttggaatgctgttttagaatgtgtctcaagactcgagtatatcacttcgaacccttcaatttctgcaactgtaatgctgggatcaaatcaaatatcgagggattctgtagtccaatcgctgaaagagttggctggaaagcctgctgaacaaatctttgtaaacagtgtaaaactgccaagtgattcaattgttgaattcttcaccgccctatgtggtgtttctgctgaagaactaaaacaaacacctgctcgtgtctttagcttgcagaagcttgtagagataagctattataacatggctcgcattcggctggtgtgggctagaatatggtctgtgttggcccagcactttattgctgctggaagccacaatgaggagaaagttgcaatgtatgccattgattcactaagacagcttggtatgaagtacttggagcgtgctgaattaaacaatttcacatttcagagtgacatactgaaaccttttgtcattttaatgaggaatacccacaactcaaaaatccgaggtttaattgttgattgcattgttcagttgatcaagtcaaaagttggtagcataaagtcagggtggcgttgcgtattcatgatatttactgcagcagctgatgatgaggatgaatcaattgttgagagtgcttttgaaaatgtagaacaagttatcttggaacattttgaccaagttgttggtgattgcttcatggattgcgtcaactgtcttattggttttgcaaataacaagtgcactcctcggattagtttgaaggctattgctctcctgcgtatatgtgaagatcgtttggcagagggattcattccaggcggcgctattaaacctattgatgttgttccagaggccaattttgatgtgactgagcattattggtttcctatgctagctggtttgtctgatttgactttagactccagaccagaagtcagacactgtgcactggaagtgttgtttgatttgttgaatgaaagaggacataagttctcttctcccttctgggagagtatttttcatcgtgtactatttccaatttttgatcatgtaaggcatgctggaagggatgggctttcttcttctggggatgattggcttcgtgatactagcattcattcgctgcagttaatctgcaaccttttcaatacattctataagtttgctgcttgaatgtgcgaaaaaaacagaccaaactgtcgtttcaatttctcttggcgctttagttcatctgattgaagttggtggtcaccagttcagtgatggtgattgggaaacattattaaagagtattagggatgcgtcatacacaactcagcctcttgaactgctcaattcattaggattccataaatcaaacaaccagcagttactttcaagagaagaaagcaatgcacatggcaatagttaccatggcagccggggggaaccctccatcgttaataatggtgagcatagtcatgcagaggcaggtccacaaactagcctggagaattcggaaggtttaccgtcaccatcagggagaacacaacctgctgtttccccacgtggccaaagctttggacaaagaattatgggcaatatgatggataatcttttggttagaagtcttacatccaaatcaaaaggtcgagtcgatgatattgctccaccctcacctgtgaaggcccctgatgatgatgagacagacaaggctgaaggggaagagagccctatgatggaaactgtccggagcaaatgtatcacacagttgctgctgctcggggcaattgacagcatacaggtaagcagtttcctccactttatatgcatgctcttagatctgagtccatccattgtttctctgacaatgtggactggaagcacctttgtctgtgatacaattgaggacttctagttgcaaataaggaattcatcaccctaatatattagccagccctacttgggttgatatactgtgattaactattgatgaaacatttcagaagaggtattggagcaggttaaaagctacacaacagatagcaataatggatatcttgctctcactgctagaatttgcttcttcgtataactcaccttcaaattttcggacgagaatgcaccatatacctctagaaagacctccactgaatcttctccgtcaagaactagttggaacaacaatttatttagatatccttcataagtcaacagtggagcaggacaaaattgactccattgaggaaacaaatggtttaaatgtggaatctggtgaccaggaaaagatcaagtacctagcagaagggaagctggtttctttttgtgggcagattttgaaagaggcgtctgttctccagcctagcactggggaggctgccagtgcagacatacatcgtgtattagacttacgggcacctgttattgtaaaggttttgaaaggaatgtgcatcatggatgctcagatcttcagaaggcacctgaaagagttctatccattaattaccaaacttatctgttgtgatcagatggatgttcgtggagcccttggtgatctctttagcaaacagcttactccactcatgccctgaagtctggcagtatttcctcccttgcatagatcttgttggaacatattcttcgtcagcatttttgtgcaaacatggagcaccggttgggtgcttgacatccttaacgcgctttctggtgcaacagctactccctaggaacttaagagcttgatcagcgggaacggcaggtccctaggccacatcttttttttttggatgacgcaagggaagtagcttgactgatgcgcacaccgtgtttttcctagcaggcttgtactttggagctatttatctgtgcccggacagggatgatgcttccattatacagtagagtagtgttggtaatatgtacacattgttgagaacgttgtacttgaggcctgttgttattatacggcaatagtagattgtttgcggcaagcctcgttttttgtgcgtctaattctctgacttgcagaattgcggtggcaaatacccattgccctccaagttgtgcgttagcgtatttatccgtagttgacagcaatgaacatattactactgctttctgtattttctattaacgcatgcacatagtttattgggtttccatattttcaatc

SEQ ID NO: 27175 - DNA, 516 bp, Zea Mays
gtgatcttgaggggccaaatctttttgaacgcacggttagtgcgctatcaagaatagcacaaggatctcaaattgctgatactaactccatcgtgtcatcccaaacagtttctgtaaaaagctcctctctccagtgtttggtgattattctgaagtcattggctgattgggagcaacttcgaagagattcctcaaagcaagggagcattgttgaatctcatgaagaggatgcttcaaggagattgacaactgatgagatgaagaaccaagaggatggtcggaatcagtttgagagagccaaagctcataagtcgacaatggaggctgcaatctctgaggttatgattggtgaatacttgggacagcatgaggagttccctcttgctgtgatgcattcctatgttgactccatgaagtttatagggttgaaatttgatgctgcaattcgtgcgttcctgaaaggatttcgccttcctggtgaggcgcagaagatagatcgcataatggaaaagtttg

SEQ ID NO: 27176 - DNA, 1815 bp, Zea Mays
cttgcatgcctgaggttcatgaagcgtcagacgtgttgcattgacgtcgaacaccttgatggaaacttattgcttatgaccatttagaaggcgatcctggtttagaaggtggtaaaaattccccaatatttacagacatcctgaacatggtatgtggttgcgtcgataacacctcctctgacagtactgttctccaagtcttgaaagtgcttcttaatgctgttgcttcaaataagtttagagttcatggagagccattgcttggggtcattagagtatgctataacattgctcttaataggtacctgttatatcgctaccttcttgtttgcagtatgttgccttgttgccctttggaccatgtatgataatttattcatttgtattttcttagcaagagccctgtgaaccaggctacctcaaaggctatgttaacccagatgatcagcattgtattcaggagaatggaatctgagcaggtttctgtatcgcccggaagctctgtggttaaagatatgccttcatctatcacaaatgattctgaaaatggagaaatatctactgatggccaagatgaggaaaaggttactctgggagatgcattgtccatgaatcggccttctgaagctcctccaacgtctgttgaagagcttcagaatcttgcaggtggagcagatattaaggggctggaagctgttctagataaggctgttgaacttgaagacgggaaaaaagtgtcacgtggaattgacctggacactgtgaatataatacagcgtgatgcactattgctctttcgaactctctgcaagatgagcatgaaagaagaaagtgatgaggttgctaccaagacaaggctgctatcacttgaactgctccagggattgctagagggagtcagcaatgtgttcatcaaaaattttcacttcattgattcagtcaaagcatatctttcgtatgctcttctgcgagcatctgtctcttcatctccagttgtttttcagtatgcttgtggtatgttttcagttctgttgctccggtttagagagagtctgaagggggaaattggtgtcttctttcctttgatagttttaaggtctctggatagctctgatagccccctcagccagaaggctagtgttcttaggatgttggagaaagtttgcaaagatccccaaatgcttgcagatgtgtttgtgaactatgactgtgatcttgaggggccaaatctttttgaacgcacggttagtgcgctatcaagaatagcacaaggatctcaaattgctgatactaactccatcgtgtcatcccaaacagtttctgtaaaaagctcctctctccagtcattggctgattgggagcaacttcgaagagattcctcaaagcaagggagcattgttgaatctcatgaagaggatgcttcaaggagattgacaactgatgagatgaagaaccaagaggatggtcggaatcagtttgagagagccaaagctcataagtcgacaatggaggctgcaatctctgagtttaatcgtaaaccaagtaaagggattgaatatttgttgtcaaataaattggtagaaaataaggcatcatctgtagctcagtttctcaagagcaatcccagcttggataaggttatgattggtgaatacttgggacagcatgaggagttccctcttgctgtgatgcattcctatgttgactccatgaagtttatagggttgaaatttgatgctgcaattcgtgcgttcctgaaaggatttcgccttcctggtgaggcgcagaagatagatcgcataatggaaaagtttg

SEQ ID NO: 27177 - DNA, 649 bp, Zea Mays
ccaggatcgagtgttaactggtggagatgcctgtttaccccagaggcgtgtcagttctgatgccagggcaagacgtgccaacgttcatcgcgcatcctgcccctgcaccgtgccccccagagaggatccggtggccgtcacaccagccgcctcctttcactggctcctcgccaaaccctagctagtgctgatgtagcacacacccagcacactgagaacgctggctgttgtcagccagtcaaccatcaatgtcttgtctgtagaggaggcgaggagcagccgtgcgctttgcgggcgtgttggtgttgccgatgaatcgatgatccactccgtctccggggcatgacagccaggacaggcgggctctctctcctctttgtgactctgtatctgtacaggtttaggtcttgttctgaagcattgcaaccttgtactgctgccccctgctgcgttgtggctggcgagcggcggctggtggatccgtcgtggagttgttgctgctgatccctgttgatgtgtgtcagtagatgcctgatggagcatgtaaactacttgtaaactcgcttggcaaatgtggtttgatttcaggaagtcttttcgtctggttctgttctgtctgatgtgggtttgggttttccaatgcctgccg

SEQ ID NO: 27178 - DNA, 1401 bp, Zea Mays
ggtgcctggccacccttccctcttcgcacgcagtcgcagactcgcagccccccttctgatcctcttcctctaccacgcggccacgcccccgccccccgctgactcacgcaacgcgcgcgacgacgcggaggagaaaaccaggaatcccataaaggtttcagttccgcaagccaagccactcccacacccccacgctcgagcgaagggaaccagcaatggcgcgtcgcgggccgtgagagacgggaacaagaatggctgccatggtgcgcgggcccgcgatggcctctgcggctgggccgggtgcgacgtcgtcggctgctgcggccgcggccgcggcggcggaggagatgcggtggcggcagctagacagcggcgtgagcgcggtgtcgttcgggttcgtggccaccgccatactcgtgtccatgttcctcgccatggccatcctcgagcacttcctccgccccccgacgacggcccacgcgccgccccggggccggggtgtcctccgccgcctccgcctcttcctcctcggccgcagtggcggcgcccccggcgggacggatctcgaggcggcgaggaagctccacggtcacgcgcccctcgagaagaaccttcatagttctctacatcgcgaacgagccacaaaagattggggcctagaatccaccagaaaggagaacacaagttatggagttgctgagaaggaaattcggcggacagcagcaaacagacaagggcccatccttgtctgcagccacaccgaaatttggtcccgtagtttaggaattgcaagcctggttgtacacaggaccacagctacacaaggccccagtgcagtcatcattttagctgcttgaaagttgttagtaatgtggagcagtcttgttattaaggtggatcagcagttcaacgtaattactgttggagcaatgcgttaggctatgtccagcaggtcgttcatctggctgtgtaaaaatactgttttgtactgtagactatactgtagagcgagaaatttgaaacgagagatggaggatagccttagaacatggagataaaggaaacatttactcacagtgacgggagaggtgcaccataccacaaatataaattacattcttaaaaaaaattaaattaggacggtttcaatccaactactgaaacatcggtttcagtttacagtggaagctggatagcacaaagatccattctccctattctctgtttcaagtcaattgcattgctgtgcggagttcagacaatgtaaaagtatgcgctacggagtacacgtgatagctcgtatgaaaattttgtagtaacagcttgctagcaccatcttgtgttataatattccagtggtggaaaagaacgttaatgcccagtttggatcattggaattga

SEQ ID NO: 27179 - DNA, 3969 bp, Zea Mays
acggcagtcgtcacaccacgaaagcagcagcaaagtcatcagcaacccacgatcggtcgatcgatcgggtacctgctagcgaattcgatcggtcgggtacctgctgctagcgatatatagcagcagcagcagccagcagatcgtcgccggcacgatggccagctcgtcgtcgtcgtcgtcagctctggtcgtcctcgtggtggttctagccgcggcggtggcgtgctccgcgacgcgccccgtccccgcgcggcagcgggcggcggcggcggaggaggaggacgtgaggcggccggacacgctgcacgagggcacggtgctgatcccggggatggggcgctacgagatcggcagccactacatcccggacatcggcgggctggaccacagcgtccccgccgccacccacgggcagttcatccccggcgccgacgacacctgggtgcccaaccccggcttcgaggtccccaaccccttccgccccggcgcggccactccatgaacacgtacgagtacgaccccgcaacgccgcgctgaataccgtctcgcgccgcgctgaataacgctacactagctacgtactagtcgcctagtcggtcggcttgccgtgcttgtgcttggctgctgaatgcaagcatgtcctttgttgtgtggtttaatttgtcccacgtacgtctgtgcagtgtttttgcagtttgtgctccagtgaagaagtgtgcacgcgcgatgcgtagaaagcgcatcagaactttgcatggcccggttggtagcagctgcttgtttctcggtcactactgttacaaataaaatttgctggactggacacatagctatcatcatctatcgctgtgtcaactgtgcattgccatacttctcttctctaacgtgacgtgaagcactgcggcggtggaccaaaaccatgctgggtagcatcagcacgcacgaagttcagggggttgaagatgaataaagggcgagcttaggccccatggccggaggagatcgggtcagatacgagaggtagatgtgcctgccgagtgccgacccacaggaccacctgtagggcgagccaaaaaaaaaaggtgcgcgccactgcgggtatggcgttgtcctacaccgtccgggtaattaccaccaacgctggcatttttgtccagagcatgtttatggaaatgatgtagcttgtactacctctacatgtttgattatacccactctgtttttttatttgctgtagtttaatttaaaaattaataagcagacgacaaatattcgagaacggatgttaccatgactgggtcgatactaaaatgtacctccttcgttcctaaataaactaactcctaaagctatctaaaataatatctaaaataacttcaacaaaaaatttgattgttgaaccgaatttatagagaaacaatatttatgacactgaatgatcatattgttaaaaatacattatgatgtgtccaatgctactaatttagtcccataaacctcgacgctcttttctataaacttaaaacttaaatttttttatgatttaaaataactctaggtattgatttattcagaatgtgagaaaataagaacatttagttctatatctattcgtaattttttttgtaaacacatggatagatttgggatgctacaggaccgttatggcatgtacagtgagtgttttaagttgtgtcttagagtatgtctagggggtaaatgtaaaaagactcaagacatgtatcttgacgaagacacagtgtcttagctctatgttcgagacagtagattatttgattgatcactttaatttattgaatgctctgatttgtataatgaatatgataagacatatgttttagacatgaccattatattatgttgtgttttagttatgtcttatatttggagtaccgtgcaacagtgtctaggttttacatgcccttagcacctgcctgcgcttactagttattgttccccgcgtgtgccaactatgaaggaagtagcataccacgtgaattttgcattgcaccggcgcggggacgagccggtggatctgcggcacaagagccgtcccaccaaggcaccaacccgaaacgaatccagtgatttcccctcccgcatcgaaacgtcccccaagcagccctgcccggctgcccctgccgcgacgcaactggcaagcatccagcatagcagcgactcccccgctcgccggccagcggccaccagttccctttacatccacacacaacgcgcaccacaccacaccacccgacgccaacgtccgggaccaaactccgatccccaccactatgccggcggacggggaggcgctggcgccggccgttcacttctggggcgagcacccggccacggaggcggagttctactcggcgcacggcacggagggcgagtcctcctacttcaccacgcccgacgcgggcgcccggcggctcttcacgcgcgcgtggaggccccgcgcgcccgagcggcccagggcgctcgtgttcatggtccacggctacggcaacgacatcagctggacgttccagtccacggcggtcttcctcgcgcggtccgggttcgcctgcttcgcggccgacctcccgggccacggccgctcccacggcctccgcgccttcgtgcccgacctcgacgccgccgtcgctgacctcctcgccttcttccgcgccgtcagggcgagggaggagcacgcgggcctgccctgcttcctgttcggggagtccatgggcggggccatctgcctgctcatccacctccgcacacggccggaggagtgggcgggggcggtcctcgtcgctcccatgtgcaggatctccgaccggatccgcccgccgtggccgctgccggagattctcaccttcgtcgcgcgcttcgcgcccacggcggccatcgtgcccaccgccgacctcatcgagaagtccgtcaaggtgcccgccaagcgcatcgttgcagcgcgcaaccctgtgcgctacaacggccgtcccaggctcggcaccgtcgtcgagctgttgcgtgccaccgacgagctggccaagcgcctcggcgaagtcagcatcccgttccttgtcgtgcacggcagcaccgacgaggttaccgacccggaagtcagccgcgccctgtacgccgccgccgccagcaaggataagactatcaagatatacgacgggatgctccactccttgctatttggggaaccggacgagaacatcgagcgtgtccgtggggacatcctggcctggctcaatgagagatgcacagcccaggcaactcaccgtaacatacctgtcgaataagcattcggatgcatggatacacaagaaaaatgtttcatgtacaacgattgttatatatgctatactcagtatttgactgtaaactgttcggtcaggtttagtggcttggatatacaaaatgttggttgcctcatcagtgtaaaagaatgctgcaaatgcttgggatcgataatatcagctctcttcgggggctatggatggcaatacaaggcgttctctgccctgtacaagcttggcagaccgaattttatctccggccttaatctgtgacagaacatctctcccatcagtggtatacctgcaattgtttggatatactcataaaatttcttacagcgtcattattaacaatggaatatatcaattttgctactcaatgatcacataatgaaaccagtcaccacttacccgaaaactgaaaattgcccctcgtcgaacgatattcctcctaagccagactacatcaaagaaagagaaacatattaactcccattctatacacactgtttggttgaaagcctgccagacaattgactgccaggtacacaatctcaaccccaggcgatcaaaatccaacacctgggggtaatgcctggctcaggcagctgtccggtgatgcaaaccaaacaagcccttcatgcttctaaagatt

SEQ ID NO: 27180 - DNA, 4369 bp, Zea Mays
ggatcatccgactccggtccgatcgacccagctcgagctagcgcacgtacggccatcgcacgccgctggcaaagtgtggcaacgtgacgaacgcatgcatggcggccggccggccggcacgaattaaacgcaccgccttttcccgcctcggccgcccgctcgacgacgcctccaccgatcgtcctcctgctcgggcctatatatgtaagcccgggcgcggcgtcacccggcacggcagtcgtcacaccacgaaagcagcagcaaagtcatcagcaacccacgatcggtcgatcgatcgggtacctgctagcgaattcgatcggtcgggtacctgctgctagcgatatatagcagcagcagcagccagcagatcgtcgccggcacgatggccagctcgtcgtcgtcgtcgtcagctctggtcgtcctcgtggtggttctagccgcggcggtggcgtgctccgcgacgcgccccgtccccgcgcggcagcgggcggcggcggcggaggaggaggacgtgaggcggccggacacgctgcacgagggcacggtgctgatcccggggatggggcgctacgagatcggcagccactacatcccggacatcggcgggctggaccacagcgtccccgccgccacccacgggcagttcatccccggcgccgacgacacctgggtgcccaaccccggcttcgaggtccccaaccccttccgccccggcgcggccactccatgaacactgtttttgcagtttgtgctccagtgaagaagtgtgcacgcgcgatgcgtagaaagcgcatcagaactttgcatggcccggttggtagcagctgcttgtttctcggtcactactgttacaaataaaatttgctggactggacacatagctatcatcatctatcgctgtgtcaactgtgcattgccatacttctcttctctaacgtgacgtgaagcactgcggcggtggaccaaaaccatgctgggtagcatcagcacgcacgaagttcaggtaagcagcaccgtactcctgttagattgaagatactccacacattgctgcaggaaattacaatattttttaaataaaatttaagtagagatatgacatggatatcccatgctaagagattaaaatttagtgatataatgtagctaatagtaattaagagatgatgtagctgtagatagatagtgtaaaatgaaaacgaatattttaattttcatatcgatcgagatagaaagaacctcgagtgtattttaggggcaaagtacccgcacctgtactgatctccgtccggttctgcccttctggtgacctttattcttgttcagctttaatttctttgcgtgaaaagggggttgaagatgaataaagggcgagcttaggccccatggccggaggagatcgggtcagatacgagaggtagatgtgcctgccgagtgccgacccacaggaccacctgtagggcgagccaaaaaaaaaaggtgcgcgccactgcgggtatggcgttgtcctacaccgtccgggtaattaccaccaacgctggcatttttgtccagagcatgtttatggaaatgatgtagcttgtactacctctacatgtttgattatacccactctgtttttttatttgctgtagtttaatttaaaaattaataagcagacgacaaatattcgagaacggatgttaccatgactgggtcgatactaaaatgtacctccttcgttcctaaataaactaactcctaaagctatctaaaataatatctaaaataacttcaacaaaaaatttgattgttgaaccgaatttatagagaaacaatatttatgacactgaatgatcatattgttaaaaatacattatgatgtgtccaatgctactaatttagtcccataaacctcgacgctcttttctataaacttaaaacttaaatttttttatgatttaaaataactctaggtattgatttattcagaatgtgagaaaataagaacatttagttctatatctattcgtaattttttttgtaaacacatggatagatttgggatgctacaggaccgttatggcatgtacagtgagtgttttaagttgtgtcttagagtatgtctagggggtaaatgtaaaaagactcaagacatgtatcttgacgaagacacagtgtcttagctctatgttcgagacagtagattatttgattgatcactttaatttattgaatgctctgatttgtataatgaatatgataagacatatgttttagacatgaccattatattatgttgtgttttagttatgtcttatatttggagtaccgtgcaacagtgtctaggttttacatgcccttagcacctgcctgcgcttactagttattgttccccgcgtgtgccaactatgaaggaagtagcataccacgtgaattttgcattgcaccggcgcggggacgagccggtggatctgcggcacaagagccgtcccaccaaggcaccaacccgaaacgaatccagtgatttcccctcccgcatcgaaacgtcccccaagcagccctgcccggctgcccctgccgcgacgcaactggcaagcatccagcatagcagcgactcccccgctcgccggccagcggccaccagttccctttacatccacacacaacgcgcaccacaccacaccacccgacgccaacgtccgggaccaaactccgatccccaccactatgccggcggacggggaggcgctggcgccggccgttcacttctggggcgagcacccggccacggaggcggagttctactcggcgcacggcacggagggcgagtcctcctacttcaccacgcccgacgcgggcgcccggcggctcttcacgcgcgcgtggaggccccgcgcgcccgagcggcccagggcgctcgtgttcatggtccacggctacggcaacgacatcagctggacgttccagtccacggcggtcttcctcgcgcggtccgggttcgcctgcttcgcggccgacctcccgggccacggccgctcccacggcctccgcgccttcgtgcccgacctcgacgccgccgtcgctgacctcctcgccttcttccgcgccgtcagggcgagggaggagcacgcgggcctgccctgcttcctgttcggggagtccatgggcggggccatctgcctgctcatccacctccgcacacggccggaggagtgggcgggggcggtcctcgtcgctcccatgtgcaggatctccgaccggatccgcccgccgtggccgctgccggagattctcaccttcgtcgcgcgcttcgcgcccacggcggccatcgtgcccaccgccgacctcatcgagaagtccgtcaaggtgcccgccaagcgcatcgttgcagcgcgcaaccctgtgcgctacaacggccgtcccaggctcggcaccgtcgtcgagctgttgcgtgccaccgacgagctggccaagcgcctcggcgaagtcagcatcccgttccttgtcgtgcacggcagcaccgacgaggttaccgacccggaagtcagccgcgccctgtacgccgccgccgccagcaaggataagactatcaagatatacgacgggatgctccactccttgctatttggggaaccggacgagaacatcgagcgtgtccgtggggacatcctggcctggctcaatgagagatgcacagcccaggcaactcaccgtaacatacctgtcgaataagcattcggatgcatggatacacaagaaaaatgtttcatgtacaacgattgttatatatgctatactcagtatttgactgtaaactgttcggtcaggtttagtggcttggatatacaaaatgttggttgcctcatcagtgtaaaagaatgctgcaaatgcttgggatcgataatatcagctctcttcgggggctatggatggcaatacaaggcgttctctgccctgtacaagcttggcagaccgaattttatctccggccttaatctgtgacagaacatctctcccatcagtggtatacctgcaattgtttggatatactcataaaatttcttacagcgtcattattaacaatggaatatatcaattttgctactcaatgatcacataatgaaaccagtcaccacttacccgaaaactgaaaattgcccctcgtcgaacgatattcctcctaagccagactacatcaaagaaagagaaacatattaactcccattctatacacactgtttggttgaaagcctgccagacaattgactgccaggtacacaatctcaaccccaggcgatcaaaatccaacacctgggggtaatgcctggctcaggcagctgtccggtgatgcaaaccaaacaagcccttcatgcttctaaagatt

SEQ ID NO: 27181 - DNA, 2128 bp, Zea Mays
ctcccacgcccgccgtccccgagagccgcttcttctttctccgtgactcggagctgtctacctcaccctcactgcctctgcgtgcgtgcgtcactgccgggacgcgccttgacttctcacgtcgtgtcgtgtgtgagcgccgcagcggtgctgctgatctgcgattcctccacgccacaccctacctgaccacccgacagggaatcctactccctcttgcgcgccgcggcggcggcgccggcatcttcggtctccgtgcgggtgtttccgttcggcgtttactggccgggcgagcgcggcattggaggagtcgggaggagggagaccggaggcgtgatcgatggggaactgcgtggcgagcgggggcgcgacgacggtcacggcggcgggggaggacgggaggcggcgggggaggaggtggaaggcgccgcgggaggagcagctcggctcggtccccggccggatcttctccaacgacggccgcagccgcaccgccgccgtgttcacgcagcagggccggaagggggtcaatcaggacgggcacggcccgcatggccacctggtggcgcgcagggtccgcgacgcgctgccgctgaagctcatggccgcggtgcgcgagtccaagcccggcttggacatggccgccgccgcgtggaggaaggcctttgcgcgcgcctacaaggccatggacaaagatcttcgctcccacgccaccctagactgcttctgcagtggcagcaccgccgtcaccgtcctcaagctcggctcggatctctacatggccaacattggtgactcgcgcgccgtgctaggctcaagggacggcggcggcatggtggccgtgcaactgactgtcgacctcaaaccagatgttcccagcgaggcagaacggatcaagaagtgcaggggcagggtatttgctctgcaggacgaaccggaggtgcctcgggtctggctgccgttcgacgacgcccctggcctggcgatggcccgggcgtttggggacttctgcctcaaggattatggtgtcatttcggttccagagttcttccactggtcgctcacggagaaggaccagttcgtcatccttgcatcagatgggataatgattagccagcttaacaccattctccgttgcaccgtcaccacctgtgacctgttgttatctgctgtcctccagctgttaaatcttttccgtgttcaacttgagagggcaaactggtttagtcatttgtgaactgtgatgagatcaggtgtgggatgtccttagcaaccaggaggccgttgacatcgtgtcgtcatccccaagccgatcaaaggccgcgatatccctggtcgaggccgccgctcgtgaatggaaagccaagtacccgacatcgaagaccgacgactgcgcggtggtctgcctatacttggatggcaagatggaccaggaacgcgactcgacggcgtccatggacaacatcagcctggactacgaaggctcagccgcggacccgaacgaagcgcaggagctgcaggagccggcgctgacccgcaacttcacggtcaggacggtggccggaagtgcccacgagaaggcgctgtcgggggcggcagacgcggccgtcggcggcggcgcagcctgcgcccacgaccagagctggtcgggccttgacggggtgacgcgggtgaactcgctcgtccagctccccaggttctccgaggagaaggcggcggttggctgatgagccgccggctgctgcatgcgattctttggttttggttgttgagttgtttgtttcctcgttttttttttttggaaatctagtttagtagttgccccgttgttgtttgagaggaagggacacggtagaaacagaaatatggtgttgtgatttgcatcggcgcgcgcgtaagctggtgtgtttgagccactgtggtggtggtggttagggtgtgagctgcgtaggcatggcaatttaacccgcgggttcgggtacccgacgggtgcgggcgcgggtgcgttttttcacccacgggtgtgacccgaacccgacccgcaccttttcgggttcgagttcgggtttctcacttcacccacgggtgacccacgggtacccgaaccaaacgtgaacgccaatccaag

SEQ ID NO: 27182 - DNA, 2191 bp, Zea Mays
ctcccacgcccgccgtccccgagagccgcttcttctttctccgtgactcggagctgtctacctcaccctcactgcctctgcgtgcgtgcgtcactgccgggacgcgccttgacttctcacgtcgtgtcgtgtgtgagcgccgcagcggtgctgctgatctgcgattcctccacgccacaccctacctgaccacccgacagggaatcctactccctcttgcgcgccgcggcggcggcgccggcatcttcggtctccgtgcgggtgtttccgttcggcgtttactggccgggcgagcgcggcattggaggagtcgggaggagggagaccggaggcgtgatcgatggggaactgcgtggcgagcgggggcgcgacgacggtcacggcggcgggggaggacgggaggcggcgggggaggaggtggaaggcgccgcgggaggagcagctcggctcggtccccggccggatcttctccaacgacggccgcagccgcaccgccgccgtgttcacgcagcagggccggaagggggtcaatcaggacgccatgctcgtctgggatgggttcggcggggaggaggacgtcgtgctgtgtggggtgttcgacgggcacggcccgcatggccacctggtggcgcgcagggtccgcgacgcgctgccgctgaagctcatggccgcggtgcgcgagtccaagcccggcttggacatggccgccgccgcgtggaggaaggcctttgcgcgcgcctacaaggccatggacaaagatcttcgctcccacgccaccctagactgcttctgcagtggcagcaccgccgtcaccgtcctcaagctcggctcggatctctacatggccaacattggtgactcgcgcgccgtgctaggctcaagggacggcggcggcatggtggccgtgcaactgactgtcgacctcaaaccagatgttcccagcgaggcagaacggatcaagaagtgcaggggcagggtatttgctctgcaggacgaaccggaggtgcctcgggtctggctgccgttcgacgacgcccctggcctggcgatggcccgggcgtttggggacttctgcctcaaggattatggtgtcatttcggttccagagttcttccactggtcgctcacggagaaggaccagttcgtcatccttgcatcagatgggataatgattagccagcttaacaccattctccgttgcaccgtcaccacctgtgacctgttgttatctgctgtcctccagctgttaaatcttttccgtgttcaacttgagagggcaaactggtttagtcatttgtgaactgtgatgagatcaggtgtgggatgtccttagcaaccaggaggccgttgacatcgtgtcgtcatccccaagccgatcaaaggccgcgatatccctggtcgaggccgccgctcgtgaatggaaagccaagtacccgacatcgaagaccgacgactgcgcggtggtctgcctatacttggatggcaagatggaccaggaacgcgactcgacggcgtccatggacaacatcagcctggactacgaaggctcagccgcggacccgaacgaagcgcaggagctgcaggagccggcgctgacccgcaacttcacggtcaggacggtggccggaagtgcccacgagaaggcgctgtcgggggcggcagacgcggccgtcggcggcggcgcagcctgcgcccacgaccagagctggtcgggccttgacggggtgacgcgggtgaactcgctcgtccagctccccaggttctccgaggagaaggcggcggttggctgatgagccgccggctgctgcatgcgattctttggttttggttgttgagttgtttgtttcctcgttttttttttttggaaatctagtttagtagttgccccgttgttgtttgagaggaagggacacggtagaaacagaaatatggtgttgtgatttgcatcggcgcgcgcgtaagctggtgtgtttgagccactgtggtggtggtggttagggtgtgagctgcgtaggcatggcaatttaacccgcgggttcgggtacccgacgggtgcgggcgcgggtgcgttttttcacccacgggtgtgacccgaacccgacccgcaccttttcgggttcgagttcgggtttctcacttcacccacgggtgacccacgggtacccgaaccaaacgtgaacgccaatccaag

SEQ ID NO: 27183 - DNA, 989 bp, Zea Mays
ggcaccttcccactctctcttcccctgcccgcatgcgcctccgtctccggccgaccggccggctctcctccatcgcaacatttcaagggggccgggcgaaagcaccaaaaatcccagcgcagatcactcgaccgccgcctgctccatttggaccctcccaaccgacagcgtaaggctctctgcaacagagccggggttccggttcgacccgacggacgaggagctggtcgtccactacctcaagaagaaggccgccatcatcgcctttacaatgtgcatgccttgaggcaaccttcggtgagcaggaatggtactccagcccgagggaccacaagtactgaagtatcctaatggagcgcggtcgaacagggcgcaacgtctggcaaccgcgagaaggtcggcgtcaagaaggccctcgtgtaataccgcgggaagccgtcaaagggcctcaagaccaactggatcatgcacgagtaccgtctcgcggatgcggcgagctcaacctccagtcggccgccgccttgcaacgtcgtctcggaagcaagaccacatctctccacatctctcagggctagttgggagccacaaaaaacccaatctagcttgagattgcattgcgttggtcaatagaatgtcaggagcccagtcgtcagcgtccggctttaccacctcgttagccggaggtggccgtggtgagcttataagtgagatttcctcttctctcacagcccgggttttgagagcgagtgaatgggctcgcttgtgttaggccacgagcgccgggaaacacccaaaggtgtagcgttgagtgagctaagccaagaaggtcgctgacaattggtatcggcccgaaaaggggataggatgtcaggagcccagtcgtcagcgccccgttttagtaccacctcgttagccggagggggccgtggtgagcttataagcgagattttccctcctctcacagcctgggttttgagagcgagtgaagg

SEQ ID NO: 27184 - DNA, 1453 bp, Zea Mays
atgttgtattcgagagtgaattccacataccctatctcttccagtcttcctacgctcctgtcggcgcgtcctccgcatcccggtgaccggtgtgttctccgatttgaggggcgtccctcgcacgctccggtctgctgctcctccgccctccggagtccattccagcggagcgcgctacggcacagatcggccgccgtccatccctttcccagctctccagagcctccgctgccgcgtccgataactgcataaggccgagctcatgcaaaatggtgctatgccagggcgtatctgttggaaatgctcagttgctagcttttcctggtagatcatcaagccttaagagcacccagtttcttgttaaaacgaatcattttcctgcaagagctctacgtgttggtactgattctattcatcatgccatgcctacatcatccccaagggaaaattctgtcaggggaatcccatcactatcaagacagcacaatcagcatccaaggtccgttagttgtcaggcatcctcactggcatctttcagctaccctgagctgacatccaaacccagatggtggtggagaactctagcttgtgtgccgtacttgctgccactgcacaacatgtggtcttatgctgacgtgatctaccagctgcacacttatttgcaggggttttctctgttgtacaccttcatcgataccatgactctgtgtcctgggtggctctttctggtgatatttatgacagtgtacttcttcgttgtgaggcggaagtggtcgccgcactttctgaggttccatgtgatcctagcaatccttctggacactggctcccaagcagtggccaccatgtgtacatggatgccaagcatcgtttatcaggggaagccaatgcagtacctctggatgtctattgcattcatacagatcttcacagtgctcgagtgtttgcggtgtgctctttgtggaatgtatcctaatgtcccattcatatcccatactgctttcattcactctgatctaaatctgttcagataggtgtttataaggtccgggattcaagaagggtgattttttttgaaatggctacttatcataggaccagctggtacaatagcattcgaacaacactgcgattgatttttgttcctaagatgttattcaatgtacgttgactacctgcaaattttgttttgaggggcactacttgttttatccgaacttggttgagaacttgagatgaagctggaagttgagatgcattaaattgtgcattatatggtgacctgcagctctaagttgagaacttgagatgaagctggaacagaatggaggggttacgaagaaattttgagacttgtactgcctgtgaagtttactctttccatgaggactttgtgaatattttgcctaacaacagtttggtagagtttgggaaagaaacaacagttcattga

SEQ ID NO: 27185 - DNA, 1478 bp, Zea Mays
atgttgtattcgagagtgaattccacataccctatctcttccagtcttcctacgctcctgtcggcgcgtcctccgcatcccggtgaccggtgtgttctccgatttgaggggcgtccctcgcacgctccggtctgctgctcctccgccctccggagtccattccagcggagcgcgctacggcacagatcggccgccgtccatccctttcccagctctccagagcctccgctgccgcgtccggtgagcacgtctcgaccggtttccaataactgcataaggccgagctcatgcaaaatggtgctatgccagggcgtatctgttggaaatgctcagttgctagcttttcctggtagatcatcaagccttaagagcacccagtttcttgttaaaacgaatcattttcctgcaagagctctacgtgttggtactgattctattcatcatgccatgcctacatcatccccaagggaaaattctgtcaggggaatcccatcactatcaagacagcacaatcagcatccaaggtccgttagttgtcaggcatcctcactggcatctttcagctaccctgagctgacatccaaacccagatggtggtggagaactctagcttgtgtgccgtacttgctgccactgcacaacatgtggtcttatgctgacgtgatctaccagctgcacacttatttgcaggggttttctctgttgtacaccttcatcgataccatgactctgtgtcctgggtggctctttctggtgatatttatgacagtgtacttcttcgttgtgaggcggaagtggtcgccgcactttctgaggttccatgtgatcctagcaatccttctggacactggctcccaagcagtggccaccatgtgtacatggatgccaagcatcgtttatcaggggaagccaatgcagtacctctggatgtctattgcattcatacagatcttcacagtgctcgagtgtttgcggtgtgctctttgtggaatgtatcctaatgtcccattcatatcccatactgctttcattcactctgatctaaatctgttcagataggtgtttataaggtccgggattcaagaagggtgattttttttgaaatggctacttatcataggaccagctggtacaatagcattcgaacaacactgcgattgatttttgttcctaagatgttattcaatgtacgttgactacctgcaaattttgttttgaggggcactacttgttttatccgaacttggttgagaacttgagatgaagctggaagttgagatgcattaaattgtgcattatatggtgacctgcagctctaagttgagaacttgagatgaagctggaacagaatggaggggttacgaagaaattttgagacttgtactgcctgtgaagtttactctttccatgaggactttgtgaatattttgcctaacaacagtttggtagagtttgggaaagaaacaacagttcattga

SEQ ID NO: 27186 - DNA, 1757 bp, Zea Mays
atgttgtattcgagagtgaattccacataccctatctcttccagtcttcctacgctcctgtcggcgcgtcctccgcatcccggtgaccggtgtgttctccgatttgaggggcgtccctcgcacgctccggtctgctgctcctccgccctccggagtccattccagcggagcgcgctacggcacagatcggccgccgtccatccctttcccagctctccagagcctccgctgccgcgtccggtgagcacgtctcgaccggtttccaggtccatggcttcagctattagctctgagcggtttggtgtccaacagttccaatatgcttgtcgaactgatgaactaagactagtctctggtggtttcacgagaggattatgggcattaaatatgttgatgtggcatattattaacgaagagagataaggtaaaaagttttatcgaatgaaatgagttccacgggcgatgaaacttatgtgcactgtttctaacatatcggagtcttgggaacattgacataaaatccccactgaaactggcctaataaataagctaatctgtgttgggtttgcgtcctgtactgctacatgatttcagtgccagactaaatactcagttcgattacttgtatgtgcagataactgcataaggccgagctcatgcaaaatggtgctatgccagggcgtatctgttggaaatgctcagttgctagcttttcctggtagatcatcaagccttaagagcacccagtttcttgttaaaacgaatcattttcctgcaagagctctacgtgttggtactgattctattcatcatgccatgcctacatcatccccaagggaaaattctgtcaggggaatcccatcactatcaagacagcacaatcagcatccaaggtccgttagttgtcaggcatcctcactggcatctttcagctaccctgagctgacatccaaacccagatggtggtggagaactctagcttgtgtgccgtacttgctgccactgcacaacatgtggtcttatgctgacgtgatctaccagctgcacacttatttgcaggggttttctctgttgtacaccttcatcgataccatgactctgtgtcctgggtggctctttctggtgatatttatgacagtgtacttcttcgttgtgaggcggaagtggtcgccgcactttctgaggttccatgtgatcctagcaatccttctggacactggctcccaagcagtggccaccatgtgtacatggatgccaagcatcgtttatcaggggaagccaatgcagtacctctggatgtctattgcattcatacagatcttcacagtgctcgagtgtttgcggtgtgctctttgtggaatgtatcctaatgtcccattcatatcccatactgctttcattcactctgatctaaatctgttcagataggtgtttataaggtccgggattcaagaagggtgattttttttgaaatggctacttatcataggaccagctggggcactacttgttttatccgaacttggttgagaacttgagatgaagctggaagttgagatgcattaaattgtgcattatatggtgacctgcagctctaagttgagaacttgagatgaagctggaacagaatggaggggttacgaagaaattttgagacttgtactgcctgtgaagtttactctttccatgaggactttgtgaatattttgcctaacaacagtttggtagagtttgggaaagaaacaacagttcattga

SEQ ID NO: 27187 - DNA, 1637 bp, Zea Mays
atgttgtattcgagagtgaattccacataccctatctcttccagtcttcctacgctcctgtcggcgcgtcctccgcatcccggtgaccggtgtgttctccgatttgaggggcgtccctcgcacgctccggtctgctgctcctccgccctccggagtccattccagcggagcgcgctacggcacagatcggccgccgtccatccctttcccagctctccagagcctccgctgccgcgtccggtgagcacgtctcgaccggtttccaggtccatggcttcagctattagctctgagcggtttggtgtccaacagttccaatatgcttgtcgaactgatgaactaagactagtctctggtggtttcacgagaggattatgggcattaaatatgttgatgtggcatattattaacgaagagagataagataactgcataaggccgagctcatgcaaaatggtgctatgccagggcgtatctgttggaaatgctcagttgctagcttttcctggtagatcatcaagccttaagagcacccagtttcttgttaaaacgaatcattttcctgcaagagctctacgtgttggtactgattctattcatcatgccatgcctacatcatccccaagggaaaattctgtcaggggaatcccatcactatcaagacagcacaatcagcatccaaggtccgttagttgtcaggcatcctcactggcatctttcagctaccctgagctgacatccaaacccagatggtggtggagaactctagcttgtgtgccgtacttgctgccactgcacaacatgtggtcttatgctgacgtgatctaccagctgcacacttatttgcaggggttttctctgttgtacaccttcatcgataccatgactctgtgtcctgggtggctctttctggtgatatttatgacagtgtacttcttcgttgtgaggcggaagtggtcgccgcactttctgaggttccatgtgatcctagcaatccttctggacactggctcccaagcagtggccaccatgtgtacatggatgccaagcatcgtttatcaggggaagccaatgcagtacctctggatgtctattgcattcatacagatcttcacagtgctcgagtgtttgcggtgtgctctttgtggaatgtatcctaatgtcccattcatatcccatactgctttcattcactctgatctaaatctgttcagataggtgtttataaggtccgggattcaagaagggtgattttttttgaaatggctacttatcataggaccagctggtacaatagcattcgaacaacactgcgattgatttttgttcctaagatgttattcaatgtacgttgactacctgcaaattttgttttgaggggcactacttgttttatccgaacttggttgagaacttgagatgaagctggaagttgagatgcattaaattgtgcattatatggtgacctgcagctctaagttgagaacttgagatgaagctggaacagaatggaggggttacgaagaaattttgagacttgtactgcctgtgaagtttactctttccatgaggactttgtgaatattttgcctaacaacagtttggtagagtttgggaaagaaacaacagttcattga

SEQ ID NO: 27188 - DNA, 1465 bp, Zea Mays
atgttgtattcgagagtgaattccacataccctatctcttccagtcttcctacgctcctgtcggcgcgtcctccgcatcccggtgaccggtgtgttctccgatttgaggggcgtccctcgcacgctccggtctgctgctcctccgccctccggagtccattccagcggagcgcgctacggcacagatcggccgccgtccatccctttcccagctctccagagcctccgctgccgcgtccggtgagcacgtctcgaccggtttccagttccaatatgcttgtcgaactgatgaactaagactagtctctggtggtttcacgagaggattatgggcattaaatatgttgatgtggcatattattaacgaagagagataagataactgcataaggccgagctcatgcaaaatggtgctatgccagggcgtatctgttggaaatgctcagttgctagcttttcctggtagatcatcaagccttaagagcacccagtttcttgttaaaacgaatcattttcctgcaagagctctacgtgttggtactgattctattcatcatgccatgcctacatcatccccaagggaaaattctgtcaggggaatcccatcactatcaagacagcacaatcagcatccaaggtccgttagttgtcaggcatcctcactggcatctttcagctaccctgagctgacatccaaacccagatggtggtggagaactctagcttgtgtgccgtacttgctgccactgcacaacatgtggtcttatgctgacgtgatctaccagctgcacacttatttgcaggggttttctctgttgtacaccttcatcgataccatgactctgtgtcctgggtggctctttctggtgatatttatgacagtgtacttcttcgttgtgaggcggaagtggtcgccgcactttctgaggttccatgtgatcctagcaatccttctggacactggctcccaagcagtggccaccatgtgtacatggatgccaagcatcgtttatcaggggaagccaatgcagtacctctggatgtctattgcattcatacagatcttcacagtgctcgagtgtttgcggtgtgctctttgtggaatgtatcctaatgtcccattcatatcccatactgctttcattcactctgatctaaatctgttcagataggtgtttataaggtccgggattcaagaagggtgattttttttgaaatggctacttatcataggaccagctggtacaatagcattcgaacaacactgcgattgatttttgttcctaagatgttattcaatctctaagttgagaacttgagatgaagctggaacagaatggaggggttacgaagaaattttgagacttgtactgcctgtgaagtttactctttccatgaggactttgtgaatattttgcctaacaacagtttggtagagtttgggaaagaaacaacagttcattga

SEQ ID NO: 27189 - DNA, 1675 bp, Zea Mays
atgttgtattcgagagtgaattccacataccctatctcttccagtcttcctacgctcctgtcggcgcgtcctccgcatcccggtgaccggtgtgttctccgatttgaggggcgtccctcgcacgctccggtctgctgctcctccgccctccggagtccattccagcggagcgcgctacggcacagatcggccgccgtccatccctttcccagctctccagagcctccgctgccgcgtccggtgagcacgtctcgaccggtttccagttccaatatgcttgtcgaactgatgaactaagactagtctctggtggtttcacgagaggattatgggcattaaatatgttgatgtggcatattattaacgaagagagataaggtaaaaagttttatcgaatgaaatgagttccacgggcgatgaaacttatgtgcactgtttctaacatatcggagtcttgggaacattgacataaaatccccactgaaactggcctaataaataagctaatctgtgttgggtttgcgtcctgtactgctacatgatttcagtgccagactaaatactcagttcgattacttgtatgtgcagataactgcataaggccgagctcatgcaaaatggtgctatgccagggcgtatctgttggaaatgctcagttgctagcttttcctggtagatcatcaagccttaagagcacccagtttcttgttaaaacgaatcattttcctgcaagagctctacgtgttggtactgattctattcatcatgccatgcctacatcatccccaagggaaaattctgtcaggggaatcccatcactatcaagacagcacaatcagcatccaaggtccgttagttgtcaggcatcctcactggcatctttcagctaccctgagctgacatccaaacccagatggtggtggagaactctagcttgtgtgccgtacttgctgccactgcacaacatgtggtcttatgctgacgtgatctaccagctgcacacttatttgcaggggttttctctgttgtacaccttcatcgataccatgactctgtgtcctgggtggctctttctggtgatatttatgacagtgtacttcttcgttgtgaggcggaagtggtcgccgcactttctgaggttccatgtgatcctagcaatccttctggacactggctcccaagcagtggccaccatgtgtacatggatgccaagcatcgtttatcaggggaagccaatgcagtacctctggatgtctattgcattcatacagatcttcacagtgctcgagtgtttgcggtgtgctctttgtggaatgtatcctaatgtcccattcatatcccatactgctttcattcactctgatctaaatctgttcagataggtgtttataaggtccgggattcaagaagggtgattttttttgaaatggctacttatcataggaccagctggtacaatagcattcgaacaacactgcgattgatttttgttcctaagatgttattcaatctctaagttgagaacttgagatgaagctggaacagaatggaggggttacgaagaaattttgagacttgtactgcctgtgaagtttactctttccatgaggactttgtgaatattttgcctaacaacagtttggtagagtttgggaaagaaacaacagttcattga

SEQ ID NO: 27190 - DNA, 2560 bp, Zea Mays
agggatggcgtgagccaggcgggagcgaggtcgtgtttgaccacctccccctccgcgtccccgtcgctgctgggcttggctttaccactggggcgggttcccacaccggggccagacgccgccaccgctgtccccgtctacaccgagttccccccgcgcgatttaacccctcgcctcgctcgctgcctccggttccctacaacgcgcacaccaaacgcgcacgcggcgttcgttcctcggccgctctccctacccacgtccttctccccccacagatctccgcgggccgtgaggttccttgattcgccttctccggggctgccggatctccgcggcggctggggatgggcaactgctgcgtaacaccgaacggagccgccgacgccggcggcggcaagaagcccaaggagccgaagcagaagaagggcaagaagccgaaccccttctcgatcgagtacaaccgctcgacgccggcgagcgcgccgaggctggtggtgctgcgggagcccacggggcgggacatcgcggagcggtacgagcttggagcggagctcgggcgcggcgagttcggggtcacctatctctgcacggaccgcgcctcaggggaggcgctagcctgcaagtccatctccaagaagaagctccgcacccccgtcgacgtcgaggacgtgcgccgggaggtggagatcatgcgccacctccccaagcaccccaacatcgtcacgctcagggatacctacgaggacgacaatgccgtgcacctcgtcatggagctctgtgagggtggggagctcttcgaccgcatcgtggcgcgggggcactacacggaacgcgctgccgccttggtcacacgcactatcgtcgaggtcgtgcagatgtgccataagcatggagtgatgcacagggatctcaaaccagaaaatttcttgtttgcgaacaaaaaagaatcagcagcccttaaggccattgattttggcctgtctgtatttttcactccaggcgaacggtttacagagattgttgggagtccttattacatggccccagaggtactaaagagaaattatggcccagaggttgatgtttggagtgcaggggtgattctgtacattcttctctgtggtgtccctccattctgggcagaatcggagcaaggtgttgctcaggcaattatccgatctgtcattgatttcaaaagagatccatggccaagggtctctgataatgccaaagaccttgtaagaggaatgctcaacccagatccaaagcgacgattgacagctcagcaagtgcttgatcacccatggttacagaacattaagaaggctccaaatgtcaatttgggcgaaactgttaaggccagacttcaacaattctctgtgatgaacaagttcaagaagcatgcacttagggtcatagctgagcatctttcagtagaagaggctgctgacataaaggatatgtttgagaagatggatcttaacaaggatcaaatgcttaatttcgatgagctgaagcttggtctgcataaatttggtcaccaaatccctgatgcagatgttcaaatactaatggaagctgtgagttgacattcttttcctccacaactgaaacttattgcacctctttaatattggactggatttttttttgctaatgtgaatcacctttgaatgtattttgtcaacctggtttaatgttttcgattttcattttaattaagcattctttcacgaaggtgatgtgtttgggccttttatgtttactgtttgtgcatgttatgccaggcggatgctgatggaaacgggtccttggattatggagaatttgttacactatctgttcatctaagaaagattggaaatgatgagcatcttcataaggcatttgcatactttgaccggaaccagagtggttatattgaaatcgatgaactccgtgagtcattagctgatgaccttggacagaatcatgaagaggttatcaatgccattatccgtgacgtagacaccgataaggatggcaagataagctacgatgagtttgcagcgatgatgaaggccggaacagactggaggaaagcgtcgagacagtattcgagagagcggttcaccagcctgagccttaagctgcaaaaggatggatcgttgcagatggagagtacgcagtagtcgataacacccataggcaagttgtgaattacagaaggaaaccctgtgtagattttctggttgtttgttgacagctcttctgctcgtcctgatcttctattgctttctattcttcactcgtctgtttgaagcattgggggggattgttgatgccgtgattgtatttagactgcatgatccagcctcactgatttccacgccttagggcaaagtgtactgtacaagagaaagaggggaaaatgattaggagtttgtacgcatttcttaacttctgtggacccatttgtttgtgcattgttctgtgaatgtcctgatgacgagttcctgcatatggtgctcgataacggttggttgaattgaacctgaagtgctggatggatgaatttaat

SEQ ID NO: 27191 - DNA, 1370 bp, Zea Mays
ctcacttccgcactcccccacactacaccacactcgagagccatctcccagcacacgagcgggatggcttccaccaccaccaccttcctcgccgtcttgctggtcgtggccgcgtccgcggcgccggcacggtcctgctcaccgcgcgacatccacgcgctgctgagcgtgaagcaggcgctgggcaacccggcgtcgctgtcgacgtggacgccggcgtcgcccaactgctgcgcgtgggaccacctccgatgcaacgacgccgggcgcgtgaacaacgtcttcatcgacggcgcggacgacgtgcgcggccagatcccgtcggcggtgggcgggctgacggagctcatgtcgctgacgctgttccggctgccggggctgacgggcgccatcccggcctgcctcacggcgctgtcgaacctccagttcctcaccgtctcccacaccaacgtgtccggcgcctccgtggacctctccagcaaccggctgacgggcggcatcccggcggcgttcgccgacctgcccagcctccggtcgctggacctccggcacaaccagctgacgggccccatcccggcggggctggtgcaggggcagttccggtcgctggtcctgtcctacaaccagctcacgggccccatcccgcgcgacgacgcgcgcgacgagatcaacaccgtcgacctctcccacaacaggctcaccggcgacccctcccacctgttcgccgccggccggcccatcggcaaggtggacctgtcgtggaactacctcaacttcgacctcagcaggctggtgttcccgccggagctcacgtacctggacctgtcccacaacctcatccgcggcaccgtgccgctgtcgctggagcgcctgtccacgctgcagaagctggacctcagctacaaccgcctgtgcggcccgctccccaagggccacggcgtcatcaagcacgggtgcaagccgtacgcgcacaaccagtgcagcaaagggaccccgctcgcgggatgccaggacctggagtgagtgagccggtggccatggttttctatactctgctctgctctccctcgccggcgttcttttcgtgtcccaatcttgaaggacgacggtacggtgcctggtttagctatagacaaaaaaaggtacggccgcgtggtggcggtgctaatatgcttagccacgcccacgcgcggttgatctttgagcagttaagcgtgtacgaaatgacagctgtgtacgtgtactgtctggtggagtgtgctgtgtatctggtctcgatccgatcggcctaatgtatgaaaaaaaaaggatgtttacgtactaaatggaaaatcattttttccctcttcttttatatgaagttgcgcctg

SEQ ID NO: 27192 - DNA, 932 bp, Zea Mays
cctccacgaattgggtgagtgatggtcgagtcggtagcggcggtgtggtgcttgtgccggtgcgtgcgctcgccgctcgcctcggtggcttccgccttccggattccgtcgagcgatccgctagctttccctacacgcgaatctggtggtgactctgactgtggatctagtcttcataggcccttgtggactctgatttttgtttgggccatattcctgcccattaataacttacttgaaataatgtgggtcaaagacctgatagatccatttggcccgtttagatcggtcaaaatcgttatccacacacgcgcgcgctcgcgacatcacagtccacaggtccgctgctgacacttgggttccggggcgacctctggcaaggatgcaggtggcagtccgcccgctcgctccgagcgccgtcggaggaggaggggggcgaggaggcggcgcggcgcgagacgccggaggagacgcggaagcggctggaggagctggacgcgctgctggaggggctggtcgagcccaagatgcggccgccaacgccacctcctcctccggatccgtacctggaccgagccacgatgataactgggcggggatcatcagccgacgagctgccagagttttctccgacatacgtggcgttctcgacgcttggactcgtcatcctcaccatcttcaccaacgtcatgttcaacctgtacataaaaccctccgtggacggcgtcgatccaccgcctgaaagaatccagagaacggccctagtcaatccagcagacaggccgtccgaatagttttctgcgcagcacaatacacacagtatacggttttgatgatgaagacatgtgtcccaggtgggaatggactatttaattgtgtggacagtgggtggactcacacattattactagcgtcatactgcttctctcaag

SEQ ID NO: 27193 - DNA, 469 bp, Zea Mays
gcctcatccacaaaggttccttatgattaattgccagtgtggatgatcgatgaaggcgcgcggccggtaccggatccgatctgattccgattcagtgggaaattattagcacgatgaggcgcataaatgaaattggtcatctgagctcatcgatctggtcccttttgttgaatttatgatgccaccatggtggtgtggtgtcggatttatctctgcttcaagtatggcactagcttcttaagacatcagctggcagactcattgtcttgaacatgtgggacaacttacagttcagctactcactccgtccacatgagttagttgttttgggtttgttctaaatcaaactatttaaacattgaccaacaatatgtatatgattaaagttttatttttttttgtgtattatgatagtttaagtcatgataaatctaatacttttactttttatattgtaaaaatcttatca

SEQ ID NO: 27194 - DNA, 6219 bp, Zea Mays
aagcggccagacgagtgagaagggggcagcggcacgcagccggaaagtgaggcaggcgtggtgaagggcagggggaggcttgcaccgcagagaagccagaggagcgttagtagtagaagagcagagagggagagggaggaagagccacgcgacgagagccgaggagccatccaccgcccgcctaatccttgttcgctgctagattcgccagaccaccgaggcgctgctccccggatctacggggcggcgtcggtgctcatcggaatccagagaggtggcggttgtttgccggggatcggcgccgcatgtctcagatctgagatggacaggatccgggacggcaggaggggcggggtgtcggtcggaggcgttccgccgccgccgcctccgaggaggcgcctcaggagcaacggcggagggggccccagggactcgcctcgctccgagcgccgacggggcgagcgcctcatgctcaacggcgggggtggctgcgccagtcgggacgacggcgacgacatctccgacgagagcctcggcgacgacgacgacgacgccgagcaggagctcgtgccgcggtaccaccagcagcggcggtcaccgagcacggcgccacctccttcctcgccacctccgcccggcggtggccaccacagcagtagtagcagcggtggcgggggttatcacaaccaccatcacggccagcaccaccagatgcagtggaagggcggctccaatcccatcgtgtccaaggctgtagacgagatgattggtgtccctgttccgaggaaagcacgctccgcttcaacgaaacgttcttcgcatgagtggcctgtccccggcggcggaaccagtggaggcagcaccggcgcaggagacggctcgcagattcaacggcctttgtcacggccaatctctccagcgtcagcctccactaccgtcccggctcggaagaagcttaaaccacttggaggtgggagcagcggtggtccaggacaagcgtcaaagcagcgaccatcaccgtcgccagctccatcaacaaccccgccacaaccaccgccaccgaagatgtcgaagtcgccgtctttcattcaagaggaaatcgaggttgccgaggtgctgttcggactcaccaggcagttctcgtgccctcccaaacaagaggtcaaccacaagctcgatcccagagatgtgccagagtccaagtgtgggaactcttcgtcggccccctcttctggcgcccgaccctctgattccacctccctttccgctatagcgccaaagaggaagaaaccacggctggcgaagtacgatgaagatagccgtccggcgagcccaacgaagccagagttggtggagccgtcctcaaagccggagccacctcctgtggctagatcagaagcaaagatggcaacgtcggcagcaaccgaaagtggcaccagcaccgcacctgcggctgttcaactcgagactttacgaaagccagagaagacggaggactcagagctccgtccaagcgaaccagatcggcgaaatcacagcctggagagccaggcggagctgccggcgtcgttgccggcgccttcagtcaagccggatgctgaagcaaagccggtaggatccgaggccaggaacggcgaagctactgcgacgacaaagattgagctggcatccgatggcgctcggcatgacaagttttccattgatctcatggctccccctcctgggaagctgtctgatgatatagatgcctcctccgaccctgatgcagataagaagggattggattctgagatggacatgttggggagaggaaattcggaaaagaaggatggtgaaaggactctgggagggctggatattgatttggaggaccagaaggtgcaaagaattccagccgatgagtccacgcccaagaagctcacactgcagttggatttggagaagcccagtcttggtgatgaaaaatcaccatcacagcgacggcagccgcatcaacatccacaacaattgcagcagctgaagccctcaaaagctgagataaagcacgagaaatctgctatgcctgctgttacaccacctatacctatacccgttggaggttggcttgggaatttcccaccgtttggttaccttagtccagtcccaggcctatcaggagctggtcttcatcatcccatggacgtgaagccagggtcttctagtggattacagcatgctgcattgcttccaccgccaacacgctcaaagagatgtgctacacattgctacattgcgcaatttatccagcaccagcagcgggttgcaaagatgaactccttctggccgccagctgttgcagcggcagccgccgccgccaacagatcagggccactctttggtgcaaggccattcagcatgggtgttgtgccaccgacagatgctgcctctatgcttgtgaacccaatgcaggggagctaccccatcagggctcacactccaatgcaagaagcaaaggctcctatggctacttcattccaggggagtctctcgaaggataaagcactgggcaatgctgctggtcctgaatcaagccagaggaaacaaccgcctgctcatgaaacacagcagtccactcccatgccaaacatgctgcaagccctggcattcatctttccattcaatcagcaacatgctatggtggcagctgcaaatgctgccaatcgagcaggggatgcaaaatcatctggagccagcaatgcaatgccgccatctgccagtgctcacactttggcagcaaactctggtgccacggccatgaacttgagctttgccaacttgcaaccggctgatgcccagttcttggcgatcttacagaatggataccaattccaggttgctgctcatcctggagggcctccatatcgaggcatggcaccaccaggcccagctgttccattcatcaatggacatgtgtattcctctcccatgctgcacccatcacagcagcaaggtgcgcaaccacaaagtcatcagaagacccagctgccaaacttgcccagttcatcacagaagcaccagccacaacattcccaagggctattgggatatgcaccaaatgctaacgcagcagcagctgctagtaattcgcacaattattcaagtggaaatcagcgccctgtccttgcgcaccgacaggagagtgacaaaactggagaagatggtctatcgagtgatgacaagccatcccactctcagaagagcgggtatgaacacaattttgctgttccagtccatctaccgaattttgcaatgatgccagctgctcaacctgctggcagtcagagtgagaagaagttaagtgaccatcaccaccagcagcagcagccacaagtcagtcgtggccagggtgtgaggattgatcttgcgtcttctcagccttttgtgatgccctttggctccattggtcctcctggatctgccccatctggtctcgacttctcggcattggcgcagagccatgcatttttacagagccatcaagaagcagcccggcatggttatcctcaacttaattttgctgcagctcaatctacgcagcacaagccccagcatggagaaacaaaatctgtcgctggggattcatccttgacacacattgccggagacagccagagaaagaaatcaacttctacaaagtattctggtgattcacagcagcattcgctgtccttcaccaggacagaaagcaagaatcatgtgcctcctttccttagtggcagcacaaatgaaagttcgtcccgaaccctaagccttattggaacagaatcttcaaatacatttatgggaagcaaatccacaaattccaccactcctgcctcaacaccacctgcagcttcgtctagcatttctcagcagcaccagcatttccttcagatgcaagtgcagcataagcatcagcatcagcagatgattcagcaccaccatttgaatcggcctagatctgccgcaccaagtacacaaaatagtgcaggtgggtacccagaccgtctcaatatggcgagctttcagaatatgatgtacccaccaaatgctgcccaaggccaagggagagttcaatccccccagttgaaggcatcctcagggagagggacaccttcatctactgctaccactccccctgctgctgcaccccctaatttgattgtgatgaagacaagtagtctccacccgcaacaagcaaagattcctatgcaggctctctccactcctggtcaccaatcccagagttctctaagcatgagttcatcaaaaatggctcctgtaactaacctttctactggaggaggggatctatctcgatcttcaaatgcccctgttgcttctggttcaccatccaattcggtgtccaaaagcactggtggcagcccgcctgccacaggaaatgcaaagggtgttcagcagcctgtccaattgccatcaccacaacagcagttagccaagaactctgtgtcgacgtgtggctccaagtctactcctgcaaaccatttcagtatggctatgccatctatccttggccaacagcctaattcatcgcctggttctaataccgggagcaagcagcagtcacatatgtcatcgtcaatgaaacagcagccgttccctcaaggccatttcttcatatccagcacgtatgctcctcaggctccaggagccggcggtgctgctgcccttggcctataccagaagcgaccaggcgacaagacacagccacaggcaccacaccagcagaacgccttgtcagccgctgctggcagtaacatgaaatcgcttcatccttcgtccggtggatttatgcatctcgcagcggcaacccagtctgcaggtggtggcatgccacacacccacatgcccgcggcgcaactgagtttcggaacaatgccggtgcctttaaaaccctcaagcgaccagaagcccgctgctggaaaataaacagagcccaggtgaccatgcgtcggagtggtaatctgagctggcgagctcaagtgcttatccagcggaagccccaaatggaggaggaaagatacaatgagaagagaaaagcaggccacagctcgaagaacctgcttttggttgctgctgtggtgatcaggaagggggaggaggggcactgcgaggacacgccttgctaacttaaaaggttgttcgggtctgggaatggctgatcttctccagttcctcgtttcttttgggtggggggtctcagctttaaccggaggaggaaagattcaatcagaatgcagatctcagtaccagcaagaagaggagaaaacaaaatctattccaactagaatagggtccagccatgattggtgtgggtggcatacagtgacatgcgtctgggtttgttgttgcattggcccggaggtccctgtccatgatcgcttcggaacagcgtttcttagcaggcgtcgtgaggagatgtgtgtgtgccgtgcctcccggtcgctgtcgatgccgtggcaaagcaagctgagcgaggatgttccctgcaagttacagattctgcccgacgtcgacgtgcgcccgccggccgccgcccgctggttaatcatcatcatcgtcggtttggcttttcgcacgagctgtggactcgggagggaaagagtccctttcactcgtctcgtgaaacagaagcagaggccggctggcgggcctgtctgtgtggtcaaagttttcagttcaccttccactcgtgcggcttttcgtcgccagtcggggggtgataccaccaccactgaccgcagagatgatcccgctctgacctccttctggcgcgccttgagagttcttgcttctgcggctctggctggcgtcggcgcattgatatggtcgactgctttggactggcagcagatgcgcaccgcgttttgtctccacatggcagaagaagacaggatgggaccttcccgggccccaccaggccgcgcagccgggacccgcgccctgccacggcagcacgagaatccagctccagggacaggcgggtcccacacccgcgcccgtggctgtggagccgtggggggcatcagcgtccgtgattgtcgcagactgtccctgtcgggcgtcggcacgagacgtgtcgaccgctccgccgacgccgcaactttggtagtaggtggtggtggtaggccaggtagcggtaccttgagcccacgatccacgactgggtacagccggtaa

SEQ ID NO: 27195 - DNA, 5784 bp, Zea Mays
aagcggccagacgagtgagaagggggcagcggcacgcagccggaaagtgaggcaggcgtggtgaagggcagggggaggcttgcaccgcagagaagccagaggagcgttagtagtagaagagcagagagggagagggaggaagagccacgcgacgagagccgaggagccatccaccgcccgcctaatccttgttcgctgctagattcgccagaccaccgaggcgctgctccccggatctacggggcggcgtcggtgctcatcggaatccagagaggtggcggttgtttgccggggatcggcgccgcatgtctcagatctgagatggacaggatccgggacggcaggaggggcggggtgtcggtcggaggcgttccgccgccgccgcctccgaggaggcgcctcaggagcaacggcggagggggccccagggactcgcctcgctccgagcgccgacggggcgagcgcctcatgctcaacggcgggggtggctgcgccagtcgggacgacggcgacgacatctccgacgagagcctcggcgacgacgacgacgacgccgagcaggagctcgtgccgcggtaccaccagcagcggcggtcaccgagcacggcgccacctccttcctcgccacctccgcccggcggtggccaccacagcagtagtagcagcggtggcgggggttatcacaaccaccatcacggccagcaccaccagatgcagtggaagggcggctccaatcccatcgtgtccaaggctgtagacgagatgattggtgtccctgttccgaggaaagcacgctccgcttcaacgaaacgttcttcgcatgagtggcctgtccccggcggcggaaccagtggaggcagcaccggcgcaggagacggctcgcagattcaacggcctttgtcacggccaatctctccagcgtcagcctccactaccgtcccggctcggaagaagcttaaaccacttggaggtgggagcagcggtggtccaggacaagcgtcaaagcagcgaccatcaccgtcgccagctccatcaacaaccccgccacaaccaccgccaccgaagatgtcgaagtcgccgtctttcattcaagaggaaatcgaggttgccgaggtgctgttcggactcaccaggcagttctcgtgccctcccaaacaagaggtcaaccacaagctcgatcccagagatgtgccagagtccaagtgtgggaactcttcgtcggccccctcttctggcgcccgaccctctgattccacctccctttccgctatagcgccaaagaggaagaaaccacggctggcgaagtacgatgaagatagccgtccggcgagcccaacgaagccagagttggtggagccgtcctcaaagccggagccacctcctgtggctagatcagaagcaaagatggcaacgtcggcagcaaccgaaagtggcaccagcaccgcacctgcggctgttcaactcgagactttacgaaagccagagaagacggaggactcagagctccgtccaagcgaaccagatcggcgaaatcacagcctggagagccaggcggagctgccggcgtcgttgccggcgccttcagtcaagccggatgctgaagcaaagccggctccccctcctgggaagctgtctgatgatatagatgcctcctccgaccctgatgcagataagaagggattggattctgagatggacatgttggggagaggaaattcggaaaagaaggatggtgaaaggactctgggagggctggatattgatttggaggaccagaaggtgcaaagaattccagccgatgagtccacgcccaagaagctcacactgcagttggatttggagaagcccagtcttggtgatgaaaaatcaccatcacagcgacggcagccgcatcaacatccacaacaattgcagcagctgaagccctcaaaagctgagataaagcacgagaaatctgctatgcctgctgttacaccacctatacctatacccgttggaggttggcttgggaatttcccaccgtttggttaccttagtccagtcccaggcctatcaggagctggtcttcatcatcccatggacgtgaagccagggtcttctagtggattacagcatgctgcattgcttccaccgccaacacgctcaaagagatgtgctacacattgctacattgcgcaatttatccagcaccagcagcgggttgcaaagatgaactccttctggccgccagctgttgcagcggcagccgccgccgccaacagatcagggccactctttggtgcaaggccattcagcatgggtgttgtgccaccgacagatgctgcctctatgcttgtgaacccaatgcaggggagctaccccatcagggctcacactccaatgcaagaagcaaaggctcctatggctacttcattccaggggagtctctcgaaggataaagcactgggcaatgctgctggtcctgaatcaagccagaggaaacaaccgcctgctcatgaaacacagcagtccactcccatgccaaacatgctgcaagccctggcattcatctttccattcaatcagcaacatgctatggtggcagctgcaaatgctgccaatcgagcaggggatgcaaaatcatctggagccagcaatgcaatgccgccatctgccagtgctcacactttggcagcaaactctggtgccacggccatgaacttgagctttgccaacttgcaaccggctgatgcccagttcttggcgatcttacagaatggataccaattccaggttgctgctcatcctggagggcctccatatcgaggcatggcaccaccaggcccagctgttccattcatcaatggacatgtgtattcctctcccatgctgcacccatcacagcagcaaggtgcgcaaccacaaagtcatcagaagacccagctgccaaacttgcccagttcatcacagaagcaccagccacaacattcccaagggctattgggatatgcaccaaatgctaacgcagcagcagctgctagtaattcgcacaattattcaagtggaaatcagcgccctgtccttgcgcaccgacaggagagtgacaaaactggagaagatggtctatcgagtgatgacaagccatcccactctcagaagagcgggtatgaacacaattttgctgttccagtccatctaccgaattttgcaatgatgccagctgctcaacctgctggcagtcagagtgagaagaagttaagtgaccatcaccaccagcagcagcagccacaagtcagtcgtggccagggtgtgaggattgatcttgcgtcttctcagccttttgtgatgccctttggctccattggtcctcctggatctgccccatctggtctcgacttctcggcattggcgcagagccatgcatttttacagagccatcaagaagcagcccggcatggttatcctcaacttaattttgctgcagctcaatctacgcagcacaagccccagcatggagaaacaaaatctgtcgctggggattcatccttgacacacattgccggagacagccagagaaagaaatcaacttctacaaagtattctggtgattcacagcagcattcgctgtccttcaccaggacagaaagcaagaatcatgtgcctcctttccttagtggcagcacaaatgaaagttcgtcccgaaccctaagccttattggaacagaatcttcaaatacatttatgggaagcaaatccacaaattccaccactcctgcctcaacaccacctgcagcttcgtctagcatttctcagcagcaccagcatttccttcagatgcaagtgcagcataagcatcagcatcagcagatgattcagcaccaccatttgaatcggcctagatctgccgcaccaagtacacaaaatagtgcaggtgggtacccagaccgtctcaatatggcgagctttcagaatatgatgtacccaccaaatgctgcccaaggccaagggagagttcaatccccccagttgaaggcatcctcagggagagggacaccttcatctactgctaccactccccctgctgctgcaccccctaatttgattgtgatgaagacaagtagtctccacccgcaacaagcaaagattcctatgcaggctctctccactcctggtcaccaatcccagagttctctaagcatgagttcatcaaaaatggctcctgtaactaacctttctactggaggaggggatctatctcgatcttcaaatgcccctgttgcttctggttcaccatccaattcggtgtccaaaagcactggtggcagcccgcctgccacaggaaatgcaaagggtgttcagcagcctgtccaattgccatcaccacaacagcagttagccaagaactctgtgtcgacgtgtggctccaagtctactcctgcaaaccatttcagtatggctatgccatctatccttggccaacagcctaattcatcgcctggttctaataccgggagcaagcagcagtcacatatgtcatcgtcaatgaaacagcagccgttccctcaaggccatttcttcatatccagcacgtatgctcctcaggctccaggagccggcggtgctgctgcccttggcctataccagaagcgaccaggcgacaagacacagccacaggcaccacaccagcagaacgccttgtcagccgctgctggcagtaacatgaaatcgcttcatccttcgtccggtggatttatgcatctcgcagcggcaacccagtctgcaggtggtggcatgccacacacccacatgcccgcggcgcaactgagtttcggaacaatgccggtgcctttaaaaccctcaagcgaccagaagcccgctgctggaaaataaacagagcccaggtgaccatgcgtcggagtggtaatctgagctggcgagctcaagtgcttatccagcggaagccccaaatggaggaggaaagatacaatgagaagagaaaagcaggccacagctcgaagaacctgcttttggttgctgctgtggtgatcaggaagggggaggaggggcactgcgaggacacgccttgctaacttaaaaggttgttcgggtctgggaatggctgatgtgagtgaatacttttgtgtagttttggctggttatccatcctcccatcccatggtgtaaaggtcggaggagtgcatagaatctgtctcgtagccccgttttttgtgcatggatggatgtcgaaggctgttctctccctctattctcttgtagcttctccagttcctcgtttcttttgggtggggggtctcagctttaaccggaggaggaaagattcaatcagaatgcagatctcaggtaactttgttatgcaactgatgctcccattacacactgtctgtcgatacactctgactggattgttttagtaccagcaagaagaggagaaaacaaaatctattccaactagaatagggtccagccatgattggtgtgggtggcatacagtgacatgcgtctgggtttgttgttgtaagtagctcttgtgggtggggggggggggggggaggaaatgaatgaatggaattgcctgattatggatgctgtacctgtggccccctgcgacgacagatcattcgcctctgcctctcaatgttgtgatgatgactgtgcagccctcgtccggagatgaaagtggggacagtgcatgtggaggggggagtctagcagctccatcacttgtgtttgatatttctgtgcgtgtgtggatgggcaagatgccgtgctcgtaccagaggaagg

SEQ ID NO: 27196 - DNA, 5883 bp, Zea Mays
aagcggccagacgagtgagaagggggcagcggcacgcagccggaaagtgaggcaggcgtggtgaagggcagggggaggcttgcaccgcagagaagccagaggagcgttagtagtagaagagcagagagggagagggaggaagagccacgcgacgagagccgaggagccatccaccgcccgcctaatccttgttcgctgctagattcgccagaccaccgaggcgctgctccccggatctacggggcggcgtcggtgctcatcggaatccagagaggtggcggttgtttgccggggatcggcgccgcatgtctcagatctgagatggacaggatccgggacggcaggaggggcggggtgtcggtcggaggcgttccgccgccgccgcctccgaggaggcgcctcaggagcaacggcggagggggccccagggactcgcctcgctccgagcgccgacggggcgagcgcctcatgctcaacggcgggggtggctgcgccagtcgggacgacggcgacgacatctccgacgagagcctcggcgacgacgacgacgacgccgagcaggagctcgtgccgcggtaccaccagcagcggcggtcaccgagcacggcgccacctccttcctcgccacctccgcccggcggtggccaccacagcagtagtagcagcggtggcgggggttatcacaaccaccatcacggccagcaccaccagatgcagtggaagggcggctccaatcccatcgtgtccaaggctgtagacgagatgattggtgtccctgttccgaggaaagcacgctccgcttcaacgaaacgttcttcgcatgagtggcctgtccccggcggcggaaccagtggaggcagcaccggcgcaggagacggctcgcagattcaacggcctttgtcacggccaatctctccagcgtcagcctccactaccgtcccggctcggaagaagcttaaaccacttggaggtgggagcagcggtggtccaggacaagcgtcaaagcagcgaccatcaccgtcgccagctccatcaacaaccccgccacaaccaccgccaccgaagatgtcgaagtcgccgtctttcattcaagaggaaatcgaggttgccgaggtgctgttcggactcaccaggcagttctcgtgccctcccaaacaagaggtcaaccacaagctcgatcccagagatgtgccagagtccaagtgtgggaactcttcgtcggccccctcttctggcgcccgaccctctgattccacctccctttccgctatagcgccaaagaggaagaaaccacggctggcgaagtacgatgaagatagccgtccggcgagcccaacgaagccagagttggtggagccgtcctcaaagccggagccacctcctgtggctagatcagaagcaaagatggcaacgtcggcagcaaccgaaagtggcaccagcaccgcacctgcggctgttcaactcgagactttacgaaagccagagaagacggaggactcagagctccgtccaagcgaaccagatcggcgaaatcacagcctggagagccaggcggagctgccggcgtcgttgccggcgccttcagtcaagccggatgctgaagcaaagccggtaggatccgaggccaggaacggcgaagctactgcgacgacaaagattgagctggcatccgatggcgctcggcatgacaagttttccattgatctcatggctccccctcctgggaagctgtctgatgatatagatgcctcctccgaccctgatgcagataagaagggattggattctgagatggacatgttggggagaggaaattcggaaaagaaggatggtgaaaggactctgggagggctggatattgatttggaggaccagaaggtgcaaagaattccagccgatgagtccacgcccaagaagctcacactgcagttggatttggagaagcccagtcttggtgatgaaaaatcaccatcacagcgacggcagccgcatcaacatccacaacaattgcagcagctgaagccctcaaaagctgagataaagcacgagaaatctgctatgcctgctgttacaccacctatacctatacccgttggaggttggcttgggaatttcccaccgtttggttaccttagtccagtcccaggcctatcaggagctggtcttcatcatcccatggacgtgaagccagggtcttctagtggattacagcatgctgcattgcttccaccgccaacacgctcaaagagatgtgctacacattgctacattgcgcaatttatccagcaccagcagcgggttgcaaagatgaactccttctggccgccagctgttgcagcggcagccgccgccgccaacagatcagggccactctttggtgcaaggccattcagcatgggtgttgtgccaccgacagatgctgcctctatgcttgtgaacccaatgcaggggagctaccccatcagggctcacactccaatgcaagaagcaaaggctcctatggctacttcattccaggggagtctctcgaaggataaagcactgggcaatgctgctggtcctgaatcaagccagaggaaacaaccgcctgctcatgaaacacagcagtccactcccatgccaaacatgctgcaagccctggcattcatctttccattcaatcagcaacatgctatggtggcagctgcaaatgctgccaatcgagcaggggatgcaaaatcatctggagccagcaatgcaatgccgccatctgccagtgctcacactttggcagcaaactctggtgccacggccatgaacttgagctttgccaacttgcaaccggctgatgcccagttcttggcgatcttacagaatggataccaattccaggttgctgctcatcctggagggcctccatatcgaggcatggcaccaccaggcccagctgttccattcatcaatggacatgtgtattcctctcccatgctgcacccatcacagcagcaaggtgcgcaaccacaaagtcatcagaagacccagctgccaaacttgcccagttcatcacagaagcaccagccacaacattcccaagggctattgggatatgcaccaaatgctaacgcagcagcagctgctagtaattcgcacaattattcaagtggaaatcagcgccctgtccttgcgcaccgacaggagagtgacaaaactggagaagatggtctatcgagtgatgacaagccatcccactctcagaagagcgggtatgaacacaattttgctgttccagtccatctaccgaattttgcaatgatgccagctgctcaacctgctggcagtcagagtgagaagaagttaagtgaccatcaccaccagcagcagcagccacaagtcagtcgtggccagggtgtgaggattgatcttgcgtcttctcagccttttgtgatgccctttggctccattggtcctcctggatctgccccatctggtctcgacttctcggcattggcgcagagccatgcatttttacagagccatcaagaagcagcccggcatggttatcctcaacttaattttgctgcagctcaatctacgcagcacaagccccagcatggagaaacaaaatctgtcgctggggattcatccttgacacacattgccggagacagccagagaaagaaatcaacttctacaaagtattctggtgattcacagcagcattcgctgtccttcaccaggacagaaagcaagaatcatgtgcctcctttccttagtggcagcacaaatgaaagttcgtcccgaaccctaagccttattggaacagaatcttcaaatacatttatgggaagcaaatccacaaattccaccactcctgcctcaacaccacctgcagcttcgtctagcatttctcagcagcaccagcatttccttcagatgcaagtgcagcataagcatcagcatcagcagatgattcagcaccaccatttgaatcggcctagatctgccgcaccaagtacacaaaatagtgcaggtgggtacccagaccgtctcaatatggcgagctttcagaatatgatgtacccaccaaatgctgcccaaggccaagggagagttcaatccccccagttgaaggcatcctcagggagagggacaccttcatctactgctaccactccccctgctgctgcaccccctaatttgattgtgatgaagacaagtagtctccacccgcaacaagcaaagattcctatgcaggctctctccactcctggtcaccaatcccagagttctctaagcatgagttcatcaaaaatggctcctgtaactaacctttctactggaggaggggatctatctcgatcttcaaatgcccctgttgcttctggttcaccatccaattcggtgtccaaaagcactggtggcagcccgcctgccacaggaaatgcaaagggtgttcagcagcctgtccaattgccatcaccacaacagcagttagccaagaactctgtgtcgacgtgtggctccaagtctactcctgcaaaccatttcagtatggctatgccatctatccttggccaacagcctaattcatcgcctggttctaataccgggagcaagcagcagtcacatatgtcatcgtcaatgaaacagcagccgttccctcaaggccatttcttcatatccagcacgtatgctcctcaggctccaggagccggcggtgctgctgcccttggcctataccagaagcgaccaggcgacaagacacagccacaggcaccacaccagcagaacgccttgtcagccgctgctggcagtaacatgaaatcgcttcatccttcgtccggtggatttatgcatctcgcagcggcaacccagtctgcaggtggtggcatgccacacacccacatgcccgcggcgcaactgagtttcggaacaatgccggtgcctttaaaaccctcaagcgaccagaagcccgctgctggaaaataaacagagcccaggtgaccatgcgtcggagtggtaatctgagctggcgagctcaagtgcttatccagcggaagccccaaatggaggaggaaagatacaatgagaagagaaaagcaggccacagctcgaagaacctgcttttggttgctgctgtggtgatcaggaagggggaggaggggcactgcgaggacacgccttgctaacttaaaaggttgttcgggtctgggaatggctgatgtgagtgaatacttttgtgtagttttggctggttatccatcctcccatcccatggtgtaaaggtcggaggagtgcatagaatctgtctcgtagccccgttttttgtgcatggatggatgtcgaaggctgttctctccctctattctcttgtagcttctccagttcctcgtttcttttgggtggggggtctcagctttaaccggaggaggaaagattcaatcagaatgcagatctcaggtaactttgttatgcaactgatgctcccattacacactgtctgtcgatacactctgactggattgttttagtaccagcaagaagaggagaaaacaaaatctattccaactagaatagggtccagccatgattggtgtgggtggcatacagtgacatgcgtctgggtttgttgttgtaagtagctcttgtgggtggggggggggggggggaggaaatgaatgaatggaattgcctgattatggatgctgtacctgtggccccctgcgacgacagatcattcgcctctgcctctcaatgttgtgatgatgactgtgcagccctcgtccggagatgaaagtggggacagtgcatgtggaggggggagtctagcagctccatcacttgtgtttgatatttctgtgcgtgtgtggatgggcaagatgccgtgctcgtaccagaggaagg

SEQ ID NO: 27197 - DNA, 5760 bp, Zea Mays
aagcggccagacgagtgagaagggggcagcggcacgcagccggaaagtgaggcaggcgtggtgaagggcagggggaggcttgcaccgcagagaagccagaggagcgttagtagtagaagagcagagagggagagggaggaagagccacgcgacgagagccgaggagccatccaccgcccgcctaatccttgttcgctgctagattcgccagaccaccgaggcgctgctccccggatctacggggcggcgtcggtgctcatcggaatccagagaggtggcggttgtttgccggggatcggcgccgcatgtctcagatctgagatggacaggatccgggacggcaggaggggcggggtgtcggtcggaggcgttccgccgccgccgcctccgaggaggcgcctcaggagcaacggcggagggggccccagggactcgcctcgctccgagcgccgacggggcgagcgcctcatgctcaacggcgggggtggctgcgccagtcgggacgacggcgacgacatctccgacgagagcctcggcgacgacgacgacgacgccgagcaggagctcgtgccgcggtaccaccagcagcggcggtcaccgagcacggcgccacctccttcctcgccacctccgcccggcggtggccaccacagcagtagtagcagcggtggcgggggttatcacaaccaccatcacggccagcaccaccagatgcagtggaagggcggctccaatcccatcgtgtccaaggctgtagacgagatgattggtgtccctgttccgaggaaagcacgctccgcttcaacgaaacgttcttcgcatgagtggcctgtccccggcggcggaaccagtggaggcagcaccggcgcaggagacggctcgcagattcaacggcctttgtcacggccaatctctccagcgtcagcctccactaccgtcccggctcggaagaagcttaaaccacttggaggtgggagcagcggtggtccaggacaagcgtcaaagcagcgaccatcaccgtcgccagctccatcaacaaccccgccacaaccaccgccaccgaagatgtcgaagtcgccgtctttcattcaagaggaaatcgaggttgccgaggtgctgttcggactcaccaggcagttctcgtgccctcccaaacaagaggtcaaccacaagctcgatcccagagatgtgccagagtccaagtgtgggaactcttcgtcggccccctcttctggcgcccgaccctctgattccacctccctttccgctatagcgccaaagaggaagaaaccacggctggcgaagtacgatgaagatagccgtccggcgagcccaacgaagccagagttggtggagccgtcctcaaagccggagccacctcctgtggctagatcagaagcaaagatggcaacgtcggcagcaaccgaaagtggcaccagcaccgcacctgcggctgttcaactcgagactttacgaaagccagagaagacggaggactcagagctccgtccaagcgaaccagatcggcgaaatcacagcctggagagccaggcggagctgccggcgtcgttgccggcgccttcagtcaagccggatgctgaagcaaagccggctccccctcctgggaagctgtctgatgatatagatgcctcctccgaccctgatgcagataagaagggattggattctgagatggacatgttggggagaggaaattcggaaaagaaggatggtgaaaggactctgggagggctggatattgatttggaggaccagaaggtgcaaagaattccagccgatgagtccacgcccaagaagctcacactgcagttggatttggagaagcccagtcttggtgatgaaaaatcaccatcacagcgacggcagccgcatcaacatccacaacaattgcagcagctgaagccctcaaaagctgagataaagcacgagaaatctgctatgcctgctgttacaccacctatacctatacccgttggaggttggcttgggaatttcccaccgtttggtgggttggtttctgaaggtgctgttttgtgtcttggcagttaccttagtccagtcccaggcctatcaggagctggtcttcatcatcccatggacgtgaagccagggtcttctagtggattacagcatgctgcattgcttccaccgccaacacgctcaaagagatgtgctacacattgctacattgcgcaatttatccagcaccagcagcgggttgcaaagatgaactccttctggccgccagctgttgcagcggcagccgccgccgccaacagatcagggccactctttggtgcaaggccattcagcatgggtgttgtgccaccgacagatgctgcctctatgcttgtgaacccaatgcaggggagctaccccatcagggctcacactccaatgcaagaagcaaaggctcctatggctacttcattccaggggagtctctcgaaggataaagcactgggcaatgctgctggtcctgaatcaagccagaggaaacaaccgcctgctcatgaaacacagcagtccactcccatgccaaacatgctgcaagccctggcattcatctttccattcaatcagcaacatgctatggtggcagctgcaaatgctgccaatcgagcaggggatgcaaaatcatctggagccagcaatgcaatgccgccatctgccagtgctcacactttggcagcaaactctggtgccacggccatgaacttgagctttgccaacttgcaaccggctgatgcccagttcttggcgatcttacagaatggataccaattccaggttgctgctcatcctggagggcctccatatcgaggcatggcaccaccaggcccagctgttccattcatcaatggacatgtgtattcctctcccatgctgcacccatcacagcagcaaggtgcgcaaccacaaagtcatcagaagacccagctgccaaacttgcccagttcatcacagaagcaccagccacaacattcccaagggctattgggatatgcaccaaatgctaacgcagcagcagctgctagtaattcgcacaattattcaagtggaaatcagcgccctgtccttgcgcaccgacaggagagtgacaaaactggagaagatggtctatcgagtgatgacaagccatcccactctcagaagagcgggtatgaacacaattttgctgttccagtccatctaccgaattttgcaatgatgccagctgctcaacctgctggcagtcagagtgagaagaagttaagtgaccatcaccaccagcagcagcagccacaagtcagtcgtggccagggtgtgaggattgatcttgcgtcttctcagccttttgtgatgccctttggctccattggtcctcctggatctgccccatctggtctcgacttctcggcattggcgcagagccatgcatttttacagagccatcaagaagcagcccggcatggttatcctcaacttaattttgctgcagctcaatctacgcagcacaagccccagcatggagaaacaaaatctgtcgctggggattcatccttgacacacattgccggagacagccagagaaagaaatcaacttctacaaagtattctggtgattcacagcagcattcgctgtccttcaccaggacagaaagcaagaatcatgtgcctcctttccttagtggcagcacaaatgaaagttcgtcccgaaccctaagccttattggaacagaatcttcaaatacatttatgggaagcaaatccacaaattccaccactcctgcctcaacaccacctgcagcttcgtctagcatttctcagcagcaccagcatttccttcagatgcaagtgcagcataagcatcagcatcagcagatgattcagcaccaccatttgaatcggcctagatctgccgcaccaagtacacaaaatagtgcaggtgggtacccagaccgtctcaatatggcgagctttcagaatatgatgtacccaccaaatgctgcccaaggccaagggagagttcaatccccccagttgaaggcatcctcagggagagggacaccttcatctactgctaccactccccctgctgctgcaccccctaatttgattgtgatgaagacaagtagtctccacccgcaacaagcaaagattcctatgcaggctctctccactcctggtcaccaatcccagagttctctaagcatgagttcatcaaaaatggctcctgtaactaacctttctactggaggaggggatctatctcgatcttcaaatgcccctgttgcttctggttcaccatccaattcggtgtccaaaagcactggtggcagcccgcctgccacaggaaatgcaaagggtgttcagcagcctgtccaattgccatcaccacaacagcagttagccaagaactctgtgtcgacgtgtggctccaagtctactcctgcaaaccatttcagtatggctatgccatctatccttggccaacagcctaattcatcgcctggttctaataccgggagcaagcagcagtcacatatgtcatcgtcaatgaaacagcagccgttccctcaaggccatttcttcatatccagcacgtatgctcctcaggctccaggagccggcggtgctgctgcccttggcctataccagaagcgaccaggcgacaagacacagccacaggcaccacaccagcagaacgccttgtcagcggcaacccagtctgcaggtggtggcatgccacacacccacatgcccgcggcgcaactgagtttcggaacaatgccggtgcctttaaaaccctcaagcgaccagaagcccgctgctggaaaataaacagagcccaggtgaccatgcgtcggagtggtaatctgagctggcgagctcaagtgcttatccagcggaagccccaaatggaggaggaaagatacaatgagaagagaaaagcaggccacagctcgaagaacctgcttttggttgctgctgtggtgatcaggaagggggaggaggggcactgcgaggacacgccttgctaacttaaaaggttgttcgggtctgggaatggctgatgtgagtgaatacttttgtgtagttttggctggttatccatcctcccatcccatggtgtaaaggtcggaggagtgcatagaatctgtctcgtagccccgttttttgtgcatggatggatgtcgaaggctgttctctccctctattctcttgtagcttctccagttcctcgtttcttttgggtggggggtctcagctttaaccggaggaggaaagattcaatcagaatgcagatctcaggtaactttgttatgcaactgatgctcccattacacactgtctgtcgatacactctgactggattgttttagtaccagcaagaagaggagaaaacaaaatctattccaactagaatagggtccagccatgattggtgtgggtggcatacagtgacatgcgtctgggtttgttgttgtaagtagctcttgtgggtggggggggggggggggaggaaatgaatgaatggaattgcctgattatggatgctgtacctgtggccccctgcgacgacagatcattcgcctctgcctctcaatgttgtgatgatgactgtgcagccctcgtccggagatgaaagtggggacagtgcatgtggaggggggagtctagcagctccatcacttgtgtttgatatttctgtgcgtgtgtggatgggcaagatgccgtgctcgtaccagaggaagg

SEQ ID NO: 27198 - DNA, 875 bp, Zea Mays
cctccctcgctcgccgcattataaaagcgagccgcgtatcttgatgcaccttcttccttctccgtccgtcaagggctcaaggctagctaatctatatagcgtgtctcctgcccagacgccggtgaaggtgcagaagagtggccccggggcccgggccggccgtgtgcccctgcgctggtcgagaagatgcgtgccggtggcggccccgccagccgggcgctgcggcgccgtcgtccatggcgagagcgtccgccggccagcctgggtgaattgcgttcgtgccggtgtgatcgactgccgctcctgaacgcctgaggccgcgccgacagaagggatccggcgagcggcgaaccggccggccagccggagcggtaccacggggttggccgtctccgtgtgaccgtgtcagaagagcacagcagccgggacacgaggccggctgcgggtgacctcatcaccctctgcaatctacatcactcactggacttctgatgaaaaaggaggacaaaacagggcctttcagcttctgcgctcatgttctttcttccgtcctctggcactggcagttcagatccacccccctgcaactgcaatttactactactagtactctactcttgcaattttcccagctggtcttgctccatgttcccccttttctccctgctcctggtcctgaactcctgatcgtctagaacgtgggctctaccttgcacgtctctttctcgcacccactcacgttgcactcgaaaaaagagaggagagaaatttgaccgtgatagcactctctattcagaaaataatacgattctaacacagcacataataaatgcaaaattacagcgccagtttacctaccctcacgtgagcataag

SEQ ID NO: 27199 - DNA, 945 bp, Zea Mays
cccctcccctccctcgctcgccgcattataaaagcgagccgcgtatcttgatgcaccttcttccttctccgtccgtcaagggctcaaggctagctaatctatatagcgtgtctcctgcccagacgccggtgaaggtgcagaagagtggccccggggcccgggccggccgtgtgcccctgcgctggtcgagaagatgcgtgccggtggcggccccgccagccgggcgctgcggcgccgtcgtccatggcgagagcgtccgccggccagcctgggtgaattgcgttcgtgccggtgtgatcgactgcgtgagtgagactggggttctgtgtgtcagtgtgtgtgtgtgttcaggtctatccgagagcaagcgctcctgaacgcctgaggccgcgccgacagaagggatccggcgagcggcgaaccggccggccagccggagcggtaccacggggttggccgtctccgtgtgaccgtgtcagaagagcacagcagccgggacacgaggccggctgcgggtgacctcatcaccctctgcaatctacatcactcactggacttctgatgaaaaaggaggacaaaacagggcctttcagcttctgcgctcatgttctttcttccgtcctctggcactggcagttcagatccacccccctgcaactgcaatttactactactagtactctactcttgcaattttcccagctggtcttgctccatgttcccccttttctccctgctcctggtcctgaactcctgatcgtctagaacgtgggctctaccttgcacgtctctttctcgcacccactcacgttgcactcgaaaaaagagaggagagaaatttgaccgtgatagcactctctattcagaaaataatacgattctaacacagcacataataaatgcaaaattacagcgccagtttacctaccctcacgtgagcataag

SEQ ID NO: 27200 - DNA, 1226 bp, Zea Mays
agcacgggtcacctcgccgggatcccacctcgccagtgccgcctcgccgctctcccacatcgtgtcctccgccccttcgcacggacgcacacgcacctcacctctcacaattccacacctcacctctccgcttcgcttcttgtcgctgcggcgcgcggccatggtctccctccgcttccctaccgctgccatcccccgcctcccgccatcccaggcccccaacggcgtcgccatcgctgccacggtcgccgctgcagccgcggccgcagctgcagtagcggccagcttgaccctcacgggcaagtccactggccggccagtcccgcaccctgcccctctctgggcctccctctccctggccgacgcggcggcccccagctccgtcgaaccccggaccggcgcgacattccccaccgaggccgccgttgggcgccgcctactcggcataggcctccggaagaccagcgtcctcgggctcaagtccatcgacgtctacgcattcggcgtgtatgcggatgacaacgatttgaaacagcagctgaaggagaagtactcgaagttctcggtctcggaactgaagggaaacgcgcatttgagaagagtgtgggaagtaggcttcagaagttcggtggacaagacaccaaagagttgcttcagagctttgttgcggttttcaaggatgaatacaaattaccaaaggggtctgtgattgagctttcgagagaatctaaccatgtccttaaaatttgcattgaaggcgaggaagtggggagcattcagagcaagctcttgtgcaagtctctcttagatctctatatcggagatgacccctttgacgaaaatgcgaaagacgacatccatgaaaatatagctagcattcttaaaagttaaatgggatgcttaaggaaggttacatggaactgggagatttttcagggaagatatttttaattccagcaatacctcgactgtgcctagtaagtagcgcacaagtttttttcagtagcgcgtgaggaaaaggatagatccttccaagtacagccttttccaagtcgtgtgtgatgttgttccacgtcctccgtgaaagcggcaaactcctggccctcatatctcgttggttctgtcagcgtaagaaagaccagcaagctgttgcaatcgtccttcaggaactgtttctcatacggcaaactcaagacctgtcggtctcattgcagcccggagttggc

SEQ ID NO: 27201 - DNA, 1371 bp, Zea Mays
agcacgggtcacctcgccgggatcccacctcgccagtgccgcctcgccgctctcccacatcgtgtcctccgccccttcgcacggacgcacacgcacctcacctctcacaattccacacctcacctctccgcttcgcttcttgtcgctgcggcgcgcggccatggtctccctccgcttccctaccgctgccatcccccgcctcccgccatcccaggcccccaacggcgtcgccatcgctgccacggtcgccgctgcagccgcggccgcagctgcagtagcggccagcttgaccctcacgggcaagtccactggccggccagtcccgcaccctgcccctctctgggcctccctctccctggccgacgcggcggcccccagctccgtcgaaccccggaccggcgcgacattccccaccgaggccgccgttgggcgccgcctactcggcataggcctccggaagaccagcgtcctcgggctcaagtccatcgacgtctacgcattcggcgtgtatgcggatgacaacgatttgaaacagcagctgaaggagaagtactcgaagttctcggtctcggaactgaagggaaacggtgagctgatcaacgatgcgctagagcgtgacataccgatgacggtcaggctgcagattgtttatgggaggctgagtattcgctcggttcgcagcgcatttgagaagagtgtgggaagtaggcttcagaagttcggtggacaagacaccaaagagttgcttcagagctttgttgcggttttcaaggatgaatacaaattaccaaaggggtctgtgattgagctttcgagagaatctaaccatgtccttaaaatttgcattgctcatatgttaaatcagatagtctgactcactgcagggaaataatgttttgaaggcgaggaagtggggagcattcagagcaagctcttgtgcaagtctctcttagatctctatatcggagatgacccctttgacgaaaatgcgaaagacgacatccatgaaaatatagctagcattcttaaaagttaaatgggatgcttaaggaaggttacatggaactgggagatttttcagggaagatatttttaattccagcaatacctcgactgtgcctagtaagtagcgcacaagtttttttcagtagcgcgtgaggaaaaggatagatccttccaagtacagccttttccaagtcgtgtgtgatgttgttccacgtcctccgtgaaagcggcaaactcctggccctcatatctcgttggttctgtcagcgtaagaaagaccagcaagctgttgcaatcgtccttcaggaactgtttctcatacggcaaactcaagacctgtcggtctcattgcagcccggagttggc

SEQ ID NO: 27202 - DNA, 1169 bp, Zea Mays
aaagagaatttgtagattcttctataatcataacaggttacatgctatgatgtgagagaaattggtggtgagctagttcggtggaacgcaactaggtttggtactgtttttatttttctgcagagttttttggatagaaaagataaatttaagttgtggatggcatcagctgattgggagaactgtaagtgggctggtgaagaagatcatgaattcgcatatgattgtttgacaaaaaataaatggtggagtgacatggaaaaggttttgaaagcggtgtccccaatctaccctgtacttcgtttagcttatcaacagaagagtgtgtctatatcgtcttttcttccaaaaatgatgagtgctatggctaaaatacgatccaatttgggtgatgatcctatcaacaaaaatctgtgtgatagattaatgtaagtaatcaatagaagacttgactatatgctcaatgatactcttatgcttgcagttgctgcccttaaccctgaagcgctatatacttccaaaatggcaagaaaaccgaagttccaacatgctgtgacaatggccataaagaaactttcaagctcatcttcaaaggcttcagctgcaattgatcaatattctttcttcagaaagcaagctcggttatttggaggagaagaggctaaagattcagcacttaatggccgcgcaagtgcaggtggtggtgatgacgaagatggtgaacctagtggtccatgttttgcagctaggacacaacctaaattagctacagaccaatataatggtcctggtcaagatgaacaagcagcgcctctccgtccaagatcaaaaaggcagaagaagctctccatcaagggcctgtacatgcttcagaagtgatctaatcttcaagcacaagcacaagaatatggcgtatacatggactgattcaatggcaagattttgaacatgtggctctattgtatcaattgtgtgctttgtttcagtttcaacacaatattgctgccatatttggttcatgtggcctaacaatatttataactgtgattgatttctatgcattatttgaactatggactaccaaatatttgtgacacaccactagtgttatattcaccggtgcatggatgttgccaaagaactttatttatgtaatatttggtttattt

SEQ ID NO: 27203 - DNA, 883 bp, Zea Mays
caagtagctgcttctcatccggcgccaggtccagtgcgcgcgccttatctgctgcagctgcttgtcgtcctcgttcgtcgtccctcggcaccggcaggtccagaccgacgctgcgctcagtttgaagctcctccatggcgtcggactgggactgggacagcgacagcgactgtgaagtacgcatgattaaccatccttgcgagcgtcgtgctggtgctgctactcaagcagagaaaggaaaggctatgggcgtatgttcttccacaagttacatgctatgatgtgagagaaattggtggtgagctagttcggtggaacgcaactaggtttggtactgtttttatttttctgcagagttttttggatagaaaagataaatttaagttgtggatggcatcagctgattgggagaactgtaagtgggctggtgaagaagatcatgaattcgcatatgattgtttgacaaaaaataaatggtggagtgacatggaaaaggttttgaaagcggtgtccccaatctaccctgtacttcgtttagcttatcaacagaagagtgtgtctatatcgtcttttcttccaaaaatgatgagtgctatggctaaaatacgatccaatttgggtgatgatcctatcaacaaaaatctgtgtgatagattaatgtaagtaatcaatagaagacttgactatatgctcaatgatactcttatgcttgcagttgctgcccttaaccctgaagcgctatatacttccaaaatggcaagaaaaccgaagttccaacatgctgtgacaatggccataaagaaactttcaagctcatcttcaaaggcttcagctgcaattgatcaatattctttcttcagaaagcaagctcggttatttggag

SEQ ID NO: 27204 - DNA, 1092 bp, Zea Mays
aggaaattgcctgatgaccaagcaattctgcaaccgctggcaggcatgtcacacacaggcttgtaaaatgtccaggcctcgtctcgtttcctcttcgctcccccgtgacatcagacccgaatcgcgagcagcgatctgtacgtcgtccccgttcgcacgcctagcgcgatggcgcacccgatgtacggctccgggccactcagatccaggaacgcggcgaactcggacgaaatccagctgcggatcgacccggtgcacggggacctcgacgaggagatcgacgggctgcaatccagggtccgcatgctcaaaggggtggcccaggagataaattctgaagccaagtcccagaatgattttcttcatgaactgcaaatgaccctcgcaaaagctcaggctggagtgaagaacaacatgcggaggttgaacaagagcatcatccagcagggctcaaaccatgttctccatgttgttctctttgcactgttttgcttcttcattgtctacctcttgtcaaagttctctagaagataattatgtcttcggtgggcaaatctagaataccatgatttgtatgtagtctaaagggaaagcaaaatgctattgtacttttatttggccttgtatcctcggtctatttgtcgaaagttgaaacaaatgagaaaaggggaaattagtacctctaagggctagtttggaaactcaaatccccttcgggattgaaggggattggagaggaaattaatttatttccacctcaatcttctccaatatcgaaggggatatgaggttcccaaagtagccctgagggttgatttggtgacaagtgaattgaaggggatccatgtgaggaaatcacttgctattcaccgttgggtgtttcgttgagtgtatgcaacgagttgagcatggatgaaaactggcatatactgggatgaaaaggacaaatgttaaccacatcattcagaacaattgcatagcttgtatgtgaatccattccagttttttttataagattatgttccattgtaactgtctggggtggttttgtgtcccacctatatatgggcttatcattgccgccttgagttc

SEQ ID NO: 27205 - DNA, 1021 bp, Zea Mays
aggaaattgcctgatgaccaagcaattctgcaaccgctggcagacccgaatcgcgagcagcgatctgtacgtcgtccccgttcgcacgcctagcgcgatggcgcacccgatgtacggctccgggccactcagatccaggaacgcggcgaactcggacgaaatccagctgcggatcgacccggtgcacggggacctcgacgaggagatcgacgggctgcaatccagggtccgcatgctcaaaggggtggcccaggagataaattctgaagccaagtcccagaatgattttcttcatgaactgcaaatgaccctcgcaaaagctcaggctggagtgaagaacaacatgcggaggttgaacaagagcatcatccagcagggctcaaaccatgttctccatgttgttctctttgcactgttttgcttcttcattgtctacctcttgtcaaagttctctagaagataattatgtcttcggtgggcaaatctagaataccatgatttgtatgtagtctaaagggaaagcaaaatgctattgtacttttatttggccttgtatcctcggtctatttgtcgaaagttgaaacaaatgagaaaaggggaaattagtacctctaagggctagtttggaaactcaaatccccttcgggattgaaggggattggagaggaaattaatttatttccacctcaatcttctccaatatcgaaggggatatgaggttcccaaagtagccctgagggttgatttggtgacaagtgaattgaaggggatccatgtgaggaaatcacttgctattcaccgttgggtgtttcgttgagtgtatgcaacgagttgagcatggatgaaaactggcatatactgggatgaaaaggacaaatgttaaccacatcattcagaacaattgcatagcttgtatgtgaatccattccagttttttttataagattatgttccattgtaactgtctggggtggttttgtgtcccacctatatatgggcttatcattgccgccttgagttc

SEQ ID NO: 27206 - DNA, 1281 bp, Zea Mays
ctctgtggaaattggcaaattgactgtcctggttgatggttgccgaacgccaggcgtagtaaaatgagtgtatactgtttctgacgcggctgcttggcctgccattctctttcgcccactcgggcacgtacggcaaccaggaaattgcctgatgaccaagcaattctgcaaccgctggcaggcatgtcacacacaggcttgtaaaatgtccaggcctcgtctcgtttcctcttcgctcccccgtgacatcagacccgaatcgcgagcagcgatctgtacgtcgtccccgttcgcacgcctagcgcgatggcgcacccgatgtacggctccgggccactcagatccaggaacgcggcgaactcggacgaaatccagctgcggatcgacccggtgcacggggacctcgacgaggagatcgacgggctgcaatccagggtccgcatgctcaaagggtggcttcgtactgtttaaggccttgctgttgcaagctctgctctattacaggtggcccaggagataaattctgaagccaagtcccagaatgattttcttcatgaactgcaaatgaccctcgcaaaagctcaggctggagtgaagaacaacatgcggaggttgaacaagagcatcatccagcagggctcaaaccatgttctccatgttgttctctttgcactgttttgcttcttcattgtctacctcttgtcaaagttctctagaagataattatgtcttcggtgggcaaatctagaataccatgatttgtatgtagtctaaagggaaagcaaaatgctattgtacttttatttggccttgtatcctcggtctatttgtcgaaagttgaaacaaatgagaaaaggggaaattagtacctctaagggctagtttggaaactcaaatccccttcgggattgaaggggattggagaggaaattaatttatttccacctcaatcttctccaatatcgaaggggatatgaggttcccaaagtagccctgagggttgatttggtgacaagtgaattgaaggggatccatgtgaggaaatcacttgctattcaccgttgggtgtttcgttgagtgtatgcaacgagttgagcatggatgaaaactggcatatactgggatgaaaaggacaaatgttaaccacatcattcagaacaattgcatagcttgtatgtgaatccattccagttttttttataagattatgttccattgtaactgtctggggtggttttgtgtcccacctatatatgggcttatcattgccgccttgagttc

SEQ ID NO: 27207 - DNA, 1215 bp, Zea Mays
ctctgtggaaattggcaaattgactgtcctggttgatggttgccgaacgccaggcgtagtaaaatgagtgtatactgtttctgacgcggctgcttggcctgccattctctttcgcccactcgggcacgtacggcaaccaggaaattgcctgatgaccaagcaattctgcaaccgctggcagatcagacccgaatcgcgagcagcgatctgtacgtcgtccccgttcgcacgcctagcgcgatggcgcacccgatgtacggctccgggccactcagatccaggaacgcggcgaactcggacgaaatccagctgcggatcgacccggtgcacggggacctcgacgaggagatcgacgggctgcaatccagggtccgcatgctcaaagggtggcttcgtactgtttaaggccttgctgttgcaagctctgctctattacaggtggcccaggagataaattctgaagccaagtcccagaatgattttcttcatgaactgcaaatgaccctcgcaaaagctcaggctggagtgaagaacaacatgcggaggttgaacaagagcatcatccagcagggctcaaaccatgttctccatgttgttctctttgcactgttttgcttcttcattgtctacctcttgtcaaagttctctagaagataattatgtcttcggtgggcaaatctagaataccatgatttgtatgtagtctaaagggaaagcaaaatgctattgtacttttatttggccttgtatcctcggtctatttgtcgaaagttgaaacaaatgagaaaaggggaaattagtacctctaagggctagtttggaaactcaaatccccttcgggattgaaggggattggagaggaaattaatttatttccacctcaatcttctccaatatcgaaggggatatgaggttcccaaagtagccctgagggttgatttggtgacaagtgaattgaaggggatccatgtgaggaaatcacttgctattcaccgttgggtgtttcgttgagtgtatgcaacgagttgagcatggatgaaaactggcatatactgggatgaaaaggacaaatgttaaccacatcattcagaacaattgcatagcttgtatgtgaatccattccagttttttttataagattatgttccattgtaactgtctggggtggttttgtgtcccacctatatatgggcttatcattgccgccttgagttc

SEQ ID NO: 27208 - DNA, 1563 bp, Zea Mays
gccatgagcccatgacccagagcagtgccgcacacagacaggcagcagccctctccctccctccctcccgcccgcccccactagtcaatactgagcacaatacgccacccaccacccctccatcaaagaaaagggcggcaggccgggggaggggaaggggctgagcatcagagcatgacgtcgggagcggcggcggtgggaggcctcgggcggacgccgacatggaaggagcgggagaacaacaagcgccgggagcgccggcggagggccatcgccgccaagatcttcacgggcctccgcgcgctcggcaactacaagctgcccaagcactgcgacaacaacgaggtgctcaaggcgctgtgccgcgaggcggggtgggtcgtcgaggacgacggcaccacctaccgaaagggatgcaagccgccgccagggatgatgagcccgtgctcgtcctcgcagctgctgagcgcgccgtcctcgagcttcccgagcccggtgccgtcctaccacgccagcccggcgtcgtcgagcttcccgagcccgacgcgcctcgaccacggcagcggcagcaacagccacacccccggccccgccgccgcagcagccgcagcggcggcggcggcctcctccctgctcccgttcctccggggcctgccgccgctccgcgtctccagcagcgcgcccgtgacgccgccgctctcgtcgcccacggcgggcgtcgcggccgcccgccaagcccgacccgcgcgcgccggcgcgaagagcacccggacaccatccccgagtgcgacgagtccgacgtctgctgctccgcggtggcggactccggccgctggatcagcttccagatcggggcggccaccacggcgcccgcgtcgcccgcgtacaacctcgtcaacccggccggtggcggcggcggcgcgtccgcttccgactccatggagctggacggggtggcgggcgcggagttcgagttcgacaagggccgcgtcacgccgtgggaaggcgagcgcatccacgaggtcgccgccgaggagctcgagctcacgctcggcgtcggcgccaagtgagtgaagcggccacggccgtcgtcgcgctcacagcaagctcgggatctttgagctcccctacagcaatgccgggagtaggagacgattgctgtgagaccggcaacaaaaaaaagtgtgtagttcgtgccttcgtggtcgcatgagaaattgtcgacgcattcattcgtgctgcgattggatcgggcataagtatttcggtgtaggtgatgattctgttgttttgattcatggactggtaaaatgaggtgaatcggaacagtcgatcgtccgtccggattgaattattgataacgctggctcgtcctttgttagcgcttcgaaatgcgtggtctcgtgggtaaaaaagaggacgcgctgaactttgtggctggacgatcttgtctctcttggtcttggccgtgactgtgactgcacgacattttactcttcacgtgctactcttgtttttatttttgacagtttatcacagtgggactgtgggagtatcttctct

SEQ ID NO: 27209 - DNA, 686 bp, Zea Mays
cttcgtactaagagcacctccaacaggctagttcttcatactgctttcctgctccctggcggtgttctgcaacatgagccaatacctctgcatcgggcggttctcagcgacctcattccaggtcctgggccacatgaagaccgtgtgcgtgctgatcctgggctggatcctgtttgactcggccctcaccgtgaagaacatcctcgggatgctgctcgccgtgatgggcatggtggtctacagctgggccgtggaagcggagaagaaggcggcagccccgatcccccggaacaagggcggcatgctcgacggcgaggacgtgcccctcaaggccagggtgagcggcgtgcccgcggtcgacctcgaggacggcgacgtgaagggctagccgctgatccgttcattcttctcgttcttttgtaactgtgcgcgcgcggtcgctcgatgcaaagttgcttgttcgtcggttctcagctatcgacactacactgttaattttgttggccccttgttggggggagtctgctcgtaggtgaccccccctcccccgggttcgacgtagatgaaacacacgcgggcaaattgttaggatttttcaggcggggaggtggcgacatgctgttatagatggtgacaagactttatataatggaaatgcaggtgtttttgaggtttcgctgttcagt

SEQ ID NO: 27210 - DNA, 1693 bp, Zea Mays
ctcctcgtcaccccgcgagcttttttcaccgctgccctgccctgcccccgcgcccgttgacgtttccggcccccaattcgaaagcctcgcgctccccgttgctcccttccttgcctaggcggcaacgccctcgtgctttataacccagcggcccctcccgcgtgaggcaaccgagacgggaggagaccagaccagcagcagcccatccgaaccccgcctcctcctcctcctcccgggttcgcgtgaggctgtgtgctgctgggaggcggcgccggcgccggcgccatggaggcggagaagaagccgccggcggtgtccgacgtgggcgcgtgggcgatgaacgtcgtcagctccgtcagcctcatcatggccaacaagcagctcatgtcctcctccggctacgccttcgccttcgccaccacgctcaccgggttccacttcaccgtcacggcgctcgtcgggtggatctccaacgccaccggctactccgtctccaagcacgtcccgctctgggagctcgtctggttctcgctcgtcgccaacacctccatcaccgggatgaacctcagcctcatgctcaactccgtcggattctaccagatctccaaactgagcatgattccggtggtctgcctcatggaatgggtgctcaacagcaagcactacaccactaaggtcatatccgcagtcatcgtcgtggccgccggtgtcgggatttgtactgtcacggatgtcgaggtcaatgccaaggggttcatctgcgcttgcgtggcagtgttctgcacgtcgcttcaacagatccaaggcactgttattggaagcccgaactttgcaactcggctctgaactacagtaatacagatcaatggtaaaaagacaattggctcctttcagaagaagtacaacattggatcatttgagctgctgagcaaaactgcgccaattcaggcactttcactcattatactgggcccctttgtggactactatctaaatgggcggtcattgttgaactaccctttttcaggaggggcaactttcttcatactgctttcctgctccctggcggtgttctgcaacatgagccaatacctctgcatcgggcggttctcagcgacctcattccaggtcctgggccacatgaagaccgtgtgcgtgctgatcctgggctggatcctgtttgactcggccctcaccgtgaagaacatcctcgggatgctgctcgccgtgatgggcatggtggtctacagctgggccgtggaagcggagaagaaggcggcagccccgatcccccggaacaagggcggcatgctcgacggcgaggacgtgcccctcaaggccagggtgagcggcgtgcccgcggtcgacctcgaggacggcgacgtgaagggctagccgctgatccgttcattcttctcgttcttttgtaactgtgcgcgcgcggtcgctcgatgcaaagttgcttgttcgtcggttctcagctatcgacactacactgttaattttgttggccccttgttggggggagtctgctcgtaggtgaccccccctcccccgggttcgacgtagatgaaacacacgcgggcaaattgttaggatttttcaggcggggaggtggcgacatgctgttatagatggtgacaagactttatataatggaaatgcaggtgtttttgaggtttcgctgttcagt

SEQ ID NO: 27211 - DNA, 1697 bp, Zea Mays
ctcctcgtcaccccgcgagcttttttcaccgctgccctgccctgcccccgcgcccgttgacgtttccggcccccaattcgaaagcctcgcgctccccgttgctcccttccttgcctaggcggcaacgccctcgtgctttataacccagcggcccctcccgcgtgaggcaaccgagacgggaggagaccagaccagcagcagcccatccgaaccccgcctcctcctcctcctcccgggttcgcgtgaggctgtgtgctgctgggaggcggcgccggcgccggcgccatggaggcggagaagaagccgccggcggtgtccgacgtgggcgcgtgggcgatgaacgtcgtcagctccgtcagcctcatcatggccaacaagcagctcatgtcctcctccggctacgccttcgccttcgccaccacgctcaccgggttccacttcaccgtcacggcgctcgtcgggtggatctccaacgccaccggctactccgtctccaagcacgtcccgctctgggagctcgtctggttctcgctcgtcgccaacacctccatcaccgggatgaacctcagcctcatgctcaactccgtcggattctaccagatctccaaactgagcatgattccggtggtctgcctcatggaatgggtgctcaacagcaagcactacaccactaaggtcatatccgcagtcatcgtcgtggccgccggtgtcgggatttgtactgtcacggatgtcgaggtcaatgccaaggggttcatctgcgcttgcgtggcagtgttctgcacgtcgcttcaacagatcgcagcaaggcactgttattggaagcccgaactttgcaactcggctctgaactacagtaatacagatcaatggtaaaaagacaattggctcctttcagaagaagtacaacattggatcatttgagctgctgagcaaaactgcgccaattcaggcactttcactcattatactgggcccctttgtggactactatctaaatgggcggtcattgttgaactaccctttttcaggaggggcaactttcttcatactgctttcctgctccctggcggtgttctgcaacatgagccaatacctctgcatcgggcggttctcagcgacctcattccaggtcctgggccacatgaagaccgtgtgcgtgctgatcctgggctggatcctgtttgactcggccctcaccgtgaagaacatcctcgggatgctgctcgccgtgatgggcatggtggtctacagctgggccgtggaagcggagaagaaggcggcagccccgatcccccggaacaagggcggcatgctcgacggcgaggacgtgcccctcaaggccagggtgagcggcgtgcccgcggtcgacctcgaggacggcgacgtgaagggctagccgctgatccgttcattcttctcgttcttttgtaactgtgcgcgcgcggtcgctcgatgcaaagttgcttgttcgtcggttctcagctatcgacactacactgttaattttgttggccccttgttggggggagtctgctcgtaggtgaccccccctcccccgggttcgacgtagatgaaacacacgcgggcaaattgttaggatttttcaggcggggaggtggcgacatgctgttatagatggtgacaagactttatataatggaaatgcaggtgtttttgaggtttcgctgttcagt

SEQ ID NO: 27212 - DNA, 1679 bp, Zea Mays
aaactatatgctagtatatcaaaatacactacaagattgtggcacaaatttaaacaaacaatgtcactccaactggggtgaattttactaagatacatctgaattgcatatatagttacctaaatcagctttcaggcagtccatcgcacacaccacgccttgtcaggaaataacagcaactaaacaagcaagatgcaccagaaatagacgacgcagacacgcagtacatactaacacagacacctgaccagaccagcagcagcccatccgaaccccgcctcctcctcctcctcccgggttcgcgtgaggctgtgtgctgctgggaggcggcgccggcgccggcgccatggaggcggagaagaagccgccggcggtgtccgacgtgggcgcgtgggcgatgaacgtcgtcagctccgtcagcctcatcatggccaacaagcagctcatgtcctcctccggctacgccttcgccttcgccaccacgctcaccgggttccacttcaccgtcacggcgctcgtcgggtggatctccaacgccaccggctactccgtctccaagcacgtcccgctctgggagctcgtctggttctcgctcgtcgccaacacctccatcaccgggatgaacctcagcctcatgctcaactccgtcggattctaccagatctccaaactgagcatgattccggtggtctgcctcatggaatgggtgctcaacagcaagcactacaccactaaggtcatatccgcagtcatcgtcgtggccgccggtgtcgggatttgtactgtcacggatgtcgaggtcaatgccaaggggttcatctgcgcttgcgtggcagtgttctgcacgtcgcttcaacagatcacaattggctcctttcagaagaagtacaacattggatcatttgagctgctgagcaaaactgcgccaattcaggcactttcactcattatactgggcccctttgtggactactatctaaatgggcggtcattgttgaactaccctttttcaggaggggcaactttcttcatactgctttcctgctccctggcggtgttctgcaacatgagccaatacctctgcatcgggcggttctcagcgacctcattccaggtcctgggccacatgaagaccgtgtgcgtgctgatcctgggctggatcctgtttgactcggccctcaccgtgaagaacatcctcgggatgctgctcgccgtgatgggcatggtggtctacagctgggccgtggaagcggagaagaaggcggcagccccgatcccccggaacaagggcggcatgctcgacggcgaggacgtgcccctcaaggccagggtgagcggcgtgcccgcggtcgacctcgaggacggcgacgtgaagggctagccgctgatccgttcattcttctcgttcttttgtaactgtgcgcgcgcggtcgctcgatgcaaagttgcttgttcgtcggttctcagctatcgacactacactgttaattttgttggccccttgttggggggagtctgctcgtaggtgaccccccctcccccgggttcgacgtagatgaaacacacgcgggcaaattgttaggatttttcaggcggggaggtggcgacatgctgttatagatggtgacaagactttatataatggaaatgcaggtgtttttgaggtttcgctgttcagt

SEQ ID NO: 27213 - DNA, 956 bp, Zea Mays
ctaacccttaacaagtttttgtggcttaagttttgaagttttacaggatcacctattcacccccccccctctaggtgctctcagaagtaaagcaaggatttacattgtgctggaattcgttatgggtggagagctccacgatatcattgccacaagtgggagactgaaggaggacgaagcgcgcagatactttcagcagctgataaatgttgtagactactgccacaggttgtgtatgtaagtggtggaaaagctcatggaaggtacacaatgtttgctaacgttaccgactcgagccaggtgagggttcagcatggaggttcatcgaggtctgctgctcgtagctcccgtcgctccactcaagatccagcagaagtggagcaactacgagaagaacttggtgacatcaggattacttgaagcaacaagctgcgcaacatgaatattatgctacacagattcagcaacagcaaaacactcatacaacaactagcacaagcccaagggatacacgtcccggtgccccccacctcccgttcattatcattggtcttcacctccaccaatacctacatctccatctaccgaacatcagacccctctagctaccttgccgacgcatgaacaagaggacgggttagactttgtcgaaaccctcttcaatagtggaggtatcgaccatcactcttcattgtaacctgatggtgatcggcgaccgtgagcttccatgttattgtgttctgatacttgagacttttattatgactatgtatgagatattgtctcttattagtaccggatgatgagatgtgtcttattatgactatggatgagacttttgtgatgtaattgatgagactatggatgagacttttgtgatgtaattgatgagactatggatttaaatattgttatgtgattgtgtgtgagatgttttatgtgaaaatatgttgtgt

SEQ ID NO: 27214 - DNA, 1076 bp, Zea Mays
cctttctcagcgtctctctgtctccaagcgcgtcgtccgcctctcccacgcccggccgcccccgctgagccctcggccccggccgcccctcgcgcgcccggccgcccccgccgcgcccggccccgacgcgcaaggccgccccggcccagccgcggacgcccccgacgcgctcgccaccgatgtgcccgcccccgactcgccgtaacgctccctgtgtcgtgtcgtttcttgcagtcctctcctccctgcctccatatctcccacctcggccctctctccacgcgcttcacttcatccctgacgccgacgccgacgactccggccgctcaccccgacgaacgcgcgcgcgctcgcactttctgacgactccctccccggcccggctgcctgtcactgtctctccccttcgttcacgaagcagcagcagctgtaggatgtacagggctaagagagctgcttcgctcagagcgaagcgccagcgccttggcaagtacgagctcggatgcaccatcggggaagggacatttgccaaggtccggatcgccaagaacatggacactggggatcatgttgccatcaagatcctcgacaaggccaaggttcacaagaataaactagctgagcagattaggagggaaatctatacgatgaagctaatacaacatcccaatgttgttcgcctgtacgaggggatgggaagttgaaagggaaatgtgcccttaggccatttctaagtattttggtgattgagtatcaacacaagtgcttaaatgtgaatcaatacccatggatgaacaaagtgcaaatcttcaacaaaggtatgtttctaagtcttagtacattggttttgtgtactaatatatttgtctaagtattagaaacagatagaagaagagaagagaagacttggctgtgtacagccaaggggctgtttcggtctggggcaccggactgtccggtggtgcaccggacagtgtccggtgcgccaggctccctcggccgaagagcccgctctcgggtttttctccggcgacttcggctaaaattcaccggactgtccggtgtacaccggactg

SEQ ID NO: 27215 - DNA, 1111 bp, Zea Mays
cctttctcagcgtctctctgtctccaagcgcgtcgtccgcctctcccacgcccggccgcccccgctgagccctcggccccggccgcccctcgcgcgcccggccgcccccgccgcgcccggccccgacgcgcaaggccgccccggcccagccgcggacgcccccgacgcgctcgccaccgatgtgcccgcccccgactcgccgtaacgctccctgtgtcgtgtcgtttcttgcagtcctctcctccctgcctccatatctcccacctcggccctctctccacgcgcttcacttcatccctgacgccgacgccgacgactccggccgctcaccccgacgaacgcgcgcgcgctcgcactttctgacgactccctccccggcccggctgcctgtcactgtctctccccttcgttcacgaagcagcagaccagttggagaaagacgcgatccaacagatttcttcccttgtatgcctgccaattctgaacacgtagcaactcaacccttgttcatcgatcttgcagcagctgtaggatgtacagggctaagagagctgcttcgctcagagcgaagcgccagcgccttggcaagtacgagctcggatgcaccatcggggaagggacatttgccaaggtccggatcgccaagaacatggacactggggatcatgttgccatcaagatcctcgacaaggccaaggttcacaagaataaactagctgagcaggggatgggaagttgaaagggaaatgtgcccttaggccatttctaagtattttggtgattgagtatcaacacaagtgcttaaatgtgaatcaatacccatggatgaacaaagtgcaaatcttcaacaaaggtatgtttctaagtcttagtacattggttttgtgtactaatatatttgtctaagtattagaaacagatagaagaagagaagagaagacttggctgtgtacagccaaggggctgtttcggtctggggcaccggactgtccggtggtgcaccggacagtgtccggtgcgccaggctccctcggccgaagagcccgctctcgggtttttctccggcgacttcggctaaaattcaccggactgtccggtgtacaccggactg

SEQ ID NO: 27216 - DNA, 1013 bp, Zea Mays
cctttctcagcgtctctctgtctccaagcgcgtcgtccgcctctcccacgcccggccgcccccgctgagccctcggccccggccgcccctcgcgcgcccggccgcccccgccgcgcccggccccgacgcgcaaggccgccccggcccagccgcggacgcccccgacgcgctcgccaccgatgtgcccgcccccgactcgccgtaacgctccctgtgtcgtgtcgtttcttgcagtcctctcctccctgcctccatatctcccacctcggccctctctccacgcgcttcacttcatccctgacgccgacgccgacgactccggccgctcaccccgacgaacgcgcgcgcgctcgcactttctgacgactccctccccggcccggctgcctgtcactgtctctccccttcgttcacgaagcagcagcagctgtaggatgtacagggctaagagagctgcttcgctcagagcgaagcgccagcgccttggcaagtacgagctcggatgcaccatcggggaagggacatttgccaaggtccggatcgccaagaacatggacactggggatcatgttgccatcaagatcctcgacaaggccaaggttcacaagaataaactagctgagcaggggatgggaagttgaaagggaaatgtgcccttaggccatttctaagtattttggtgattgagtatcaacacaagtgcttaaatgtgaatcaatacccatggatgaacaaagtgcaaatcttcaacaaaggtatgtttctaagtcttagtacattggttttgtgtactaatatatttgtctaagtattagaaacagatagaagaagagaagagaagacttggctgtgtacagccaaggggctgtttcggtctggggcaccggactgtccggtggtgcaccggacagtgtccggtgcgccaggctccctcggccgaagagcccgctctcgggtttttctccggcgacttcggctaaaattcaccggactgtccggtgtacaccggactg

SEQ ID NO: 27217 - DNA, 1073 bp, Zea Mays
cctttctcagcgtctctctgtctccaagcgcgtcgtccgcctctcccacgcccggccgcccccgctgagccctcggccccggccgcccctcgcgcgcccggccgcccccgccgcgcccggccccgacgcgcaaggccgccccggcccagccgcggacgcccccgacgcgctcgccaccgatgtgcccgcccccgactcgccgtaacgctccctgtgtcgtgtcgtttcttgcagtcctctcctccctgcctccatatctcccacctcggccctctctccacgcgcttcacttcatccctgacgccgacgccgacgactccggccgctcaccccgacgaacgcgcgcgcgctcgcactttctgacgactccctccccggcccggctgcctgtcactgtctctccccttcgttcacgaagcagcagctgtaggatgtacagggctaagagagctgcttcgctcagagcgaagcgccagcgccttggcaagtacgagctcggatgcaccatcggggaagggacatttgccaaggtccggatcgccaagaacatggacactggggatcatgttgccatcaagatcctcgacaaggccaaggttcacaagaataaactagctgagcagattaggagggaaatctatacgatgaagctaatacaacatcccaatgttgttcgcctgtacgaggggatgggaagttgaaagggaaatgtgcccttaggccatttctaagtattttggtgattgagtatcaacacaagtgcttaaatgtgaatcaatacccatggatgaacaaagtgcaaatcttcaacaaaggtatgtttctaagtcttagtacattggttttgtgtactaatatatttgtctaagtattagaaacagatagaagaagagaagagaagacttggctgtgtacagccaaggggctgtttcggtctggggcaccggactgtccggtggtgcaccggacagtgtccggtgcgccaggctccctcggccgaagagcccgctctcgggtttttctccggcgacttcggctaaaattcaccggactgtccggtgtacaccggactg

SEQ ID NO: 27218 - DNA, 714 bp, Zea Mays
cctttctcagcgtctctctgtctccaagcgcgtcgtccgcctctcccacgcccggccgcccccgctgagccctcggccccggccgcccctcgcgcgcccggccgcccccgccgcgcccggccccgacgcgcaaggccgccccggcccagccgcggacgcccccgacgcgctcgccaccgatgtgcccgcccccgactcgccgtaacgctccctgtgtcgtgtcgtttcttgcagtcctctcctccctgcctccatatctcccacctcggccctctctccacgcgcttcacttcatccctgacgccgacgccgacgactccggccgctcaccccgacgaacgcgcgcgcgctcgcactttctgacgactccctccccggcccggctgcctgtcactgtctctccccttcgttcacgaagcagcagcagctgtaggatgtacagggctaagagagctgcttcgctcagagcgaagcgccagcgccttggcaagtacgagctcggatgcaccatcggggaagggacatttgccaaggtccggatcgccaagaacatggacactggggatcatgttgccatcaagatcctcgacaaggccaaggttcacaagaataaactagctgagcaggagggaaatctatacgatgaagctaatacaacatcccaatgttgttcgcctgtacgaggtaaaagcttcaactttccctcctaattaa

SEQ ID NO: 27219 - DNA, 711 bp, Zea Mays
cctttctcagcgtctctctgtctccaagcgcgtcgtccgcctctcccacgcccggccgcccccgctgagccctcggccccggccgcccctcgcgcgcccggccgcccccgccgcgcccggccccgacgcgcaaggccgccccggcccagccgcggacgcccccgacgcgctcgccaccgatgtgcccgcccccgactcgccgtaacgctccctgtgtcgtgtcgtttcttgcagtcctctcctccctgcctccatatctcccacctcggccctctctccacgcgcttcacttcatccctgacgccgacgccgacgactccggccgctcaccccgacgaacgcgcgcgcgctcgcactttctgacgactccctccccggcccggctgcctgtcactgtctctccccttcgttcacgaagcagcagctgtaggatgtacagggctaagagagctgcttcgctcagagcgaagcgccagcgccttggcaagtacgagctcggatgcaccatcggggaagggacatttgccaaggtccggatcgccaagaacatggacactggggatcatgttgccatcaagatcctcgacaaggccaaggttcacaagaataaactagctgagcaggagggaaatctatacgatgaagctaatacaacatcccaatgttgttcgcctgtacgaggtaaaagcttcaactttccctcctaattaa

SEQ ID NO: 27220 - DNA, 2137 bp, Zea Mays
atggctgcccgtccgcctgctccagccagcaggtcgattgaagctgctcatcgcccattcgtcccaaacagcagactcccagggatggcggtatccagacagagtgatgggtggcgtgggcgcacctccccacgtcaaggacgtggatttggagtgcagccgcagcgccatggtccggggcacggaggtcccctgggccggggcagtcttggtcgtggagcagcgggccggggtggacgatttccaccacagccgcggttccaacagtacggggaggtgcccgcggcaagccaggagacgatgcctcaggcggccactgctgatggtatgtcttggatgccaagggatgctgagcgcaggcagtcgacagcggctcccccaggtaactctgtgaaagcaaagaaactaaagtctcctctgtgcttccgttgcaagttgagtggccatttaaatgatgagtgcaaggcagatttagattgtgtggtgtgtaacaagaagaattcacatgtggtagccaagtgccccctactgaaattgcctaagcccgatgcctccttctttggctttggtaataacgagttaggcttctttcgcattccggatttcgactacaggctagaaacacctgaccctgccccgactgctctgatcaaagtgagtggggggaagctctcgactgaggcggtgcaagctgaactagctcgattcattacaaaagaatgggtttgggaggcgctaccccatagtgatgattccttcttggtggtatttccctcagttgatgaactgattagaatggctgatgtggagttcactctcaaaaatcatggagttactctcaccatctctgaatggaaggatgctagtgatgttgaacccagttatcaattggacgaggtttgggttcatgtgaggggagtacctcacgcttggaggcattatttgggtttttgggccctaggatcggtaatcggcgccactcttgatgtagacatgtacacctatagaaagatgggcgtcatcagactgcttgttggtgtgatgagcagagatccactacccctgaccaccgatattgtttttgacaagaagggatacgagatcacctattctatagaggataagaacttcattcctgcatctccggtgatttttagggaggagtctcgtaatgatggtgggggtggtatggacaaggtttctgaacaagaggataaaagtccagaacatgctttcaaaaagcataaattagatgggaaggggggtggtgctggttctatggcagggggttttggtgatggagaagattctccaatgcttggggctgctgccatttcacccttggagaaggctaatgaacctgtgcctgctgtgatgaagggttttcctttgctcaacttgtctgccctgcattctgtacgtccctctttgattggccgaactggggcagatctgaagctgcataagaatggaatgtcatctgctgctgggtttctttctggtggcaaaaggagctctgttgttgggtcatatgatactaatggctgcaacttaatgctacagagtattcttgatgagcagatagtgagtaacatgaaaggggctgacccgactggtgtgattaactctgtacacacgaccaggattgtgcctgacgcaagcagttggtccaagaatattcctgatgagcagttagtaagtaacaagaagggggttggtccgtctgttgtgcttacttcggcacacacggccatgaatatgccagcggcatgttgctggtccatgggacagaggagttttgcatttgaaagggagggccagccgatggatgatgtaaggaagattgaacgcagtttgcatattggggcggggcaagtaaaattgcccatcccaccggagaagaaactgatgcctccggggaaagatgaggattctactttgaaggctatgaagagggcttctcgtcgcaatcttgatggcgatttgagtggattcaagccggctggtcaagcgctacgcacggtgtccacttcatctcttccgattgggccgtttcagtcaggttatccatttggcgtcacagaagctatcaagttgggccatccttcagcgagaggagctgcgaccgttggttgtg

SEQ ID NO: 27221 - DNA, 2235 bp, Zea Mays
tcctctcatcgcattcaccatcctatgctgagatggctgcccgtccgcctgctccagccagcaggtcgattgaagctgctcatcgcccattcgtcccaaacagcagactcccagggatggcggtatccagacagagtgatgggtggcgtgggcgcacctccccacgtcaaggacgtggatttggagtgcagccgcagcgccatggtccggggcacggaggtcccctgggccggggcagtcttggtcgtggagcagcgggccggggtggacgatttccaccacagccgcggttccaacagtacggggaggtgcccgcggcaagccaggagacgatgcctcaggcggccactgctgatggtatgtcttggatgccaagggatgctgagcgcaggcagtcgacagcggctcccccaggtaactctgtgaaagcaaagaaactaaagtctcctctgtgcttccgttgcaagttgagtggccatttaaatgatgagtgcaaggcagatttagattgtgtggtgtgtaacaagaagaattcacatgtggtagccaagtgccccctactgaaattgcctaagcccgatgcctccttctttggctttggtaataacgagttaggcttctttcgcattccggatttcgactacaggctagaaacacctgaccctgccccgactgctctgatcaaagtgagtggggggaagctctcgactgaggcggtgcaagctgaactagctcgattcattacaaaagaatgggtttgggaggcgctaccccatagtgatgattccttcttggtggtatttccctcagttgatgaactgattagaatggctgatgtggagttcactctcaaaaatcatggagttactctcaccatctctgaatggaaggatgctagtgatgttgaacccagttatcaattggacgaggtttgggttcatgtgaggggagtacctcacgcttggaggcattatttgggtttttgggccctaggatcggtaatcggcgccactcttgatgtagacatgtacacctatagaaagatgggcgtcatcagactgcttgttggtgtgatgagcagagatccactacccctgaccaccgatattgtttttgacaagaagggatacgagatcacctattctatagaggataagaacttcattcctgcatctccggtgatttttagggaggagtctcgtaatgatggtgggggtggtatggacaaggtttctgaacaagaggataaaagtccagaacatgctttcaaaaagcataaattagatgggaaggggggtggtgctggttctatggcagggggttttggtgatggagaagattctccaatgcttggggctgctgccatttcacccttggagaaggctaatgaacctgtgcctgctgtgatgaagggttttcctttgctcaacttgtctgccctgcattctgtacgtccctctttgattggccgaactggggcagatctgaagctgcataagaatggaatgtcatctgctgctgggtttctttctggtggcaaaaggagctctgttgttgggtcatatgatactaatggctgcaacttaatgctacagagtattcttgatgagcagatagtgagtaacatgaaaggggctgacccgactggtgtgattaactctgtacacacgaccaggattgtgcctgacgcaagcagttggtccaaggctgcacgacaggagcatagaatgcagaatatttactcacaactttctgctggagtattttcttgtggcaaaaggaatattgttgttgggtcagatagcactaatggctgcaactttttgctacagaatattcctgatgagcagttaactgaatattctttgcagcctgcattccagggacagaggagttttgcatttgaaagggagggccagccgatggatgatgtaaggaagattgaacgcagtttgcatattggggcggggcaagtaaaattgcccatcccaccggagaagaaactgatgcctccggggaaagatgaggattctactttgaaggctatgaagagggcttctcgtcgcaatcttgatggcgatttgagtggattcaagccggctggtcaagcgctacgcacggtgtccacttcatctcttccgattgggccgtttcagtcaggttatccatttggcgtcacagaagctatcaagttgggccatccttcagcgagaggagctgcgaccgttggttgtg

SEQ ID NO: 27222 - DNA, 2112 bp, Zea Mays
aaaggggccatcctctcatcgcattcaccatcctatgctgagatggctgcccgtccgcctgctccagccagcaggtcgattgaagctgctcatcgcccattcgtcccaaacagcagactcccagggatggcggtatccagacagagtgatgggtggcgtgggcgcacctccccacgtcaaggacgtggatttggagtgcagccgcagcgccatggtccggggcacggaggtcccctgggccggggcagtcttggtcgtggagcagcgggccggggtggacgatttccaccacagccgcggttccaacagtacggggaggtgcccgcggcaagccaggagacgatgcctcaggcggccactgctgatggtatgtcttggatgccaagggatgctgagcgcaggcagtcgacagcggctcccccaggtaactctgtgaaagcaaagaaactaaagtctcctctgtgcttccgttgcaagttgagtggccatttaaatgatgagtgcaaggcagatttagattgtgtggtgtgtaacaagaagaattcacatgtggtagccaagtgccccctactgaaattgcctaagcccgatgcctccttctttggctttggtaataacgagttaggcttctttcgcattccggatttcgactacaggctagaaacacctgaccctgccccgactgctctgatcaaagtgagtggggggaagctctcgactgaggcggtgcaagctgaactagctcgattcattacaaaagaatgggtttgggaggcgctaccccatagtgatgattccttcttggtggtatttccctcagttgatgaactgattagaatggctgatgtggagttcactctcaaaaatcatggagttactctcaccatctctgaatggaaggatgctagtgatgttgaacccagttatcaattggacgaggtttgggttcatgtgaggggagtacctcacgcttggaggcattatttgggtttttgggccctaggatcggtaatcggcgccactcttgatgtagacatgtacacctatagaaagatgggcgtcatcagactgcttgttggtgtgatgagcagagatccactacccctgaccaccgatattgtttttgacaagaagggatacgagatcacctattctatagaggataagaacttcattcctgcatctccggtgatttttagggaggagtctcgtaatgatggtgggggtggtatggacaaggtttctgaacaagaggataaaagtccagaacatgctttcaaaaagcataaattagatgggaaggggggtggtgctggttctatggcagggggttttggtgatggagaagattctccaatgcttggggctgctgccatttcacccttggagaaggctaatgaacctgtgcctgctgtgatgaagggttttcctttgctcaacttgtctgccctgcattctgtacgtccctctttgattggccgaactggggcagatctgaagctgcataagaatggaatgtcatctgctgctgggtttctttctggtggcaaaaggagctctgttgttgggtcatatgatactaatggctgcaacttaatgctacagagtattcttgatgagcagatagtgagtaacatgaaaggggctgacccgactggtgtgattaactctgtacacacgaccaggattgtgcctgacgcaagcagttggtccaagaatattcctgatgagcagttagtaagtaacaagaagggggttggtccgtctgttgtgcttacttcggcacacacggccatgaatatgccagcggcatgttgctggtccatgggacagaggagttttgcatttgaaagggagggccagccgatggatgatgtaaggaagattgaacgcagtttgcatattggggcggggcaagtaaaattgcccatcccaccggagaagaaactgatgcctccggggaaagatgaggattctactttgaaggctatgaagagggcttctcgtcgcaatcttgatggcgatttgagtggattcaagccggctggtcaagcgctacgcacggtgtccacttcatctcttccgattgggccgtttcagtcagtaagctaa

SEQ ID NO: 27223 - DNA, 706 bp, Zea Mays
agcagacccgggcgggccctggcaattcacgcacctcgcgtgcacacagacacaggcaggcacacagcgcaatcaccgtctcgcctcgcagtcgtactcacggtcttgcacacacccgtccccatcctcttccggtgtcgccatcccctccgtcgaccgccgcgtccggccgcggcaacccgacctgtgtcaatcgccatggaagatatcacgatttgagaagaatatcacaaagaggggctctgttcctgagacagccaagaaggcaaacgattatcctgttgggcctattcttcttgggttctttgtcttcgtggttgttggatcatctctctttcagatcatcaagacagcatcaaacgctggtctattctgaggtgaatcggttgacacatgcagtttgtcactagaaactatacaagtgtagggcgtggcttaatgtcgcctttttaatgttgtaccgtggagagttttaagttatatatgtaatggaagtgctaatttaagtcacctgtctgacaggaaagatgttggagtagtccataatacatatcgagtatagttatagttcgtgttaaatatttctatgctcaaattggtcgcatcattgggctattgtactcttcgatttatcgagtaatttggtaatctttcgcagaattttcgtcttgggtttgccccgagcccatgagaggttagtgtggtc

SEQ ID NO: 27224 - DNA, 2019 bp, Zea Mays
gtttctattgtctcttgagattggttcaagttgaaccgtctcccacaactggtactctaagcatggctgcaatcatcaacaagagcactcatatggacataatgccttcacctagggataattcagctggtagtggccaggaagatggaggttctcgggattttgaattcaagcctcatctcaattctcatttggcggctccttcagtcaacaatcaaaaccatcatgacactatgcaaaaatatagctcaaatcataccacaccatctagcaatttgaagactgaaaataaacctctctgttcacgggaatcgagtcacacagcacatgcttcaattgctccaaaccaaactgtttcgatagtttgtccgtctgacaacatgcctgctgaagttggtacaatggagatgcaccagatcaatagttctgaaaatgctacccaggagacacaaattgaaaatgtagctgaaaaatcagcagaggatggctacaattggcgtaaatatggacagaagcatgtcaagggaagtgaaaatcctagaagttattacaagtgcacgcatcctaattgtgaagttaaaaagctattagagcgttcgcttaatggccaagttactgaagttgtttataaagggcgtcataatcattctaagccccaaccaaatagaaggttagctgctggtgcagttccttcaagccagggtgaagaaagatacgatggtgtggcaactattgaagacaagccttcaaatatttattccaacctctgtaaccaagtacattcagctggcatgattgacactgttccgggtccagctagtgatgatgatgttgatgctggaggtggaagatcctaccctggggatgatgctaatgatgatgatttggactcgaaacgcaggaaaatggaatctactggtatcgacgccgctttgatgggtaaaccaaatcgtgagcctcgtgttgttgtacaaactgttagtgaagttgatatcttggacgatgggtatcgttggcgcaaatatgggcagaaagtagtgaaaggaaatcccaacccacggagttactacaagtgcacaaatacaggatgcccggtcaggaagcatgttgagagagcatcacatgacccgaagtcggtgatcacaacatatgaaggaaaacataaccatgaagtccctgtttccaggaatgcaagccatgagatgtccacagctcccatgaagcctgctgtgcatcctattaagagcaacatgccaggccttggtggcatgatgagagcatgtgatgccagggccttcaccaatcaatattctcaggcagctgaaagtgacaccatcagtcttgaccttggtgtaggcatcagccctacccacagcgatgcaacaaaccaaatgcagccttcagttccagaatctatgcagtatcaaatgcaacacatggctcctgtatatggtagcatgggacttccaggaatgcctgtgacagcagtacctggaaattcggctagcagcatatacggttctagagaagaaaacggaaatgaagggtttactttcaaagccgcaccattggaccgatcaactaacttatgttacagtagtgctggtaacttagtgatgggtccatgagtgtctctgctgatggtcatacctccatgaagcacatattaccgtaatcatgaagattgcttcagaaggtgctctactgtgtatcgtcatccacacataattgaatcggaggtggtcaaggtatacctgggagctgcagcgttgacacatgagccttttgctgtttggatgtacacttgctgtatgtgacgctgcagctcaacattcgttgtacagcaaaccagttatgattaattagattctgataatttggttatgtaaacttctttctgtactggaatatgggatagaaccaaagatccgtctggtggcaaagctttgttatgccctgcatatgaacgatgccagtttgatatccatatgaaatgaaatatatcatttcagcaaactg

SEQ ID NO: 27225 - DNA, 1956 bp, Zea Mays
gtctctttgcttcgttactcggcggctggagcggtgtgctaccgctgatcagcgaaccggagatcagaagaacgcccggctgccgtagaacaccttgggagagggcttctcctgctgcccggcggcggtcggcttcttcaccgcggtcgagtcggcaccagtggagtctgcgctgggtgtggctgctgcgggactgctcttcccgctgctaccgttgtctatgtccaaggctggaagcttcattttggccagggaatccgtgaattgctgcatactcttcatcctccgacgcggcgcagggcgagttcgccggcgggacctcctggacggtgcgggacgagtcgacctccgcgtcggcggtctccgacgctgccttcgccttgtggtcagccgacgagtgggcgttcccggacggctccgagctggagttagactgaggggtggccgggaactccgtggtagacacgctgctgaccggcgtgtcgctctggaaggcgcccaccgagtcggcggtgctgttgtccgtcgagaagctatctacgaggcgcacggcggcgtcccggctcagggccgtggcgccgtcatcgtgctccgaggtcaggaggctgtcgcagctctgcgtttccacggccgcgcacggcagcctggtgtactcggagaccatgatctggttctcctccacgagattcaggtccgggaactcgatcttctcgtactccttcccgttcccgacgccgtcggcggcgttgttccccggctcctcctcctcctccgggtcggccagcgccggcttgggcgtcggcgagatgggcacgacctccggcacgaccccgatgtaggagagctcgagctgcaggaagcccgagggggtctggaagaggtcgctggtggtgagcgggaagtcgcgggcgagcgtgccgccgtcggcggcgacgacatccgggagcggcacgagcgcgaagcccagcagctggtcctgcaggtagttcttgacccggctgagcatccacacctcgcagcggagcgcggcgtcgacgtcccccgcgcgcacgccgaggcgcagcgactggtcgaacaccgggttgcggcccccgccgttgaccacctgcgtggacgccgccggcgcgccgtcccccggcagcgagagccgcgcgtacacgtcctgcttgtggtagatgcagatgttctggatgtcccgcgcgctacgcacgtgcacgtcgacgtacccgatcagctccgcggccgccgctgcaggcgccggaaccgctcctcccttgtgctgctgcggctgctccatggcaagaccacacctttactcctccaaggcttcagctctgcgtccacagcaaagggggaagcaacaaatcagacagacgaaacccataataatagtaaaaaatatcatgcatcttcttctacggaattctgcgccggtgggaggggcagctgcatagtccaaatccgagaagtaggtgaagcgaaactgtcggcagatccttactagctactactacagtacagtgcgccgcgccgagacagactaaccggaggtgcgcaccacctccacaagcttattgaacagactcgtgatgagggcgattcctcctactcatactcgattcaacgcaaccacgcagctgctgaagtacctcgagaacccacttcactgcacctccacaagaaaggagttcacgatgcgtaggtttccatcccgataaaatcaaaagggctcaaatccccggaagaaaaggcgagatctcagagcagaagaggcaattgagaagcagattctcaacctgtccgaactgccggtgctgctctcgctcgggagagggacgacgagggcagcagggccactggaatcgagcggaggagagcgagcgagcgagcggcaggatgggggctcgagacatatatataacaccaactccaaaggggggttagggtagtagtaat

SEQ ID NO: 27226 - DNA, 3733 bp, Zea Mays
cgcccacgtaccccgccgcgctctcccacgtgcccctccttctgcgcgcgtccgattggccgacccgcccttcttaagccgcgcctcctgccccgcgtccgggcccccaacgccgtcgtcgtcgtgtctccgctccagagtgatcgagcacactgacctggctctggcctgccccccgagcctcagctcgtgagccagagcgcctcgccatggccatggtgcagccggcggacgcgaccgtcaaggccaacgagatcctggcgcggttccggcccatcgcgcccaagcccacactggcggccgagggcgtggtggccgcgaaccgcgtgctgtgccatctgcagggcaggccgtgccgcgcgcggaaacgcggccgccccggccccgccgtcgtggcgccgtcgcccgagtcgggcttacagccgcccgccaagcggaagagagccacgacgccgtacccgcctctccggtgcacggggccgcgtgcgtccgcggccgtcccgggcagtgcaggcctccctctggcgtcggcgtcgctcccgccggcgggtgcgggtgctgccgaggacctcgcgaaggtggcggcggaggggaggcacgtccccgtggagcgcgacctgctgcggaagctgctggagcccaaggtcatctcgccgcgggcggtgcgccccgtgtgctccgccatccacgtcgggtgcatccaccgcgccgacgcgacctgcgccgccgccgtctcgaagacagcggttcgtgtggaggcggagctggaggtcgacgcgctcccggcggttgtctccgacgccagcaaccgcgtccggctcgtgaacgacgcgtacaaggagatggtggggcagcccgagtgcccgtggctcgacgccgtggctgccacgtcgaggaggatcagcggggaggtcgcgctggtggtagccaaccagtcctccctgccagagtcgtacggggtgttcacatgcacggcaaagatcgagtgggaggacgacgggaaggtcgcctccatcgatgtaccctgcgacgtcagccggctgcagtgcgagtccagagagtacctcttcgtctggaggttccgtaccgccgacgccgacgccgacgcatccgttggctgcagctccgaggagattagtgagagttaggggaagcttgcttgagctgcatcctgtgcgcgctgcagtgaaaccaggtgcataggctaagcaagctgcatctcaaaaactggccagcttcctctttcgcctagtccatagagtgtagacccagttctgaaatctggagtaaatataagatctcgactggagaatgcaaatggaaaattggaaatataacatgtactttttcatgaaactgacagtgttaatttctggtactacctgactataggttgtccatgaacacacggtcatgcacgagtggccgtgcttagcagactggcaagctcatgtgtgatacagccaaaagcaagtatgcatcatcattcaactcaaatgccacttttcagataccggccaaggaagcatacagtattgagatacaatgtcatcaaggaacaaacgttttcgaaggacactaattttgtttgattgcagaccatgcttattacaagtttgatagatgcatattctagctcgtactttcaccacggacactgttgaaagaaaaggctgtccaggaagaaaacaacaccgtcccaatgccaggctcacggacaagaggtctagactctagagctcaggaggaaaataacatcattccagtgtcagggtcacatgctgctggaggtcttatgcttgctccgccttcggggggcctttccacttgaagttctcagcgtaggccttaggctgcatggttcgaaaacaatccggttatcgcaaccaagccgatacattttcagcaacaccgatcagcgatcagaacgaaaaatattaattcatacgcgaacacaattattatattagcaaaaaatatggcatatgtgagacagatctcacatatgacagataccaaacgatgcaatgaagcatagcaatagaaaggtaaagtcccaaagaaagcctgttccggacactgtattgctttaaactagcaatcgcttctataatattacggcaaagtacggctcggtcctggaacccgtaccaaaaagcaaaagtccagtcaagcaaagactactggtaattagcgagttccatcgcctggttctgattggacctgtgcccggacggtcactacaatccaatagcatgcacgttgcatcaaataattgggtcagacttgtacagtgtcaggcaagtacagaaatagctgaggaggattattggccttgccttttagctttcaggacattccacaagcatgcaaatatttaactacggtaccacaccatccaccctatcagcattcagcactaaggtacactgtagcatttaacatgtgctatattgttttcttgtcaaagatgctgcaggcttccagcactcaatggttcactatattccatattaaataccacaaaaatagcataccatttcattaaagcgactttaatatatctggaaaaactttgtcccttgtccctaacaagtgtctttcacttcacagttcttactcaaaacttaaattacttcctacagcttatcattgcactaaacatgcacaagacgaatatactgaaaatagtatattctaccaccacaatggcatttgtaattcagaatatgtagtagtgagggtttgtactgcactggaaaaaaaacagtgacaatatagagctgtataagataaactttgcaagaagatgaacaagccaactttgaaggatctaaatacatggtaaaagaaaagcattaacaagtcaacaaggatgtgtagggagacatacataccttcaaaagaggtgtatgccgtttccgtacctacaaaaaagacgtaatgtaagtacagtcctgaactttaaagaaaccttagacgctcatttcaaattattggacagttcagtatcctgaaagaatatgtctagaaaagattacactggaaatatggcttcagtttagttcagaaataaaatgaaacactatatgcattgaacgtgaaaggtaccagtgccagtagaattggaaatgaaaagtaggttttgtagagtgatctatctgttctcaatagaagtatagcacgtgttgaaaatagccccataggggcaataccacaatagataggaatacacagaaagaactctagcaacatatacataaggggctttatacttctaacactatcaccaggtaatagtgcaatactacatcaaatgaagttatactgttatagtgtttgcaacttgaaaagatataacttaaagcaagcagcacaaatacaaactggaagcaaataatttgcatcgaaaagcattacaggcttgagaaaatagtaggtagtaagacattttagacaaagtacagcactacaacctcacactagatattgtcatcaacctcatgttttccacaagatgacaaaaatcagtatgtgaaaatgctatcaagagactagtatgtgacagtagagcaataactattatttagaaattaacatcaccaaaaactcactataactggaacaaaactagattaacgagcatgtcgaagtctatgctcatttctacctcaatagatgaaccacaaacagatttagtttgtcatcatcactcatacgttagacaactaag

SEQ ID NO: 27227 - DNA, 1663 bp, Zea Mays
cgcaacgaatcccactatttcgcatcagttcgtcctgactcctgcgtccggctccggccgtcccactcccactcgaaagcacgacgacaaaacctcgaacgccaccgtcacgctcacgccttcgcccgaacttctccagttcttccggggagacgagaaaggaaccgaggatctcgttcctttggcgcagcgggcagcagaggcctcgccgagggagatggccggccggcgcgagtcgcccctgatgcgcggcggcggggcggggcctccgctgtctcgggggtcccgcatcgccgcggcggtagtggtcggcgtcgcactcggctgcctgtgcgcgtttctctaccccgccggcctcttcccccgtgcccccgactccgccagccattggccccgccaggctgaaccagttgcctgtgatacatctcgggaagttgccaaactaaagtcacggctggtattgttggaaaggaaaaatgctgcatttaaaatgcagatgaaggaattgtcaatgaagcttcaattggctggacaagggaaaaatgaggccctatataaggctggtccatttggtacggtgaaagctctgagaacaaatccaacagttactcctgatctatccatcaatcccagattggccagcttattggaacaggttgctgtgaagaaagaactgatagttgcactggcaaactctaacgtgaaagagatgcttgaggtgtggttcactaacataaaacgagccgggattccaaattatctagtagttgcattggatgacaacatagagagcttctgcaagtccaaggacgtccccgtttaccggcgcgatccagatgatggcatcgacaacattgagattctgacgtggaatccatgagcgacggccacaacaacatgacagcttatggattcaacgatgtgttcgacgagccttcaatgggctgggcaagatacgcgcacaccatgcgtatatgggtttacaattccgggttctttttcataaggccgacgattccttcgattgagcttcttgatagggttgcttaccgcctttctcacgagcccaaatcatgggaccaagcggttttcaacgaggagctgtttttcccgtcgcatcctggttatgaaggccttcatgcgtccaagagaaccatggatatgtacctcttcatgaacagcaaggtcctcttcaagacggtgaggaaagatgctaatctgcggacgttgaagccggtgatcgtgcatttgaactaccatcctgataagtcggatcgcatgaaagccgtgattgaattctatgttgacgggaaacaaaatgcccttgaacgcttccctgatggatcagaatgatagacaccagcttttgtaggacaggaaaaaaaatgccaacttctagtttctagtcgtctcgaaagtaagcacgggttgacttcttacataatgcattgtcgttataaaatcccgtgtgcttgctgagatgtcaactttcactgagcatcaaaattcgtataattctctacttgctacaagccttggaaagctgctagtgtcagcccatggtatattcccgtggcattggtgctgtttcagcttttctttccggcttcaacagtcgtctagtttttctgtatgtttttataagaatcactttagccaaaac

SEQ ID NO: 27228 - DNA, 1710 bp, Zea Mays
gtgccacgcaacgaatcccactatttcgcatcagttcgtcctgactcctgcgtccggctccggccgtcccactcccactcgaaagcacgacgacaaaacctcgaacgccaccgtcacgctcacgccttcgcccgaacttctccagttcttccggggagacgagaaaggaaccgaggatctcgttcctttggcgcagcgggcagcagaggcctcgccgagggagatggccggccggcgcgagtcgcccctgatgcgcggcggcggggcggggcctccgctgtctcgggggtcccgcatcgccgcggcggtagtggtcggcgtcgcactcggctgcctgtgcgcgtttctctaccccgccggcctcttcccccgtgcccccgactccgccagccattggccccgccagacgttgtcatcgcatgattaagggggattgcatgattaatggctgaaccagttgcctgtgatacatctcgggaagttgccaaactaaagtcacggctggtattgttggaaaggaaaaatgctgcatttaaaatgcagatgaaggaattgtcaatgaagcttcaattggctggacaagggaaaaatgaggccctatataaggctggtccatttggtacggtgaaagctctgagaacaaatccaacagttactcctgatctatccatcaatcccagattggccagcttattggaacaggttgctgtgaagaaagaactgatagttgcactggcaaactctaacgtgaaagagatgcttgaggtgtggttcactaacataaaacgagccgggattccaaattatctagtagttgcattggatgacaacatagagagcttctgcaagtccaaggacgtccccgtttaccggcgcgatccagatgatggcatcgacaacattgagattctgacgtggaatccatgagcgacggccacaacaacatgacagcttatggattcaacgatgtgttcgacgagccttcaatgggctgggcaagatacgcgcacaccatgcgtatatgggtttacaattccgggttctttttcataaggccgacgattccttcgattgagcttcttgatagggttgcttaccgcctttctcacgagcccaaatcatgggaccaagcggttttcaacgaggagctgtttttcccgtcgcatcctggttatgaaggccttcatgcgtccaagagaaccatggatatgtacctcttcatgaacagcaaggtcctcttcaagacggtgaggaaagatgctaatctgcggacgttgaagccggtgatcgtgcatttgaactaccatcctgataagtcggatcgcatgaaagccgtgattgaattctatgttgacgggaaacaaaatgcccttgaacgcttccctgatggatcagaatgatagacaccagcttttgtaggacaggaaaaaaaatgccaacttctagtttctagtcgtctcgaaagtaagcacgggttgacttcttacataatgcattgtcgttataaaatcccgtgtgcttgctgagatgtcaactttcactgagcatcaaaattcgtataattctctacttgctacaagccttggaaagctgctagtgtcagcccatggtatattcccgtggcattggtgctgtttcagcttttctttccggcttcaacagtcgtctagtttttctgtatgtttttataagaatcactttagccaaaac

SEQ ID NO: 27229 - DNA, 1852 bp, Zea Mays
ctttcttcctcgcggcgacaggttagttaaccatccaggttctgtcaagatgtctgatagccatgagactgacaggaacattgagatttggaaaattaagaaactgatcaaggcattggaatcagccagaggcaatggcacaagcatgatctctctaatcatgcctccacgtgatcaggttgctcgagtggctaagatgttaggtgatgaatatggtactgcttcgaacatcaagagtagagttaatcgtcaatctgtgttggctgccatcacctcagctcagcagaggttgaagctctacaacaaagtgcctcctaacggattggttctgtacactggaactattgttactgaagacggaaaggaaaagaaagttactattgattttgagccattcaagcctatcaatgtgtcactctacctttgtgacaacaagttccacactgaggctttaaatgagctcttggaatctgatgacaagtttgggttcattgttatggatggtaatggtactctttttggcacactaagtggcaatacccgtgaagtgcttcacaaattcactgttgacctcccaaagaagcatggtagaggagggcagtctgctctgcgttttgctcggcttcggatggagaaacgccataactatgtccgcaaaacagctgaacttgctacccagtttttcatcaatccagctactagtcagcctaatgttgcaggattgattcttgccggttctgcagattttaagactgagctgagccaatctgacatgtttgatcagcgactccaagccaagatacttaatgtggttgatgtttcgtatggtggcgagaacggtttcaaccaagctattgaattatctgctgagattctagcaaatgtgaaattcattcaagaaaagaagttaattggcaagtattttgaagagatcagtcaggatactgggaaatatgtctttggtgttgatgacactctgaaggctcttgaaatgggtgctgtcgagaccctgattgtgtgggaaaatctggatatcaacagatatgtgatcaagaacagtactactggggaaattattataaaacatctgaacaaagagcaggaagctgaccagagcaatttccgtgacccatctaccaatactgatctcgaagttcaggaaaaaatgtctctcctggaatggtttgccaatgacaacaagtctcaggagggatcccagttctgtagaggatttggtggcattggtggcatgttgcgctaccagctggatatccgttcttttgatgagctttctgatgatgacgatgtgtatgaagactctgactagcaatcagccaatctcatgccagggctggcccatggaaggacgcaacagctcgacctcgccatacctacgcaggagcacacgaaaagcaactatccaaggattaatgggcatgggccagcgtcatcctcttcaagaggagcttaagactaagatgattttgagtcacaatcatgggagtaacgtgacaagaagataccctactatatcacaattattccagtaatgcgtcgagaagataccgttgtttaagtgcacaaaccaatacagtgacgtgccaagaagttaccgtattttaaggatgtttaattttcagtattcgtcggggtagtactgtgtcagaaacttatttgtacctaaaaaggccaaatattgccgttgccttggtgctttatgctatgttatcgtcttttgtgagtctgtgtgctaaggttgttgcttaatgctttgtgactcgcaagctgctactcttgcagtttttgcaacgacgaagctatgatatggagtacaattctgtgtcatcatatt

SEQ ID NO: 27230 - DNA, 941 bp, Zea Mays
ctggagagtattttgaagagatcagtcaggatactgggaaatatgtctttggtgttgatgacactctgaaggctcttgaaatgggtgctgtcgagaccctgattgtgtgggaaaatctggatatcaacagatatgtgatcaagaacagtactactggggaaattattataaaacatctgaacaaagagcaggaagctgaccagagcaatttccgtgacccatctaccaatactgatctcgaagttcaggaaaaaatgtctctcctggaatggtttgccaatgacaacaagtctcaggagggatcccagttctgtagaggatttggtggcattggtggcatgttgcgctaccagctggatatccgttcttttgatgagctttctgatgatgacgatgtgtatgaagactctgactagcaatcagccaatctcatgccagggctggcccatggaaggacgcaacagctcgacctcgccatacctacgcaggagcacacgaaaagcaactatccaaggattaatgggcatgggccagcgtcatcctcttcaagaggagcttaagactaagatgattttgagtcacaatcatgggagtaacgtgacaagaagataccctactatatcacaattattccagtaatgcgtcgagaagataccgttgtttaagtgcacaaaccaatacagtgacgtgccaagaagttaccgtattttaaggatgtttaattttcagtattcgtcggggtagtactgtgtcagaaacttatttgtacctaaaaaggccaaatattgccgttgccttggtgctttatgctatgttatcgtcttttgtgagtctgtgtgctaaggttgttgcttaatgctttgtgactcgcaagctgctactcttgcagtttttgcaacgacgaagctatgatatggagtacaattctgtgtcatcatatt

SEQ ID NO: 27231 - DNA, 676 bp, Zea Mays
ttttttttgatacagtgcattggttattattctaggttatagcacgtccgaggagaaacacagcacacaagcacggaaggaaccgtcgcgacattccgacgctcggcgcgctaaactagcagtacaagactagaagctgtgcaggatcgcgagcgaaatcctgggtcatcctccctcccttagagcggtagggcctaggggcacttggggcgctggttcttgggggacttcatgtccctgtagcaggggcactcgtccttgctggcgtacggccccgacggcacgcagccctggcacttgccgcagcacacgccgtccggcaccgcgccgccgtctgcaatgcacacacagggtgtagtcaagtatttacagaaaggagagaggatctcgccctgcaatggttcggtaagattgggaggcgaaaagttacctgctgcctcggcgagatgcttgaacgaggaggcggcagcaaccaggacgaggagcaggagagccacggggatcgccttcatcttcagaagctcttgctgttcgcctgttcctccgagccgaggaaccactggctggctgggctgccgaggtgaaactccaatcgtgagtgaagtggcgacgttgctgtagcgccttcagagttgaggcgctttcggtgtgagtgtgagtcaccattaaagtgccg

SEQ ID NO: 27232 - DNA, 1742 bp, Zea Mays
catttacttgagcctgcactaagactgtcttcggtggatcgtgtaaaatagtggacgtagcgctgtagatgacactatttgacactgagtgaagtttgaaataggggatgagattggggatctgctggagatggccttatatcttactctgagcggttttgatgtttcttcatggtgatttggctgaagtttctatttattttgacaggttagagttatgaatattacgagccaaggaaattctactctgattagatggggtattttcccagcagaatccgataatgctatgtccaacgcaacagcaatgggtatcatatatcggttaactcagcatcatgttcagttgcctgaaaatcttggcagttatcagttgcttgagtggaatgtgcagcctttgccgagaaggtcatggtttcaagaacatgtagtctctatgctgcttgggattttactagtaattttggtcactttgtcagcctttttagtagtacttgtttggagaaagaaatttagtggtcaagcagcctacagacctgttgattcagtggtccccgagcaagaactccagccactataatccaaattaaagctgtttgacggaacaacatatagatgattctttggtagagatacccttgtgcgggggggttacgcatcacagcggcacgcatctgctgctggagtaagcccttctttgtatgtaacacaagctacaagtttacagaagaagcactgtatgattacatgacttctccattcaaaacttagaggtgttcataaactgtctagtgattcagatcaagagctcctctcttgtgcttacagtagaagaaggttttgttcatgtaatgtagattaagtagggggtagagaagaaactaggcacagccgcggaacgaaatggtgtaatatttattttagtgccgagggtatttgtcttcaaagcttttcagggcatgcttgattctcttgcctactatttttattattattaaggacgttcttgctcatccctgttctcttcggcggctagtgttgaagagccatcacatcccaaaagacaagcacacagatacagtgcattggttattattctaggttatagcacgtccgaggagaaacacagcacacaagcacggaaggaaccgtcgcgacattccgacgctcggcgcgctaaactagcagtacaagactagaagctgtgcaggatcgcgagcgaaatcctgggtcatcctccctcccttagagcggtagggcctaggggcacttggggcgctggttcttgggggacttcatgtccctgtagcaggggcactcgtccttgctggcgtacggccccgacggcacgcagccctggcacttgccgcagcacacgccgtccggcaccgcgccgccgtctgcaatgcacacacagggtgtagtcaagtatttacagaaaggagagaggatctcgccctgcaatggttcggtaagattgggaggcgaaaagttacctgctgcctcggcgagatgcttgaacgaggaggcggcagcaaccaggacgaggagcaggagagccacggggatcgccttcatcttcagaagctcttgctgttcgcctgttcctccgagccgaggaaccactggctggctgggctgccgaggtgaaactccaatcgtgagtgaagtggcgacgttgctgtagcgccttcagagttgaggcgctttcggtgtgagtgtgagtcaccattaaagtgccg

SEQ ID NO: 27233 - DNA, 2083 bp, Zea Mays
aaagattgccctgtcggaatgataggtccttgattcattcaaatttcaaaggttttagtaaagcagtctgtgcatattacatgatcatgacagcatttcattaactttctgccttgatcatagtagtatgcagaagcagctcccaattgattgggtcataggggcgatgatttaattctcgggcttatgcatttggaaactttgcgattttgagtaggtaaaataatgaccttaatggcaggtatcattgttcgtaatacacttgtgacctatgaccgtcacaatgaaaagattgggttctggaaaactaactgttcagagttgtgggagaggttacatatcggtgacactccttcaccagccccttcaagtgatacaagttcagaacatgatatgtcgcctgctcctgcccctagtaatttgccagagtttgatgttggtctcatcaccgttgatatgtctataaatgttacttacccaaatttgaaacctcatctccatgagctggccgagctgatagctaaagagctggagattgactcacgtcaggttagagttatgaatattacgagccaaggaaattctactctgattagatggggtattttcccagcagaatccgataatgctatgtccaacgcaacagcaatgggtatcatatatcggttaactcagcatcatgttcagttgcctgaaaatcttggcagttatcagttgcttgagtggaatgtgcagcctttgccgagaaggtcatggtttcaagaacatgtagtctctatgctgcttgggattttactagtaattttggtcactttgtcagcctttttagtagtacttgtttggagaaagaaatttagtggtcaagcagcctacagacctgttgattcagtggtccccgagcaagaactccagccactataatccaaattaaagctgtttgacggaacaacatatagatgattctttggtagagatacccttgtgcgggggggttacgcatcacagcggcacgcatctgctgctggagtaagcccttctttgtatgtaacacaagctacaagtttacagaagaagcactgtatgattacatgacttctccattcaaaacttagaggtgttcataaactgtctagtgattcagatcaagagctcctctcttgtgcttacagtagaagaaggttttgttcatgtaatgtagattaagtagggggtagagaagaaactaggcacagccgcggaacgaaatggtgtaatatttattttagtgccgagggtatttgtcttcaaagcttttcagggcatgcttgattctcttgcctactatttttattattattaaggacgttcttgctcatccctgttctcttcggcggctagtgttgaagagccatcacatcccaaaagacaagcacacagatacagtgcattggttattattctaggttatagcacgtccgaggagaaacacagcacacaagcacggaaggaaccgtcgcgacattccgacgctcggcgcgctaaactagcagtacaagactagaagctgtgcaggatcgcgagcgaaatcctgggtcatcctccctcccttagagcggtagggcctaggggcacttggggcgctggttcttgggggacttcatgtccctgtagcaggggcactcgtccttgctggcgtacggccccgacggcacgcagccctggcacttgccgcagcacacgccgtccggcaccgcgccgccgtctgcaatgcacacacagggtgtagtcaagtatttacagaaaggagagaggatctcgccctgcaatggttcggtaagattgggaggcgaaaagttacctgctgcctcggcgagatgcttgaacgaggaggcggcagcaaccaggacgaggagcaggagagccacggggatcgccttcatcttcagaagctcttgctgttcgcctgttcctccgagccgaggaaccactggctggctgggctgccgaggtgaaactccaatcgtgagtgaagtggcgacgttgctgtagcgccttcagagttgaggcgctttcggtgtgagtgtgagtcaccattaaagtgccg

SEQ ID NO: 27234 - DNA, 452 bp, Zea Mays
aaagattgccctgtcggaatgataggtccttgattcattcaaatttcaaaggttttagtaaagcagtctgtgcatattacatgatcatgacagcatttcattaactttctgccttgatcatagtagtatgcagaagcagctcccaattgattgggtcataggggcgatgatttaattctcgggcttatgcatttggaaactttgcgattttgagtaggtaaaataatgaccttaatggcaggtatcattgttcgtaatacacttgtgacctatgaccgtcacaatgaaaagattgggttctggaaaactaactgttcagagttgtgggagaggttacatatcggtgacactccttcaccagccccttcaagtgatacaagttcagaacatgatatgtcgcctgctcctgcccctagtaatttgccagggcactttgtttttaggaacaattg

SEQ ID NO: 27235 - DNA, 354 bp, Zea Mays
catcatcatattttaaatgtaaaaaaattcagaaggatccacgatttcaacctgacctctccagttcatattcaccagtaaaatgcaacgttgattgtacttgtgacagtgacaaaaaacagtgcacttatgaaaggcagtatgctgaaatgagctccagcagtggggtgcttggtgaggacatagtgtcttttggcagagagagtgaacttaagccacagcatgctatttttggctgtgaaaattctgaaactggagatttgttcagtcagcatgctgatggtataatggggctgggtcgtggtcaacttagcataatggatcagcttgttgaaaagggtgtcataagtgatt

SEQ ID NO: 27236 - DNA, 370 bp, Zea Mays
aaagtacatgtccggattctttgcattgtcttttgaatgattatccatgaggatccacgatttcaacctgacctctccagttcatattcaccagtaaaatgcaacgttgattgtacttgtgacagtgacaaaaaacagtgcacttatgaaaggcagtatgctgaaatgagctccagcagtggggtgcttggtgaggacatagtgtcttttggcagagagagtgaacttaagccacagcatgctatttttggctgtgaaaattctgaaactggagatttgttcagtcagcatgctgatggtataatggggctgggtcgtggtcaacttagcataatggatcagcttgttgaaaagggtgtcataagtgatt

SEQ ID NO: 27237 - DNA, 1748 bp, Zea Mays
cttctccttccctgcctgtattattattggttttgttgcaaaatggatacagaagcgactttaaacaagtctggtggttctgaatctgtaatgtcattactggaacagcttgctgaagtatttggaaacttgaaatcccacaccgaagcatttctgcaattgcagaatggtatgcaatgggaagatatcaaagggcatttcctcagccttgataagtcgtatggaagcaagtttgatgaattggtagagaagcagaaggcattagaagaaaagaaagctgaagcttgtaggttgattgcagagaaagaggctgatatttctataaaagagcgtgcctccctgaatcagcttcaggagctaagggatgctgctgtctcttctctagcagaggttcggcaaaaatataaggtggagcttgctgagatactcgataccagtgaaagcaaatacaaaaaggtatcattgaggagttggttaagaggcacaggcaaattgatgcagttcatttcatacaagctttcgggctttcagagacattcccccctgcaccactgctgaagacctatattgaggagtttaaggatacaattgaaaataatggggatgcaactgtgtccctgttaaaggacgacccaaaatctagggagctactcactttgagggctgtgataaagtgtatcgaggagtacaagcttcagaaggagtattcacttggacctctccaaaagcgtgtttctgagctaaagcctaagggtgagaaaaggccatcaactgatgctggtgggcgtacttatgcaaagaagcctcgaggccctggcatttcatttaccaggagacctggcggttccattggttcagctgctcgcaggcctccatttccgggctatagctggcagcgtgctcctgcgccaatgccttcccatggtcctgcaccaatgccctcccgtgcccctcttcctgatggatatggagctgctgaccggtaccattacacgccaccagccccagcatatgatgcaggcgcattttcttcttacggtgagccgttcagcaccccaaaaccattccagtatgccccagggtcagtggcagcatcgtacaactcgagtccctataaaatcgcgtatggtggcccgggagcgccagctgcaagcgcatatgcaggttattccggtggggcccaagcaccagctgcaagcgcctatacaggttattccggcgggtccggtccggcagcttctagcagctatgcaaactatctgggatccgtctattgccctccccagcaaccatagattcgcttcatctctctcagaaatgttgtgctggttataaggtgtgttgtgctggtgataaggtgtaactttactctcttttctttttgactcatccacagcactgggttttgggttttggaggtgtaactgatgtagtccagtttctttggaagctgtgtgaggcgccggtcaaaatatgagtgttctcatgtgcactcgtatttacctttagctgtgcttattccttaggatgtttatatctttctgtcaacaagtctgtcttatgtaggaaagtctgtcccatgtactccaggaacatgtaacttttttacttgctaatgttgtgattgagctggaaaagccaaaaagtgtcaaacttgcgaagcttgcgcatctgacgatcttaagcaaataatattctctactttcagttgacatggcttgtacagttgtacttgcaggtctggcata

SEQ ID NO: 27238 - DNA, 1756 bp, Zea Mays
ctctctccctcttctctgacgtcgctgattattattggttttgttgcaaaatggatacagaagcgactttaaacaagtctggtggttctgaatctgtaatgtcattactggaacagcttgctgaagtatttggaaacttgaaatcccacaccgaagcatttctgcaattgcagaatggtatgcaatgggaagatatcaaagggcatttcctcagccttgataagtcgtatggaagcaagtttgatgaattggtagagaagcagaaggcattagaagaaaagaaagctgaagcttgtaggttgattgcagagaaagaggctgatatttctataaaagagcgtgcctccctgaatcagcttcaggagctaagggatgctgctgtctcttctctagcagaggttcggcaaaaatataaggtggagcttgctgagatactcgataccagtgaaagcaaatacaaaaaggtatcattgaggagttggttaagaggcacaggcaaattgatgcagttcatttcatacaagctttcgggctttcagagacattcccccctgcaccactgctgaagacctatattgaggagtttaaggatacaattgaaaataatggggatgcaactgtgtccctgttaaaggacgacccaaaatctagggagctactcactttgagggctgtgataaagtgtatcgaggagtacaagcttcagaaggagtattcacttggacctctccaaaagcgtgtttctgagctaaagcctaagggtgagaaaaggccatcaactgatgctggtgggcgtacttatgcaaagaagcctcgaggccctggcatttcatttaccaggagacctggcggttccattggttcagctgctcgcaggcctccatttccgggctatagctggcagcgtgctcctgcgccaatgccttcccatggtcctgcaccaatgccctcccgtgcccctcttcctgatggatatggagctgctgaccggtaccattacacgccaccagccccagcatatgatgcaggcgcattttcttcttacggtgagccgttcagcaccccaaaaccattccagtatgccccagggtcagtggcagcatcgtacaactcgagtccctataaaatcgcgtatggtggcccgggagcgccagctgcaagcgcatatgcaggttattccggtggggcccaagcaccagctgcaagcgcctatacaggttattccggcgggtccggtccggcagcttctagcagctatgcaaactatctgggatccgtctattgccctccccagcaaccatagattcgcttcatctctctcagaaatgttgtgctggttataaggtgtgttgtgctggtgataaggtgtaactttactctcttttctttttgactcatccacagcactgggttttgggttttggaggtgtaactgatgtagtccagtttctttggaagctgtgtgaggcgccggtcaaaatatgagtgttctcatgtgcactcgtatttacctttagctgtgcttattccttaggatgtttatatctttctgtcaacaagtctgtcttatgtaggaaagtctgtcccatgtactccaggaacatgtaacttttttacttgctaatgttgtgattgagctggaaaagccaaaaagtgtcaaacttgcgaagcttgcgcatctgacgatcttaagcaaataatattctctactttcagttgacatggcttgtacagttgtacttgcaggtctggcata

SEQ ID NO: 27239 - DNA, 1797 bp, Zea Mays
cctcgcgtgaggcagcatgtccgcagctgctctgtctcccgtcctctcgttctcacgcagtagaagatattattattggttttgttgcaaaatggatacagaagcgactttaaacaagtctggtggttctgaatctgtaatgtcattactggaacagcttgctgaagtatttggaaacttgaaatcccacaccgaagcatttctgcaattgcagaatggtatgcaatgggaagatatcaaagggcatttcctcagccttgataagtcgtatggaagcaagtttgatgaattggtagagaagcagaaggcattagaagaaaagaaagctgaagcttgtaggttgattgcagagaaagaggctgatatttctataaaagagcgtgcctccctgaatcagcttcaggagctaagggatgctgctgtctcttctctagcagaggttcggcaaaaatataaggtggagcttgctgagatactcgataccagtgaaagcaaatacaaaaaggtatcattgaggagttggttaagaggcacaggcaaattgatgcagttcatttcatacaagctttcgggctttcagagacattcccccctgcaccactgctgaagacctatattgaggagtttaaggatacaattgaaaataatggggatgcaactgtgtccctgttaaaggacgacccaaaatctagggagctactcactttgagggctgtgataaagtgtatcgaggagtacaagcttcagaaggagtattcacttggacctctccaaaagcgtgtttctgagctaaagcctaagggtgagaaaaggccatcaactgatgctggtgggcgtacttatgcaaagaagcctcgaggccctggcatttcatttaccaggagacctggcggttccattggttcagctgctcgcaggcctccatttccgggctatagctggcagcgtgctcctgcgccaatgccttcccatggtcctgcaccaatgccctcccgtgcccctcttcctgatggatatggagctgctgaccggtaccattacacgccaccagccccagcatatgatgcaggcgcattttcttcttacggtgagccgttcagcaccccaaaaccattccagtatgccccagggtcagtggcagcatcgtacaactcgagtccctataaaatcgcgtatggtggcccgggagcgccagctgcaagcgcatatgcaggttattccggtggggcccaagcaccagctgcaagcgcctatacaggttattccggcgggtccggtccggcagcttctagcagctatgcaaactatctgggatccgtctattgccctccccagcaaccatagattcgcttcatctctctcagaaatgttgtgctggttataaggtgtgttgtgctggtgataaggtgtaactttactctcttttctttttgactcatccacagcactgggttttgggttttggaggtgtaactgatgtagtccagtttctttggaagctgtgtgaggcgccggtcaaaatatgagtgttctcatgtgcactcgtatttacctttagctgtgcttattccttaggatgtttatatctttctgtcaacaagtctgtcttatgtaggaaagtctgtcccatgtactccaggaacatgtaacttttttacttgctaatgttgtgattgagctggaaaagccaaaaagtgtcaaacttgcgaagcttgcgcatctgacgatcttaagcaaataatattctctactttcagttgacatggcttgtacagttgtacttgcaggtctggcata

SEQ ID NO: 27240 - DNA, 1909 bp, Zea Mays
aatcgagtgatcgaccaacgccgtcccttatcgtcgagtttcgacctctcggtaccggctaaaccctagcggcgtcacgtgtgcgacggccaccggtgggcggtggagggttaggcgcgcaaccggcgaagggattcagcggtccccttcccccgtccgaggcgcggcggcgccctgcagattattattggttttgttgcaaaatggatacagaagcgactttaaacaagtctggtggttctgaatctgtaatgtcattactggaacagcttgctgaagtatttggaaacttgaaatcccacaccgaagcatttctgcaattgcagaatggtatgcaatgggaagatatcaaagggcatttcctcagccttgataagtcgtatggaagcaagtttgatgaattggtagagaagcagaaggcattagaagaaaagaaagctgaagcttgtaggttgattgcagagaaagaggctgatatttctataaaagagcgtgcctccctgaatcagcttcaggagctaagggatgctgctgtctcttctctagcagaggttcggcaaaaatataaggtggagcttgctgagatactcgataccagtgaaagcaaatacaaaaaggtatcattgaggagttggttaagaggcacaggcaaattgatgcagttcatttcatacaagctttcgggctttcagagacattcccccctgcaccactgctgaagacctatattgaggagtttaaggatacaattgaaaataatggggatgcaactgtgtccctgttaaaggacgacccaaaatctagggagctactcactttgagggctgtgataaagtgtatcgaggagtacaagcttcagaaggagtattcacttggacctctccaaaagcgtgtttctgagctaaagcctaagggtgagaaaaggccatcaactgatgctggtgggcgtacttatgcaaagaagcctcgaggccctggcatttcatttaccaggagacctggcggttccattggttcagctgctcgcaggcctccatttccgggctatagctggcagcgtgctcctgcgccaatgccttcccatggtcctgcaccaatgccctcccgtgcccctcttcctgatggatatggagctgctgaccggtaccattacacgccaccagccccagcatatgatgcaggcgcattttcttcttacggtgagccgttcagcaccccaaaaccattccagtatgccccagggtcagtggcagcatcgtacaactcgagtccctataaaatcgcgtatggtggcccgggagcgccagctgcaagcgcatatgcaggttattccggtggggcccaagcaccagctgcaagcgcctatacaggttattccggcgggtccggtccggcagcttctagcagctatgcaaactatctgggatccgtctattgccctccccagcaaccatagattcgcttcatctctctcagaaatgttgtgctggttataaggtgtgttgtgctggtgataaggtgtaactttactctcttttctttttgactcatccacagcactgggttttgggttttggaggtgtaactgatgtagtccagtttctttggaagctgtgtgaggcgccggtcaaaatatgagtgttctcatgtgcactcgtatttacctttagctgtgcttattccttaggatgtttatatctttctgtcaacaagtctgtcttatgtaggaaagtctgtcccatgtactccaggaacatgtaacttttttacttgctaatgttgtgattgagctggaaaagccaaaaagtgtcaaacttgcgaagcttgcgcatctgacgatcttaagcaaataatattctctactttcagttgacatggcttgtacagttgtacttgcaggtctggcata

SEQ ID NO: 27241 - DNA, 884 bp, Zea Mays
aatcgagtgatcgaccaacgccgtcccttatcgtcgagtttcgacctctcggtaccggctaaaccctagcggcgtcacgtgtgcgacggccaccggtgggcggtggagggttaggcgcgcaaccggcgaagggattcagcggtccccttcccccgtccgaggcgcggcggcgccctgcagattattattggttttgttgcaaaatggatacagaagcgactttaaacaagtctggtggttctgaatctgtaatgtcattactggaacagcttgctgaagtatttggaaacttgaaatcccacaccgaagcatttctgcaattgcagaatggtatgcaatgggaagatatcaaagggcatttcctcagccttgataagtcgtatggaagcaagtttgatgaattggtagagaagcagaaggcattagaagaaaagaaagctgaagcttgtaggttgattgcagagaaagaggctgatatttctataaaagagcgtgcctccctgaatcagcttcaggagctaagggatgctgctgtctcttctctagcagaggttcggcaaaaatataaggtggagcttgctgagatactcgataccagtgaaagcaaatacaaaaaggtatcattgaggagttggttaagaggcacaggcaaattgatgcagttcatttcatacaagctttcgggctttcagagacattcccccctgcaccactgctgaagacctatattgaggagtttaaggatacaattgaaaataatggggatgcaactgtgtccctgttaaaggttccgacgcacaacagattgccgtcctctcgcggctgtccaccatggagagctatcagatgtcctcatcagctgatgcgaattaagtccttttttg

SEQ ID NO: 27242 - DNA, 2306 bp, Zea Mays
catgccccaaccactccaacccaggcaacacagcaatcagcagaaaaacatctccttggccttccatccatatgatccatccctccaggctccagctaactccaaactaccctctggagcgcgtgctgggggagatcctcgcccgcaacgcggacaccgagtacctctccagcaggtgcggcctcgccggcgctacggaccgcgccaccttccgcgccaaggtgccgatggcgacgtacgaggacctgcagccgtacatccggcgcatcgccgacggcgaccgctcgcccatcctgtcggggcacccggtctccgagttcctcaccagctccggcacgtccggcggcgagcggaagctcatgcccaccatcgaggacgagctcaaccgccgccagctgctgtacagcctccagatgcccgtcatgaacctgtacgtgcctgggatggacaaggggaaagctctccatttcctgttcgtcaagtcggagaccaagacaccgggcggcctcgcggcgaggcccgtcctcacgagctactacaagagcaaccacttcaggaaccgcccgttcgacgcgtacaacaactacacgagccccacggcggccatcctctgcgcggacgcgttccagagcatgtacgcgcagatggtgtgcgggctgtgccagcggcaggacgtgctgcgcgtgggcgccgtgttcgcgtcgggcctcctccgcgccatccgcttcctccagctcaactgggagcagctggcggaggacatcgaggccggctcgctgaccccgcgcgtgaccgacccgtcggtgcgcgaggcggtcgccggcatcctccgccctgaccccgcggtcgccgagctggtccgctccgagtgctccgggggcgactgggcgggcatcgtcacccgcatttggcccaacaccaagtacctggacgtgatcgtcaccggcgccatggcgcagtacatcccgacgctcaagcactacagcggcgggctcccgatggcgtgcaccatgtacgcgtcctcggagtgctacttcgggctgaacctccggcccatgtgcgacccgtcggaggtgtcctacaccctgatgcccaacatgtgctacttcgagttcctgccgatgggcggcgccgtcgacgcgagccagctggtggacctcggccgcgtggagcgcgggcgcgagtacgagctggtgatcaccacgtacgcggggctgaaccggtaccgcgtcggcgacgtgctccaggtgaccggcttccacaactcggcgccgcagttccggttcgtgcgccgcaagaacgtgctgctgtccatcgagtcggacaagacggacgaggccgagctgcagcgcgccgtggagcgcgcgtccgcgctgctccgcccgcacggcgccgccgtggtggagtacaccagccaggcctacaccaagagcatcccgggccactacgtcgtctactgggagctcctgcaggccaaggggggcgccgcggtggacggggagacgctggaagggtgctgcctcgagatggaggaggcgctgaacgcggtgtacaggcagagccgcgtggccgacggctccatcggcccgctggagatccgggtggtccggccgggcaccttcgaggagctcatggactacgccatctcccgcggcgcgtcgatcaaccagtacaaggtgccccggtgcgtgacgttcccgcccatcatcgagctcctggactcccgcgtcgtgtccagccacttgagccccgcgctgccgcactggaccgccggccagcgctccggctccggctccggctccgactagacacagcggcagggcggcgaggcgtgtccgtgtccaggcgcgcttaattagactgtggaatcatctgctgcgtgtcgcagacgtagaagaatgcccgtgaaaacttaaatactatttgttaattttggagttttgagtacgtgctgccagttagaagcgtgagggtaacttaactcgatgcgatgagagttgggctgcttctgcttgaaccgatcagctgaagcaacagtggacgcatatgtatttccggtccggtagtagtggcactgctgtccgtatcacttagcagtacggagaacgaacgcagctaattttaacgtccatccaaatctgtgcgggctgtgcgcctgcacaagacaagctagatcttgctgcaatattccgattactacaaccggctaggagcctgtgaagaaagattcgtaatacatgattcagtgaagcatagatatgagccaaagacccttagaatttgcctcattactggcacaaacgaag

SEQ ID NO: 27243 - DNA, 2596 bp, Zea Mays
taagtaatttggatgaatcggaccatattgatttgggagaccataatatagaccaaccatgtgaagactacctacctaacgagaaaatagttaagtatgataaaataaatccttcaatgcaaccagacaatttatttccgaacatgaaggaatttcgaattgctatgaggcagtatgccataaaggatgagtttgagcttggaatcgatgttatttgactactagatatgttggctattgcaaaggtggtgattgcccttaaaggatctatgtacgggaggaaaagaaaggattatcgaccattatggttttatgtgtcttctttctatacatctggtgtgctgcagcaaacccagcagatcccggggtcttcaaatcaaagaagtatctgagcttgtacggaagcggcaaacacaggcatctgaaggaatgcagaaagggttcttcagatgttcggttacaacttgagggaactggagaaaagcaagagcatgaggtcgcagcatctagcgagatgtcaatgactcaatacaaggacaatattccatcttgcatgagttcaactttctctgcatttctccttctattctaccctctgtcttttgttctctcctgctgtcagtcacatgaatggtcctctgaacagcaagccactgaggaagggatgtttttctgcagtctatgtgaagttcaagtgttgaagtatagtaagcattgcagagtttgtgacaaatgtgttgatggttttgatcatcactgcaggtggctcaacaattgtattggaagaagaaattatgggaggttttttattctaatgtcaaccgcccttatcttgcttatcttacaatcagcaactggagtattggtgctagtgctatgctttgttgagcgaaaggaattctgtctgcaaattgtttcaaagcttggaagcagcttctctgtagtgccttttgttattgtggtggcatcatgtaccatcctagccatggtcgcttcactacctattgcccaacttctttttttccacattcttctgataaagaagggaatcagtacctatgactacatcattgcgctgagagagcaagaacaagatgatttgagtgggcagcagagtccacagatgtctcgtgtaagctcgtacactggactcagcagtactagttcctttggtccacttcgtcgtggttcatggtgcactccaccaaggctgtttcttgaggatcagttcgatgttattccatcggaggctgcttcttcgcataattctgctatgaagagaaaagaagacgagggaaagaggaagaagggctcaggggctgtgcaaataagcccatgggcattagctcgtcttaatgctgaagaagtctcgagggttgctgcagaggcacggaagaagtccaaagttttattaccaatcagaaaagatgactattcgcgagaccacgaaacagatagtagctacggaggcatgagcaatggcaggattgatctaggcaccgatagcaagaggagaacgaacagaagaggaagacagcccagtgatctctctctcaaacctgttgcaaagatatctacagatgttattgattctaccagcagggacatggccccagaagcactgtccaacttagcaccattgcaacttgaggcactgagcgccttccatcccagtagggctgcatcctgtgtgaatgctggtgggtcatctccagatagcagcttggattcgcctgacctgcatctgtaccgagtctcagctgtctcctcgtctggagctgaagacttacaactgacagctctcactgctccaggaagcactccacagcaagggatccaactgtcgaggtcgaccagcgatgggtacgaagcgtcagggggtgaagacagcgaccgcattccgtcacggatagtgcaccgctcgtcgaactgggcaagcatcatcctcaactctgaccagagtgcgtcctcatctggcattcttgtgccaaagaacagactgtcctgacttcatgtgaatgaagattgtaaatgatcagccaagaaccggagattccagtatctggccttctctgttgtcaatatcagattttttcgcagggatggttggatactgcgcaaatcattgtttttttagtctcggaatcgctaggtaggcagtgtctgaatttcttcctagggggttccgggttcaggtgcttgcaattttgctgccagacgacaatgaactgatttgtttagaggttagtaccttggatcgaatgcctgattggttggtgattgttcttgaggttgactggtcggagccgacaatccccccagtaacaaaatgtttcctccagtataaccaaaatgccgctaggcaaccaaattccacaacaattaaatatatatactagttacaccattttgaaagaatgctacacatatcaccagctcttgaatcgctgccaaaactcaggtctgatcgagatgttagatacttcagcttctcagttaggctcttggcgggaatttctgttgtagagtcagtggttagcgtgagccagggacctgtcctgcgctgcgcagtgtccaatgtgagtgcgtgtcatcg

SEQ ID NO: 27244 - DNA, 2751 bp, Zea Mays
cgcacgagcccacagatgcggcaagatcgaatccatggcgagagctagcagaagccgcggggcttggtgcttgaaccctcgatcattcttggaggtccccgttccttctccttgcattgctcgcgttcctcgacgcgagagcagaccagcacagagagaagaaaagaaaaaggagggttctttctcgcgtttcttctgtctattctgcggttctttcttgggagcagtaatgaggcggcatgggtggcagctcccgtaccatcctctccaggtggtggccgtgtccgtcttcttggcgctggccttcgcgttctacgtcttcttcgcacccttcgttgggaggaatgtgttccaggttttatgtgtcttctttctatacatctggtgtgctgcagcaaacccagcagatcccggggtcttcaaatcaaagaagtatctgagcttgtacggaagcggcaaacacaggcatctgaaggaatgcagaaagggttcttcagatgttcggttacaacttgagggaactggagaaaagcaagagcatgaggtcgcagcatctagcgagatgtcaatgactcaatacaaggacaatattccatcttgcatgagttcaactttctctgcatttctccttctattctaccctctgtcttttgttctctcctgctgtcagtcacatgaatggtcctctgaacagcaagccactgaggaagggatgtttttctgcagtctatgtgaagttcaagtgttgaagtatagtaagcattgcagagtttgtgacaaatgtgttgatggttttgatcatcactgcagggtaatgtactccttagcaattttcttatttcccatcagtgtgtacataataactcccctgttttcctcaatctaacagtggctcaacaattgtattggaagaagaaattatgggaggttttttattctaatgtcaaccgcccttatcttggtctgcatggtttgtgcaatttgggccagcttatcttacaatcagcaactggagtattggtgctagtgctatgctttgttgagcgaaaggaattctgtctgcaaattgtttcaaagcttggaagcagcttctctgtagtgccttttgttattgtggtggcatcatgtaccatcctagccatggtcgcttcactacctattgcccaacttctttttttccacattcttctgataaagaagggaatcagtacctatgactacatcattgcgctgagagagcaagaacaagatgatttgagtgggcagcagagtccacagatgtctcgtgtaagctcgtacactggactcagcagtactagttcctttggtccacttcgtcgtggttcatggtgcactccaccaaggctgtttcttgaggatcagttcgatgttattccatcggaggctgcttcttcgcataattctgctatgaagagaaaagaagacgagggaaagaggaagaagggctcaggggctgtgcaaataagcccatgggcattagctcgtcttaatgctgaagaagtctcgagggttgctgcagaggcacggaagaagtccaaagttttattaccaatcagaaaagatgactattcgcgagaccacgaaacagatagtagctacggaggcatgagcaatggcaggattgatctaggcaccgatagcaagaggagaacgaacagaagaggaagacagcccagtgatctctctctcaaacctgttgcaaagatatctacagatgttattgattctaccagcagggacatggccccagaagcactgtccaacttagcaccattgcaacttgaggcactgagcgccttccatcccagtagggctgcatcctgtgtgaatgctggtgggtcatctccagatagcagcttggattcgcctgacctgcatctgtaccgagtctcagctgtctcctcgtctggagctgaagacttacaactgacagctctcactgctccaggaagcactccacagcaagggatccaactgtcgaggtcgaccagcgatgggtacgaagcgtcagggggtgaagacagcgaccgcattccgtcacggatagtgcaccgctcgtcgaactgggcaagcatcatcctcaactctgaccagagtgcgtcctcatctggcattcttgtgccaaagaacagactgtcctgacttcatgtgaatgaagattgtaaatgatcagccaagaaccggagattccagtatctggccttctctgttgtcaatatcagattttttcgcagggatggttggatactgcgcaaatcattgtttttttagtctcggaatcgctaggtaggcagtgtctgaatttcttcctagggggttccgggttcaggtgcttgcaattttgctgccagacgacaatgaactgatttgtttagaggttagtaccttggatcgaatgcctgattggttggtgattgttcttgaggttgactggtcggagccgacaatccccccagtaacaaaatgtttcctccagtataaccaaaatgccgctaggcaaccaaattccacaacaattaaatatatatactagttacaccattttgaaagaatgctacacatatcaccagctcttgaatcgctgccaaaactcaggtctgatcgagatgttagatacttcagcttctcagttaggctcttggcgggaatttctgttgtagagtcagtggttagcgtgagccagggacctgtcctgcgctgcgcagtgtccaatgtgagtgcgtgtcatcg

SEQ ID NO: 27245 - DNA, 1978 bp, Zea Mays
caacctttggtctccccccgccgctccatcccataccgctctcgcacgagcccacagatgcggcaagatcgaatccatggcgagagctagcagaagccgcggggcttggtgcttgaaccctcgatcattcttggaggtccccgttccttctccttgcattgctcgcgttcctcgacgcgagagcagaccagcacagagagaagaaaagaaaaaggagggttctttctcgcgtttcttctgtctattctgcggttctttcttgggagcagtaatgaggcggcatgggtggcagctcccgtaccatcctctccaggtggtggccgtgtccgtcttcttggcgctggccttcgcgttctacgtcttcttcgcacccttcgttgggaggaatgtgttccagtacgtggtcatagggctctacactcccctgggaatcagtacctatgactacatcattgcgctgagagagcaagaacaagatgatttgagtgggcagcagagtccacagatgtctcgtgtaagctcgtacactggactcagcagtactagttcctttggtccacttcgtcgtggttcatggtgcactccaccaaggctgtttcttgaggatcagttcgatgttattccatcggaggctgcttcttcgcataattctgctatgaagagaaaagaagacgagggaaagaggaagaagggctcaggggctgtgcaaataagcccatgggcattagctcgtcttaatgctgaagaagtctcgagggttgctgcagaggcacggaagaagtccaaagttttattaccaatcagaaaagatgactattcgcgagaccacgaaacagatagtagctacggaggcatgagcaatggcaggattgatctaggcaccgatagcaagaggagaacgaacagaagaggaagacagcccagtgatctctctctcaaacctgttgcaaagatatctacagatgttattgattctaccagcagggacatggccccagaagcactgtccaacttagcaccattgcaacttgaggcactgagcgccttccatcccagtagggctgcatcctgtgtgaatgctggtgggtcatctccagatagcagcttggattcgcctgacctgcatctgtaccgagtctcagctgtctcctcgtctggagctgaagacttacaactgacagctctcactgctccaggaagcactccacagcaagggatccaactgtcgaggtcgaccagcgatgggtacgaagcgtcagggggtgaagacagcgaccgcattccgtcacggatagtgcaccgctcgtcgaactgggcaagcatcatcctcaactctgaccagagtgcgtcctcatctggcattcttgtgccaaagaacagactgtcctgacttcatgtgaatgaagattgtaaatgatcagccaagaaccggagattccagtatctggccttctctgttgtcaatatcagattttttcgcagggatggttggatactgcgcaaatcattgtttttttagtctcggaatcgctaggtaggcagtgtctgaatttcttcctagggggttccgggttcaggtgcttgcaattttgctgccagacgacaatgaactgatttgtttagaggttagtaccttggatcgaatgcctgattggttggtgattgttcttgaggttgactggtcggagccgacaatccccccagtaacaaaatgtttcctccagtataaccaaaatgccgctaggcaaccaaattccacaacaattaaatatatatactagttacaccattttgaaagaatgctacacatatcaccagctcttgaatcgctgccaaaactcaggtctgatcgagatgttagatacttcagcttctcagttaggctcttggcgggaatttctgttgtagagtcagtggttagcgtgagccagggacctgtcctgcgctgcgcagtgtccaatgtgagtgcgtgtcatcg

SEQ ID NO: 27246 - DNA, 2730 bp, Zea Mays
ctccaacctttggtctccccccgccgctccatcccataccgctctcgcacgagcccacagatgcggcaagatcgaatccatggcgagagctagcagaagccgcggggcttggtgcttgaaccctcgatcattcttggaggtccccgttccttctccttgcattgctcgcgttcctcgacgcgagagcagaccagcacagagagaagaaaagaaaaaggagggttctttctcgcgtttcttctgtctattctgcggttctttcttgggagcagtaatgaggcggcatgggtggcagctcccgtaccatcctctccaggtggtggccgtgtccgtcttcttggcgctggccttcgcgttctacgtcttcttcgcacccttcgttgggaggaatgtgttccagtacgtggtcatagggctctacactcccctggttttatgtgtcttctttctatacatctggtgtgctgcagcaaacccagcagatcccggggtcttcaaatcaaagaagtatctgagcttgtacggaagcggcaaacacaggcatctgaaggaatgcagaaagggttcttcagatgttcggttacaacttgagggaactggagaaaagcaagagcatgaggtcgcagcatctagcgagatgtcaatgactcaatacaaggacaatattccatcttgcatgagttcaactttctctgcatttctccttctattctaccctctgtcttttgttctctcctgctgtcagtcacatgaatggtcctctgaacagcaagccactgaggaagggatgtttttctgcagtctatgtgaagttcaagtgttgaagtatagtaagcattgcagagtttgtgacaaatgtgttgatggttttgatcatcactgcaggtggctcaacaattgtattggaagaagaaattatgggaggttttttattctaatgtcaaccgcccttatcttgcttatcttacaatcagcaactggagtattggtgctagtgctatgctttgttgagcgaaaggaattctgtctgcaaattgtttcaaagcttggaagcagcttctctgtagtgccttttgttattgtggtgcgttgacacaggcatcatgtaccatcctagccatggtcgcttcactacctattgcccaacttctttttttccacattcttctgataaagaagggaatcagtacctatgactacatcattgcgctgagagagcaagaacaagatgatttgagtgggcagcagagtccacagatgtctcgtgtaagctcgtacactggactcagcagtactagttcctttggtccacttcgtcgtggttcatggtgcactccaccaaggctgtttcttgaggatcagttcgatgttattccatcggaggctgcttcttcgcataattctgctatgaagagaaaagaagacgagggaaagaggaagaagggctcaggggctgtgcaaataagcccatgggcattagctcgtcttaatgctgaagaagtctcgagggttgctgcagaggcacggaagaagtccaaagttttattaccaatcagaaaagatgactattcgcgagaccacgaaacagatagtagctacggaggcatgagcaatggcaggattgatctaggcaccgatagcaagaggagaacgaacagaagaggaagacagcccagtgatctctctctcaaacctgttgcaaagatatctacagatgttattgattctaccagcagggacatggccccagaagcactgtccaacttagcaccattgcaacttgaggcactgagcgccttccatcccagtagggctgcatcctgtgtgaatgctggtgggtcatctccagatagcagcttggattcgcctgacctgcatctgtaccgagtctcagctgtctcctcgtctggagctgaagacttacaactgacagctctcactgctccaggaagcactccacagcaagggatccaactgtcgaggtcgaccagcgatgggtacgaagcgtcagggggtgaagacagcgaccgcattccgtcacggatagtgcaccgctcgtcgaactgggcaagcatcatcctcaactctgaccagagtgcgtcctcatctggcattcttgtgccaaagaacagactgtcctgacttcatgtgaatgaagattgtaaatgatcagccaagaaccggagattccagtatctggccttctctgttgtcaatatcagattttttcgcagggatggttggatactgcgcaaatcattgtttttttagtctcggaatcgctaggtaggcagtgtctgaatttcttcctagggggttccgggttcaggtgcttgcaattttgctgccagacgacaatgaactgatttgtttagaggttagtaccttggatcgaatgcctgattggttggtgattgttcttgaggttgactggtcggagccgacaatccccccagtaacaaaatgtttcctccagtataaccaaaatgccgctaggcaaccaaattccacaacaattaaatatatatactagttacaccattttgaaagaatgctacacatatcaccagctcttgaatcgctgccaaaactcaggtctgatcgagatgttagatacttcagcttctcagttaggctcttggcgggaatttctgttgtagagtcagtggttagcgtgagccagggacctgtcctgcgctgcgcagtgtccaatgtgagtgcgtgtcatcg

SEQ ID NO: 27247 - DNA, 2732 bp, Zea Mays
atttaatgctctccaacctttggtctccccccgccgctccatcccataccgctctcgcacgagcccacagatgcggcaagatcgaatccatggcgagagctagcagaagccgcggggcttggtgcttgaaccctcgatcattcttggaggtccccgttccttctccttgcattgctcgcgttcctcgacgcgagagcagaccagcacagagagaagaaaagaaaaaggagggttctttctcgcgtttcttctgtctattctgcggttctttcttgggagcagtaatgaggcggcatgggtggcagctcccgtaccatcctctccaggtggtggccgtgtccgtcttcttggcgctggccttcgcgttctacgtcttcttcgcacccttcgttgggaggaatgtgttccagtacgtggtcatagggctctacactcccctggttttatgtgtcttctttctatacatctggtgtgctgcagcaaacccagcagatcccggggtcttcaaatcaaagaagtatctgagcttgtacggaagcggcaaacacaggcatctgaaggaatgcagaaagggttcttcagatgttcggttacaacttgagggaactggagaaaagcaagagcatgaggtcgcagcatctagcgagatgtcaatgactcaatacaaggacaatattccatcttgcatgagttcaactttctctgcatttctccttctattctaccctctgtcttttgttctctcctgctgtcagtcacatgaatggtcctctgaacagcaagccactgaggaagggatgtttttctgcagtctatgtgaagttcaagtgttgaagtatagtaagcattgcagagtttgtgacaaatgtgttgatggttttgatcatcactgcaggaaattatgggaggttttttattctaatgtcaaccgcccttatcttggtctgcatggtttgtgcaatttgggccagcttatcttacaatcagcaactggagtattggtgctagtgctatgctttgttgagcgaaaggaattctgtctgcaaattgtttcaaagcttggaagcagcttctctgtagtgccttttgttattgtggtggcatcatgtaccatcctagccatggtcgcttcactacctattgcccaacttctttttttccacattcttctgataaagaagggaatcagtacctatgactacatcattgcgctgagagagcaagaacaagatgatttgagtgggcagcagagtccacagatgtctcgtgtaagctcgtacactggactcagcagtactagttcctttggtccacttcgtcgtggttcatggtgcactccaccaaggctgtttcttgaggatcagttcgatgttattccatcggaggctgcttcttcgcataattctgctatgaagagaaaagaagacgagggaaagaggaagaagggctcaggggctgtgcaaataagcccatgggcattagctcgtcttaatgctgaagaagtctcgagggttgctgcagaggcacggaagaagtccaaagttttattaccaatcagaaaagatgactattcgcgagaccacgaaacagatagtagctacggaggcatgagcaatggcaggattgatctaggcaccgatagcaagaggagaacgaacagaagaggaagacagcccagtgatctctctctcaaacctgttgcaaagatatctacagatgttattgattctaccagcagggacatggccccagaagcactgtccaacttagcaccattgcaacttgaggcactgagcgccttccatcccagtagggctgcatcctgtgtgaatgctggtgggtcatctccagatagcagcttggattcgcctgacctgcatctgtaccgagtctcagctgtctcctcgtctggagctgaagacttacaactgacagctctcactgctccaggaagcactccacagcaagggatccaactgtcgaggtcgaccagcgatgggtacgaagcgtcagggggtgaagacagcgaccgcattccgtcacggatagtgcaccgctcgtcgaactgggcaagcatcatcctcaactctgaccagagtgcgtcctcatctggcattcttgtgccaaagaacagactgtcctgacttcatgtgaatgaagattgtaaatgatcagccaagaaccggagattccagtatctggccttctctgttgtcaatatcagattttttcgcagggatggttggatactgcgcaaatcattgtttttttagtctcggaatcgctaggtaggcagtgtctgaatttcttcctagggggttccgggttcaggtgcttgcaattttgctgccagacgacaatgaactgatttgtttagaggttagtaccttggatcgaatgcctgattggttggtgattgttcttgaggttgactggtcggagccgacaatccccccagtaacaaaatgtttcctccagtataaccaaaatgccgctaggcaaccaaattccacaacaattaaatatatatactagttacaccattttgaaagaatgctacacatatcaccagctcttgaatcgctgccaaaactcaggtctgatcgagatgttagatacttcagcttctcagttaggctcttggcgggaatttctgttgtagagtcagtggttagcgtgagccagggacctgtcctgcgctgcgcagtgtccaatgtgagtgcgtgtcatcg

SEQ ID NO: 27248 - DNA, 6103 bp, Zea Mays
tgccttgctcctcctcctgctgctgcgctccgccgcggagccctaggcggagctgcggaccccgtgaccccccgcggcaccgccccggagctcggcggaggcggcgggcacgtcctcctcatgcctttggcgccccggtcggagccgatcggtggccgcctgaggagacgcagcagctcggcgggcgccggcggagaggcggcgggcacgtcctcctcatgcctttggcgccccggtcggagccgatcggtggccgcctgaggagacgcagcagctcggcgggcgccggcggagaggcggcgggcgcggaggtggaggcggaggcggaggaggaggaaggggagaatggcgctcttccgcaagttcttcctcaagaagaccccggatcggctgctcgagatctccgagaacgtctacgtgtttgactgttgcttctcgactgattccatgggtgaggatgagtatcgggattacttgagtggcattgtcgcgcaattgcaggaattttttccggacacatcacttatggcatccaatttttggtctggggacaaaagaagccggatatcagatattttatctgagtatgacatgacagtaatggactacccacaacagtatgaaggatgtccgttgcttcagctcgagatgatccaccatttcttgaaatcatgtgaaaattggctatcagtggaaggacaacataacatgcttttgatgcattgcgagagagggggttggccagtgcttgcattcatgttggccggactgcttttgtatcgcaaaatatatactggcgagcagaggacactagaaatggtctacaagcaggctcgcagggactttatacagcagttctttcccttgaatccccagccttcacatttgagatatctgcactatataacaagacaaggaggtggttcagaatggcctcctattagcagacccctcatcttggattcaatagttctccatgttgttccgcggtttgacacagatggtggttgtaggccatacttgattgtacatgggcaagactcaagtcctggtaacaagagtgcaaaggtcctttatgagatgccaaaaacaaagaagcaccttcagcgttatggacaggcagaggttcccataaaattaagtgtgtcctgccatgttcatggagatgtggtacttgaattcatccatattggcgataatatagagaataaggaaacaatgttccgggtcatgttcaacactgcattcgttcaatcaaacatccttgaactgaatcgtgatgatattgatgttgcttggaatgtgaataatcagttcccaagggactttcgagctgaggtacacttttcagaccctgtttcatttaagcctgctgctaccatcgaggaggtagctgatgatggagacgagactgatgttgcttcggtagacacaggagaggagttttatgaagcagaggagtattggcatgatgctagaaaagacccagcaactcattcaattgatggtggaatatcattaaatgacattgcagaatttgatggtggggcaacaactgaagaaaggagcagcctagagaagcaccgatctgatgagggtgtgaagattgctgtctcccagaattttggtagtatgaatgaaaaagtggcaattgcacctacctcaagttttgagaatcaagaaggattgcagcagcctcgtgaagttcttccaaatgctaaactaagcaaaaataatgatcaagagaacagtgatgtgcatgatatacaggtggttgctacatctgttgattcagagggacacaagtttggatctaccggtcaggaggacacgaaaggtgtaattgcacaaactttagtcacgacagtcgatctaagtggcagtgatggaattcactgccagactgatgaacaaacaaaaatgtcagaataccctgatttggactacactgcttttggctctcctagaagtttgtcacgtacagatggggatgcccacatgagaactaagaaaaatgaagggttgcagaatggtgatattaagattatcactgagaacacaataagtgtggacaacgagctagtgatctatgaagagaaaactatagttgtcaatggtaatgcaatacaggtagtaaaaaacgttgtcaatgaagagagcatcgcggctaagataggcaaaccaattactgagagtaggacctcattggacaatgacaatggcaagattcaaactgctaaaccttctgatatagccaatggcaaattggatgggtgtagattagaatcttgccttgaaaccgtgcctaccaagaaaaccactgtccatgacagaattgttgtcttaccagccactggagtagcaactgagataaaagccaagcaagaggtgcttgttgacaaacaggattttggtatagttcttcctcaaagtcgaacagtagccagggctaggagtccgaggcttggaagtgatgaccgagggcaaatccctgataaagctgtgttatcagtattgaaggagatggtagtaggcaatgcaaagatggaagatcaaccaaagcttgccaaaccaaaaataatgcgtagatggatctcaccaaagaaggaatctgacgctacctctgtgcgcagaccatctcaccctccatctagatactacagttcaccagctgcactaggtattcgatccatatctacagatggtaaaatcagcgttgtgaatgatgcacctttattatcactaaaacaaccatatggcagcaacttgacacgagaagcaacatctgcacagtctgctccatcgcctccacaaaaatccttgttactaggtgcacaaagtgcatcaagaagccaggtttctccaccgccaccgcctccacctccacctgcaaccaactattcttcaagttctacgcctatgcacatggggttagcttcaacaggtttgtcaaacttacctcaaggtgcttctccacctaggtcaccggtagcacaaaaacatgcatttgcccctcccgctcctcccccgcccccacctccacccccgaggtcaggtgtaggtggaaatactccacctccgcctcctccaaggctaaataacagtgcaatcgctccaccgccacccccatccaccataacacgatcaagtgctcctcctccaccaccaccaccacaatcaatgtcacgttctgctcctccgccacctccgccgccaccaccatcattgtgttctaatgttccattgccacctctttcatgcacactttctgctccacctcctccgccgccaccaccactaccttctatggcacgttcagcagcaccatctcccccgccacctcctcctagccgaggagcacccccaccccttccccttggtcgaggagcacctccacccccacccccaccaccaccacctggccgaggagcacccccacccccacctcctcctggccggggagcatccctgcccccacctcctccccctagccgaggagcacccccgcccccacctcctcctgtttcacgtgcaggacctccaccacctccgcctcctccaggtgctcgctgtggacctccacctcctccaccccctccaggtgcaagtgctccacctccacctcctcctccaggtgcacggccaggagctccaccaccaccgcctcctctaggagcgcggccaggagctccacctcccccacccccacctggaggtggtggaagaggacctctaccacctcgtgcaccaggtgtgccaactccacctagagcaccaggtgtaccgctaccaccaggaagtaatccatcattaggcagaggacgtggggctgtacgccctatgggatcagctattggggctgctgcctcacgcaagtcaactttgaagccattgcactgggtcaaagtgacaagggcccttcaaggtagtctttgggaagaattgcagcgcaacactgactcgcagagcgtttcagagttcgatgtatcagaacttgagagcctttttcctgcagctgttccaaagtctgatgacagctcaaaatctgaacgtagaaaatcacttggatcaaaaccagaaaaagtgcatctaattgagttgaggagggcaaataacacagagatcatgctgacaaaagttaaaatgccactctcggatttggtgagtgcagctctcacgctagatcaatctaccttggatgttgatcaagtggagaatctcataaagttctgtcctacgaaagaagaaatggaacttctcaagaattacactggagacaaacagattcttgggaaatgtgaacagttcttcttagaattgatgaaagtgcctagaatggagtcgaaactgcgagtattctccttcaagatccagtttggttcacaagttgctgatctgagaagaaacttggatatcatagactcttcttgtaatgagatccgaacttctctcaagttgaaagaaataatgaagaaaatccttctccttggaaatactctgaaccagggaactgctagagagtactacttccacttaacatgataaatgccagactcaagtaggactgttctgtggtttgtaaaccatagctctatctttcctgaacttcaggatgtcatggcataatgctatgttacatagccagtgcatgttctccatcttctactcgatcaacagttgaatagaatcgaagactcaatacacaatgaactgtattttgcatgaagatggtcagatgttccgtgagtgttgtatgggataggggctgcggttggcttccggttggacagtcttctaaaacttacagacacccgagcaacaaataataagatgacactaatgcactacctctgtaaggtacttgctgcaagatctccacagcttttaaacttctatgcggatcttgttagcttagacgccgcatcaaagatacaactaaaaatgttggccgaggaaatgcaagcagttagtaaagggctggaaaaggttcagcttgagtatgatgcttcagaaagggatggtccagtatccaaaatttttcgtgagaaactgaaagagttcaccgacaatgctggatctgatgtgcagtcgttatcttcattgttttctgaagtgggtaaaaaggctgacgcgttgatcaagtattttggcgaggatcctgtccgttgccccttcgaacaagtgatctccaccctcttaacttttgtaacaacatttcgaaaagcacatgaggagaacctgaagcaagctgaacttgagaagaaaaaagctgaaaaagaggcagaagcagagaaggccaaaaacgcacaattaactggcaaaaatcactctaaatcatcaaatccaagccgacaagctaagcaagccatagagaggacaagatctgtaagcagacgaggaagagatgctgggtgattatcccgaatggccggctattgtggctgtgcttctgatctgcttgcgaggcaaatgaacgaccgcatgatgcatttctggcaaggggagtttcgtggacggacgccgtggcatccgtcgggtgcagcgcgatcgcatcaaagaaactttacatgataccagctgcggactctcactggagaatgccggcttctttttttatccatatcgtccatcagggtccagtgctaacttctgactgctgtaaagagcgaatgcgtcgtcacacccagcgtagccaattcatcagggatctggaggaggccagaaaggacgaagcggcggcggtgccgtgtcctacggtcctacctgtcagttgccgcggtgtcctcctgtcctgatccacgtcgccgccactgacagactcctctctcaccgtggcacgaattgatgagccacgaattgaggattgatcaagaaactgaaagagttcaccgacaatgctggaatcgttatcttcattgttttccgaagtgggtaaaaaggctgacgcgatgatcaagcattttggcgaggatcctatccgttgccccttcaaacaagggagaagcaccaaaaatttatcagcactctaaaccaaacaataagaccttgggagagaatggactcatgttggtcatagcatgacgaagatgaggctgcagttgag

SEQ ID NO: 27249 - DNA, 2213 bp, Zea Mays
cgaagactcaatacacaatgaactgtattttgcatgaagatggtcagatgttccgtgagtgttgtatgggataggggctgcggttggcttccggttggacagtcttctaaaacttacagacacccgagcaacaaataataagatgacactaatgcactacctctgtaaggtacttgctgcaagatctccacagcttttaaacttctatgcggatcttgttagcttagacgccgcatcaaagatacaactaaaaatgttggccgaggaaatgcaagcagttagtaaagggctggaaaaggttcagcttgagtatgatgcttcagaaagggatggtccagtatccaaaatttttcgtgagaaactgaaagagttcaccgacaatgctggatctgatgtgcagtcgttatcttcattgttttctgaagtgggtaaaaaggctgacgcgttgatcaagtattttggcgaggatcctgtccgttgccccttcgaacaagtgatctccaccctcttaacttttgtaacaacatttcgaaaagcacatgaggagaacctgaagcaagctgaacttgagaagaaaaaagctgaaaaagaggcagaagcagagaaggccaaaaacgcacaattaactggcaaaaatcactctaaatcatcaaatccaagccgacaagctaagcaagccatagagaggacaagatctgtaagcagacgaggaagagatgctgggtgattatcccgaatggccggctattgtggctgtgcttctgatctgcttgcgaggcaaatgaacgaccgcatgatgcatttctggcaaggggagtttcgtggacggacgccgtggcatccgtcgggtgcagcgcgatcgcatcaaagaaactttacatgataccagctgcggactctcactggagaatgccggcttctttttttatccatatcgtccatcagggtccagtgctaacttctgactgctgtaaagaggtgctaacactgacgctaactccattctttcttttgttttttcatgttaattgtccattctttctaacaacggtggtcaagtaatagtacagactggtgttttggtgggaaattgtaaaaaataggcattagggtagaaaatgtatggatataatgtaggagtatcagcctatcaggagtaaatatgagatgtaaagctcagcccgtagtttagatgtaaagttttgtactgagtatattctcactttctaatttctatgatcacgatgcagcgaatgcgtcgtcacacccagcgtagccaattcatcagggatctggaggaggccagaaaggacgaagcggcggcggtgccgtgtcctacggtcctacctgtcagttgccgcggtgtcctcctgtcctgatccacgtcgccgccactgacagactcctctctcaccgtggcacgaattgatgagccacgaattgaggattgatcaaggtcttggcatcaacaaagctgccagcggtttttcagcttcattttagtttgtttatatagatctgtgccttgatcgaggtaggacgattcctagttaggctttgttcgtttacaccaatcccgctctggattagcatggattggaattaaatccatacctcaatccatgccccaaaataatccatgactacttaattttttttgttcggttaaacccatcatggaatataaaccaaaggtttaggaattttttaaactatggaagacatggattctatccatagcccattaggtatggaacaaatccatgagatattgcacaagtttacattagaatccatggatcaaaagaataactagctttgaaagtcacatggatttgttgatggatttaatcccaccatgggattgggtgtgagatatggattcacccaatccatatccggattaaatccatggtgggattatatcccatgtaaccgaacaaggccttatgagtttcaatttcttgtacgccaaggactggatctggaactgcggtcggtcggttgtaacgttgctttattatatggcttcaaagaggctaggaaatgagactgaggcgctagaaaagaaggttgtggagtggggtgagcccagtgtgccgtccggcaagcagggtaaaaaggctgacgcgatgatcaagcattttggcgaggatcctatccgttgccccttcaaacaagggagaagcaccaaaaatttatcagcactctaa

SEQ ID NO: 27250 - DNA, 1521 bp, Zea Mays
tgctatgttacatagccagtgcatgttctccatcttctactcgatcaacaggggctgcggttggcttccggttggacagtcttctaaaacttacagacacccgagcaacaaataataagatgacactaatgcactacctctgtaaggtacttgctgcaagatctccacagcttttaaacttctatgcggatcttgttagcttagacgccgcatcaaagatacaactaaaaatgttggccgaggaaatgcaagcagttagtaaagggctggaaaaggttcagcttgagtatgatgcttcagaaagggatggtccagtatccaaaatttttcgtgagaaactgaaagagttcaccgacaatgctggatctgatgtgcagtcgttatcttcattgttttctgaagtgggtaaaaaggctgacgcgttgatcaagtattttggcgaggatcctgtccgttgccccttcgaacaagtgatctccaccctcttaacttttgtaacaacatttcgaaaagcacatgaggagaacctgaagcaagctgaacttgagaagaaaaaagctgaaaaagaggcagaagcagagaaggccaaaaacgcacaattaactggcaaaaatcactctaaatcatcaaatccaagccgacaagctaagcaagccatagagaggacaagatctgtaagcagacgaggaagagatgctgggtgattatcccgaatggccggctattgtggctgtgcttctgatctgcttgcgaggcaaatgaacgaccgcatgatgcatttctggcaaggggagtttcgtggacggacgccgtggcatccgtcgggtgcagcgcgatcgcatcaaagaaactttacatgataccagctgcggactctcactggagaatgccggcttctttttttatccatatcgtccatcagggtccagtgctaacttctgactgctgtaaagagcgaatgcgtcgtcacacccagcgtagccaattcatcagggatctggaggaggccagaaaggacgaagcggcggcggtgccgtgtcctacggtcctacctgtcagttgccgcggtgtcctcctgtcctgatccacgtcgccgccactgacagactcctctctcaccgtggcacgaattgatgagccacgaattgaggattgatcaaggtcttggcatcaacaaagctgccagcggtttttcagcttcattttagtttgtttatatagatctgtgccttgatcgaggtaggacgattcctagttatgagtttcaatttcttgtacgccaaggactggatctggaactgcggtcggtcggttgtaacgttgctttattatatggcttcaaagaggctaggaaatgagactgaggcgctagaaaagaaggttgtggagtggggtgagcccagtgtgccgtccggcaagcagggtaaaaaggctgacgcgatgatcaagcattttggcgaggatcctatccgttgccccttcaaacaagggagaagcaccaaaaatttatcagcactctaa

SEQ ID NO: 27251 - DNA, 5572 bp, Zea Mays
tgccttgctcctcctcctgctgctgcgctccgccgcggagccctaggcggagctgcggaccccgtgaccccccgcggcaccgccccggagctcggcggaggcggcgggcacgtcctcctcatgcctttggcgccccggtcggagccgatcggtggccgcctgaggagacgcagcagctcggcgggcgccggcggagaggcggcgggcacgtcctcctcatgcctttggcgccccggtcggagccgatcggtggccgcctgaggagacgcagcagctcggcgggcgccggcggagaggcggcgggcgcggaggtggaggcggaggcggaggaggaggaaggggagaatggcgctcttccgcaagttcttcctcaagaagaccccggatcggctgctcgagatctccgagaacgtctacgtgtttgactgttgcttctcgactgattccatgggtgaggatgagtatcgggattacttgagtggcattgtcgcgcaattgcaggaattttttccggacacatcacttatggcatccaatttttggtctggggacaaaagaagccggatatcagatattttatctgagtatgacatgacagtaatggactacccacaacagtatgaaggatgtccgttgcttcagctcgagatgatccaccatttcttgaaatcatgtgaaaattggctatcagtggaaggacaacataacatgcttttgatgcattgcgagagagggggttggccagtgcttgcattcatgttggccggactgcttttgtatcgcaaaatatatactggcgagcagaggacactagaaatggtctacaagcaggctcgcagggactttatacagcagttctttcccttgaatccccagccttcacatttgagatatctgcactatataacaagacaaggaggtggttcagaatggcctcctattagcagacccctcatcttggattcaatagttctccatgttgttccgcggtttgacacagatggtggttgtaggccatacttgattgtacatgggcaagactcaagtcctggtaacaagagtgcaaaggtcctttatgagatgccaaaaacaaagaagcaccttcagcgttatggacaggcagaggttcccataaaattaagtgtgtcctgccatgttcatggagatgtggtacttgaattcatccatattggcgataatatagagaataaggaaacaatgttccgggtcatgttcaacactgcattcgttcaatcaaacatccttgaactgaatcgtgatgatattgatgttgcttggaatgtgaataatcagttcccaagggactttcgagctgaggtacacttttcagaccctgtttcatttaagcctgctgctaccatcgaggaggtagctgatgatggagacgagactgatgttgcttcggtagacacaggagaggagttttatgaagcagaggagtattggcatgatgctagaaaagacccagcaactcattcaattgatggtggaatatcattaaatgacattgcagaatttgatggtggggcaacaactgaagaaaggagcagcctagagaagcaccgatctgatgagggtgtgaagattgctgtctcccagaattttggtagtatgaatgaaaaagtggcaattgcacctacctcaagttttgagaatcaagaaggattgcagcagcctcgtgaagttcttccaaatgctaaactaagcaaaaataatgatcaagagaacagtgatgtgcatgatatacaggtggttgctacatctgttgattcagagggacacaagtttggatctaccggtcaggaggacacgaaaggtgtaattgcacaaactttagtcacgacagtcgatctaagtggcagtgatggaattcactgccagactgatgaacaaacaaaaatgtcagaataccctgatttggactacactgcttttggctctcctagaagtttgtcacgtacagatggggatgcccacatgagaactaagaaaaatgaagggttgcagaatggtgatattaagattatcactgagaacacaataagtgtggacaacgagctagtgatctatgaagagaaaactatagttgtcaatggtaatgcaatacaggtagtaaaaaacgttgtcaatgaagagagcatcgcggctaagataggcaaaccaattactgagagtaggacctcattggacaatgacaatggcaagattcaaactgctaaaccttctgatatagccaatggcaaattggatgggtgtagattagaatcttgccttgaaaccgtgcctaccaagaaaaccactgtccatgacagaattgttgtcttaccagccactggagtagcaactgagataaaagccaagcaagaggtgcttgttgacaaacaggattttggtatagttcttcctcaaagtcgaacagtagccagggctaggagtccgaggcttggaagtgatgaccgagggcaaatccctgataaagctgtgttatcagtattgaaggagatggtagtaggcaatgcaaagatggaagatcaaccaaagcttgccaaaccaaaaataatgcgtagatggatctcaccaaagaaggaatctgacgctacctctgtgcgcagaccatctcaccctccatctagatactacagttcaccagctgcactaggtattcgatccatatctacagatggtaaaatcagcgttgtgaatgatgcacctttattatcactaaaacaaccatatggcagcaacttgacacgagaagcaacatctgcacagtctgctccatcgcctccacaaaaatccttgttactaggtgcacaaagtgcatcaagaagccaggtttctccaccgccaccgcctccacctccacctgcaaccaactattcttcaagttctacgcctatgcacatggggttagcttcaacaggtttgtcaaacttacctcaaggtgcttctccacctaggtcaccggtagcacaaaaacatgcatttgcccctcccgctcctcccccgcccccacctccacccccgaggtcaggtgtaggtggaaatactccacctccgcctcctccaaggctaaataacagtgcaatcgctccaccgccacccccatccaccataacacgatcaagtgctcctcctccaccaccaccaccacaatcaatgtcacgttctgctcctccgccacctccgccgccaccaccatcattgtgttctaatgttccattgccacctctttcatgcacactttctgctccacctcctccgccgccaccaccactaccttctatggcacgttcagcagcaccatctcccccgccacctcctcctagccgaggagcacccccaccccttccccttggtcgaggagcacctccacccccacccccaccaccaccacctggccgaggagcacccccacccccacctcctcctggccggggagcatccctgcccccacctcctccccctagccgaggagcacccccgcccccacctcctcctgtttcacgtgcaggacctccaccacctccgcctcctccaggtgctcgctgtggacctccacctcctccaccccctccaggtgcaagtgctccacctccacctcctcctccaggtgcacggccaggagctccaccaccaccgcctcctctaggagcgcggccaggagctccacctcccccacccccacctggaggtggtggaagaggacctctaccacctcgtgcaccaggtgtgccaactccacctagagcaccaggtgtaccgctaccaccaggaagtaatccatcattaggcagaggacgtggggctgtacgccctatgggatcagctattggggctgctgcctcacgcaagtcaactttgaagccattgcactgggtcaaagtgacaagggcccttcaaggtagtctttgggaagaattgcagcgcaacactgactcgcagagagttcgatgtatcagaacttgagagcctttttcctgcagctgttccaaagtctgatgacagctcaaaatctgaacgtagaaaatcacttggatcaaaaccagaaaaagtgcatctaattgagttgaggagggcaaataacacagagatcatgctgacaaaagttaaaatgccactctcggatttggtgagtgcagctctcacgctagatcaatctaccttggatgttgatcaagtggagaatctcataaagttctgtcctacgaaagaagaaatggaacttctcaagaattacactggagacaaacagattcttgggaaatgtgaacagttcttcttagaattgatgaaagtgcctagaatggagtcgaaactgcgagtattctccttcaagatccagtttggttcacaagttgctgatctgagaagaaacttggatatcatagactcttcttgtaatgagatccgaacttctctcaagttgaaagaaataatgaagaaaatccttctccttggaaatactctgaaccagggaactgctagaggggctgcggttggcttccggttggacagtcttctaaaacttacagacacccgagcaacaaataataagatgacactaatgcactacctctgtaaggtacttgctgcaagatctccacagcttttaaacttctatgcggatcttgttagcttagacgccgcatcaaagatacaactaaaaatgttggccgaggaaatgcaagcagttagtaaagggctggaaaaggttcagcttgagtatgatgcttcagaaagggatggtccagtatccaaaatttttcgtgagaaactgaaagagttcaccgacaatgctggatctgatgtgcagtcgttatcttcattgttttctgaagtgggtaaaaaggctgacgcgttgatcaagtattttggcgaggatcctgtccgttgccccttcgaacaagtgatctccaccctcttaacttttgtaacaacatttcgaaaagcacatgaggagaacctgaagcaagctgaacttgagaagaaaaaagctgaaaaagaggcagaagcagagaaggccaaaaacgcacaattaactggcaaaaatcactctaaatcatcaaatccaagccgacaagctaagcaagccatagagaggacaagatctgtaagcagacgaggaagagatgctgggtgattatcccgaatggccggctattgtggctgtgcttctgatctgcttgcgaggcaaatgaacgaccgcatgatgcatttctggcaaggggagtttcgtggacggacgccgtggcatccgtcgggtgcagcgcgatcgcatcaaagaaactttacatgataccagctgcggactctcactggagaatgccggcttctttttttatccatatcgtccatcagggtccagtgctaacttctgactgctgtaaagagaaactgaaagagttcaccgacaatgctggaatcgttatcttcattgttttccgaagtgggtaaaaaggctgacgcgatgatcaagcattttggcgaggatcctatccgttgccccttcaaacaagggagaagcaccaaaaatttatcagcactctaa

SEQ ID NO: 27252 - DNA, 5580 bp, Zea Mays
tgccttgctcctcctcctgctgctgcgctccgccgcggagccctaggcggagctgcggaccccgtgaccccccgcggcaccgccccggagctcggcggaggcggcgggcacgtcctcctcatgcctttggcgccccggtcggagccgatcggtggccgcctgaggagacgcagcagctcggcgggcgccggcggagaggcggcgggcacgtcctcctcatgcctttggcgccccggtcggagccgatcggtggccgcctgaggagacgcagcagctcggcgggcgccggcggagaggcggcgggcgcggaggtggaggcggaggcggaggaggaggaaggggagaatggcgctcttccgcaagttcttcctcaagaagaccccggatcggctgctcgagatctccgagaacgtctacgtgtttgactgttgcttctcgactgattccatgggtgaggatgagtatcgggattacttgagtggcattgtcgcgcaattgcaggaattttttccggacacatcacttatggcatccaatttttggtctggggacaaaagaagccggatatcagatattttatctgagtatgacatgacagtaatggactacccacaacagtatgaaggatgtccgttgcttcagctcgagatgatccaccatttcttgaaatcatgtgaaaattggctatcagtggaaggacaacataacatgcttttgatgcattgcgagagagggggttggccagtgcttgcattcatgttggccggactgcttttgtatcgcaaaatatatactggcgagcagaggacactagaaatggtctacaagcaggctcgcagggactttatacagcagttctttcccttgaatccccagccttcacatttgagatatctgcactatataacaagacaaggaggtggttcagaatggcctcctattagcagacccctcatcttggattcaatagttctccatgttgttccgcggtttgacacagatggtggttgtaggccatacttgattgtacatgggcaagactcaagtcctggtaacaagagtgcaaaggtcctttatgagatgccaaaaacaaagaagcaccttcagcgttatggacaggcagaggttcccataaaattaagtgtgtcctgccatgttcatggagatgtggtacttgaattcatccatattggcgataatatagagaataaggaaacaatgttccgggtcatgttcaacactgcattcgttcaatcaaacatccttgaactgaatcgtgatgatattgatgttgcttggaatgtgaataatcagttcccaagggactttcgagctgaggtacacttttcagaccctgtttcatttaagcctgctgctaccatcgaggaggtagctgatgatggagacgagactgatgttgcttcggtagacacaggagaggagttttatgaagcagaggagtattggcatgatgctagaaaagacccagcaactcattcaattgatggtggaatatcattaaatgacattgcagaatttgatggtggggcaacaactgaagaaaggagcagcctagagaagcaccgatctgatgagggtgtgaagattgctgtctcccagaattttggtagtatgaatgaaaaagtggcaattgcacctacctcaagttttgagaatcaagaaggattgcagcagcctcgtgaagttcttccaaatgctaaactaagcaaaaataatgatcaagagaacagtgatgtgcatgatatacaggtggttgctacatctgttgattcagagggacacaagtttggatctaccggtcaggaggacacgaaaggtgtaattgcacaaactttagtcacgacagtcgatctaagtggcagtgatggaattcactgccagactgatgaacaaacaaaaatgtcagaataccctgatttggactacactgcttttggctctcctagaagtttgtcacgtacagatggggatgcccacatgagaactaagaaaaatgaagggttgcagaatggtgatattaagattatcactgagaacacaataagtgtggacaacgagctagtgatctatgaagagaaaactatagttgtcaatggtaatgcaatacaggtagtaaaaaacgttgtcaatgaagagagcatcgcggctaagataggcaaaccaattactgagagtaggacctcattggacaatgacaatggcaagattcaaactgctaaaccttctgatatagccaatggcaaattggatgggtgtagattagaatcttgccttgaaaccgtgcctaccaagaaaaccactgtccatgacagaattgttgtcttaccagccactggagtagcaactgagataaaagccaagcaagaggtgcttgttgacaaacaggattttggtatagttcttcctcaaagtcgaacagtagccagggctaggagtccgaggcttggaagtgatgaccgagggcaaatccctgataaagctgtgttatcagtattgaaggagatggtagtaggcaatgcaaagatggaagatcaaccaaagcttgccaaaccaaaaataatgcgtagatggatctcaccaaagaaggaatctgacgctacctctgtgcgcagaccatctcaccctccatctagatactacagttcaccagctgcactaggtattcgatccatatctacagatggtaaaatcagcgttgtgaatgatgcacctttattatcactaaaacaaccatatggcagcaacttgacacgagaagcaacatctgcacagtctgctccatcgcctccacaaaaatccttgttactaggtgcacaaagtgcatcaagaagccaggtttctccaccgccaccgcctccacctccacctgcaaccaactattcttcaagttctacgcctatgcacatggggttagcttcaacaggtttgtcaaacttacctcaaggtgcttctccacctaggtcaccggtagcacaaaaacatgcatttgcccctcccgctcctcccccgcccccacctccacccccgaggtcaggtgtaggtggaaatactccacctccgcctcctccaaggctaaataacagtgcaatcgctccaccgccacccccatccaccataacacgatcaagtgctcctcctccaccaccaccaccacaatcaatgtcacgttctgctcctccgccacctccgccgccaccaccatcattgtgttctaatgttccattgccacctctttcatgcacactttctgctccacctcctccgccgccaccaccactaccttctatggcacgttcagcagcaccatctcccccgccacctcctcctagccgaggagcacccccaccccttccccttggtcgaggagcacctccacccccacccccaccaccaccacctggccgaggagcacccccacccccacctcctcctggccggggagcatccctgcccccacctcctccccctagccgaggagcacccccgcccccacctcctcctgtttcacgtgcaggacctccaccacctccgcctcctccaggtgctcgctgtggacctccacctcctccaccccctccaggtgcaagtgctccacctccacctcctcctccaggtgcacggccaggagctccaccaccaccgcctcctctaggagcgcggccaggagctccacctcccccacccccacctggaggtggtggaagaggacctctaccacctcgtgcaccaggtgtgccaactccacctagagcaccaggtgtaccgctaccaccaggaagtaatccatcattaggcagaggacgtggggctgtacgccctatgggatcagctattggggctgctgcctcacgcaagtcaactttgaagccattgcactgggtcaaagtgacaagggcccttcaaggtagtctttgggaagaattgcagcgcaacactgactcgcagagcgtttcagagttcgatgtatcagaacttgagagcctttttcctgcagctgttccaaagtctgatgacagctcaaaatctgaacgtagaaaatcacttggatcaaaaccagaaaaagtgcatctaattgagttgaggagggcaaataacacagagatcatgctgacaaaagttaaaatgccactctcggatttggtgagtgcagctctcacgctagatcaatctaccttggatgttgatcaagtggagaatctcataaagttctgtcctacgaaagaagaaatggaacttctcaagaattacactggagacaaacagattcttgggaaatgtgaacagttcttcttagaattgatgaaagtgcctagaatggagtcgaaactgcgagtattctccttcaagatccagtttggttcacaagttgctgatctgagaagaaacttggatatcatagactcttcttgtaatgagatccgaacttctctcaagttgaaagaaataatgaagaaaatccttctccttggaaatactctgaaccagggaactgctagaggggctgcggttggcttccggttggacagtcttctaaaacttacagacacccgagcaacaaataataagatgacactaatgcactacctctgtaaggtacttgctgcaagatctccacagcttttaaacttctatgcggatcttgttagcttagacgccgcatcaaagatacaactaaaaatgttggccgaggaaatgcaagcagttagtaaagggctggaaaaggttcagcttgagtatgatgcttcagaaagggatggtccagtatccaaaatttttcgtgagaaactgaaagagttcaccgacaatgctggatctgatgtgcagtcgttatcttcattgttttctgaagtgggtaaaaaggctgacgcgttgatcaagtattttggcgaggatcctgtccgttgccccttcgaacaagtgatctccaccctcttaacttttgtaacaacatttcgaaaagcacatgaggagaacctgaagcaagctgaacttgagaagaaaaaagctgaaaaagaggcagaagcagagaaggccaaaaacgcacaattaactggcaaaaatcactctaaatcatcaaatccaagccgacaagctaagcaagccatagagaggacaagatctgtaagcagacgaggaagagatgctgggtgattatcccgaatggccggctattgtggctgtgcttctgatctgcttgcgaggcaaatgaacgaccgcatgatgcatttctggcaaggggagtttcgtggacggacgccgtggcatccgtcgggtgcagcgcgatcgcatcaaagaaactttacatgataccagctgcggactctcactggagaatgccggcttctttttttatccatatcgtccatcagggtccagtgctaacttctgactgctgtaaagagaaactgaaagagttcaccgacaatgctggaatcgttatcttcattgttttccgaagtgggtaaaaaggctgacgcgatgatcaagcattttggcgaggatcctatccgttgccccttcaaacaagggagaagcaccaaaaatttatcagcactctaa

SEQ ID NO: 27253 - DNA, 5908 bp, Zea Mays
tgccttgctcctcctcctgctgctgcgctccgccgcggagccctaggcggagctgcggaccccgtgaccccccgcggcaccgccccggagctcggcggaggcggcgggcacgtcctcctcatgcctttggcgccccggtcggagccgatcggtggccgcctgaggagacgcagcagctcggcgggcgccggcggagaggcggcgggcacgtcctcctcatgcctttggcgccccggtcggagccgatcggtggccgcctgaggagacgcagcagctcggcgggcgccggcggagaggcggcgggcgcggaggtggaggcggaggcggaggaggaggaaggggagaatggcgctcttccgcaagttcttcctcaagaagaccccggatcggctgctcgagatctccgagaacgtctacgtgtttgactgttgcttctcgactgattccatgggtgaggatgagtatcgggattacttgagtggcattgtcgcgcaattgcaggaattttttccggacacatcacttatggcatccaatttttggtctggggacaaaagaagccggatatcagatattttatctgagtatgacatgacagtaatggactacccacaacagtatgaaggatgtccgttgcttcagctcgagatgatccaccatttcttgaaatcatgtgaaaattggctatcagtggaaggacaacataacatgcttttgatgcattgcgagagagggggttggccagtgcttgcattcatgttggccggactgcttttgtatcgcaaaatatatactggcgagcagaggacactagaaatggtctacaagcaggctcgcagggactttatacagcagttctttcccttgaatccccagccttcacatttgagatatctgcactatataacaagacaaggaggtggttcagaatggcctcctattagcagacccctcatcttggattcaatagttctccatgttgttccgcggtttgacacagatggtggttgtaggccatacttgattgtacatgggcaagactcaagtcctggtaacaagagtgcaaaggtcctttatgagatgccaaaaacaaagaagcaccttcagcgttatggacaggcagaggttcccataaaattaagtgtgtcctgccatgttcatggagatgtggtacttgaattcatccatattggcgataatatagagaataaggaaacaatgttccgggtcatgttcaacactgcattcgttcaatcaaacatccttgaactgaatcgtgatgatattgatgttgcttggaatgtgaataatcagttcccaagggactttcgagctgaggtacacttttcagaccctgtttcatttaagcctgctgctaccatcgaggaggtagctgatgatggagacgagactgatgttgcttcggtagacacaggagaggagttttatgaagcagaggagtattggcatgatgctagaaaagacccagcaactcattcaattgatggtggaatatcattaaatgacattgcagaatttgatggtggggcaacaactgaagaaaggagcagcctagagaagcaccgatctgatgagggtgtgaagattgctgtctcccagaattttggtagtatgaatgaaaaagtggcaattgcacctacctcaagttttgagaatcaagaaggattgcagcagcctcgtgaagttcttccaaatgctaaactaagcaaaaataatgatcaagagaacagtgatgtgcatgatatacaggtggttgctacatctgttgattcagagggacacaagtttggatctaccggtcaggaggacacgaaaggtgtaattgcacaaactttagtcacgacagtcgatctaagtggcagtgatggaattcactgccagactgatgaacaaacaaaaatgtcagaataccctgatttggactacactgcttttggctctcctagaagtttgtcacgtacagatggggatgcccacatgagaactaagaaaaatgaagggttgcagaatggtgatattaagattatcactgagaacacaataagtgtggacaacgagctagtgatctatgaagagaaaactatagttgtcaatggtaatgcaatacaggtagtaaaaaacgttgtcaatgaagagagcatcgcggctaagataggcaaaccaattactgagagtaggacctcattggacaatgacaatggcaagattcaaactgctaaaccttctgatatagccaatggcaaattggatgggtgtagattagaatcttgccttgaaaccgtgcctaccaagaaaaccactgtccatgacagaattgttgtcttaccagccactggagtagcaactgagataaaagccaagcaagaggtgcttgttgacaaacaggattttggtatagttcttcctcaaagtcgaacagtagccagggctaggagtccgaggcttggaagtgatgaccgagggcaaatccctgataaagctgtgttatcagtattgaaggagatggtagtaggcaatgcaaagatggaagatcaaccaaagcttgccaaaccaaaaataatgcgtagatggatctcaccaaagaaggaatctgacgctacctctgtgcgcagaccatctcaccctccatctagatactacagttcaccagctgcactaggtattcgatccatatctacagatggtaaaatcagcgttgtgaatgatgcacctttattatcactaaaacaaccatatggcagcaacttgacacgagaagcaacatctgcacagtctgctccatcgcctccacaaaaatccttgttactaggtgcacaaagtgcatcaagaagccaggtttctccaccgccaccgcctccacctccacctgcaaccaactattcttcaagttctacgcctatgcacatggggttagcttcaacaggtttgtcaaacttacctcaaggtgcttctccacctaggtcaccggtagcacaaaaacatgcatttgcccctcccgctcctcccccgcccccacctccacccccgaggtcaggtgtaggtggaaatactccacctccgcctcctccaaggctaaataacagtgcaatcgctccaccgccacccccatccaccataacacgatcaagtgctcctcctccaccaccaccaccacaatcaatgtcacgttctgctcctccgccacctccgccgccaccaccatcattgtgttctaatgttccattgccacctctttcatgcacactttctgctccacctcctccgccgccaccaccactaccttctatggcacgttcagcagcaccatctcccccgccacctcctcctagccgaggagcacccccaccccttccccttggtcgaggagcacctccacccccacccccaccaccaccacctggccgaggagcacccccacccccacctcctcctggccggggagcatccctgcccccacctcctccccctagccgaggagcacccccgcccccacctcctcctgtttcacgtgcaggacctccaccacctccgcctcctccaggtgctcgctgtggacctccacctcctccaccccctccaggtgcaagtgctccacctccacctcctcctccaggtgcacggccaggagctccaccaccaccgcctcctctaggagcgcggccaggagctccacctcccccacccccacctggaggtggtggaagaggacctctaccacctcgtgcaccaggtgtgccaactccacctagagcaccaggtgtaccgctaccaccaggaagtaatccatcattaggcagaggacgtggggctgtacgccctatgggatcagctattggggctgctgcctcacgcaagtcaactttgaagccattgcactgggtcaaagtgacaagggcccttcaaggtagtctttgggaagaattgcagcgcaacactgactcgcagagcgtttcagagttcgatgtatcagaacttgagagcctttttcctgcagctgttccaaagtctgatgacagctcaaaatctgaacgtagaaaatcacttggatcaaaaccagaaaaagtgcatctaattgagttgaggagggcaaataacacagagatcatgctgacaaaagttaaaatgccactctcggatttggtgagtgcagctctcacgctagatcaatctaccttggatgttgatcaagtggagaatctcataaagttctgtcctacgaaagaagaaatggaacttctcaagaattacactggagacaaacagattcttgggaaatgtgaacagttcttcttagaattgatgaaagtgcctagaatggagtcgaaactgcgagtattctccttcaagatccagtttggttcacaagttgctgatctgagaagaaacttggatatcatagactcttcttgtaatgagatccgaacttctctcaagttgaaagaaataatgaagaaaatccttctccttggaaatactctgaaccagggaactgctagagagtactacttccacttaacatgataaatgccagactcaagtaggactgttctgtggtttgtaaaccatagctctatctttcctgaacttcaggatgtcatggcataatgctatgttacatagccagtgcatgttctccatcttctactcgatcaacaggtgtacaatgtttcagtttaaacctgtatactcgtcaccaatgtctttaaccaatattgttgtctttatgcatgcgaccaagaagttgaatagaatcgaagactcaatacacaatgaactgtattttgcatgaagatggtcagatgttccgtgagtgttgtatgggataggggctgcggttggcttccggttggacagtcttctaaaacttacagacacccgagcaacaaataataagatgacactaatgcactacctctgtaaggtacttgctgcaagatctccacagcttttaaacttctatgcggatcttgttagcttagacgccgcatcaaagatacaactaaaaatgttggccgaggaaatgcaagcagttagtaaagggctggaaaaggttcagcttgagtatgatgcttcagaaagggatggtccagtatccaaaatttttcgtgagaaactgaaagagttcaccgacaatgctggatctgatgtgcagtcgttatcttcattgttttctgaagtgggtaaaaaggctgacgcgttgatcaagtattttggcgaggatcctgtccgttgccccttcgaacaagtgatctccaccctcttaacttttgtaacaacatttcgaaaagcacatgaggagaacctgaagcaagctgaacttgagaagaaaaaagctgaaaaagaggcagaagcagagaaggccaaaaacgcacaattaactggcaaaaatcactctaaatcatcaaatccaagccgacaagctaagcaagccatagagaggacaagatctgtaagcagacgaggaagagatgctgggtgattatcccgaatggccggctattgtggctgtgcttctgatctgcttgcgaggcaaatgaacgaccgcatgatgcatttctggcaaggggagtttcgtggacggacgccgtggcatccgtcgggtgcagcgcgatcgcatcaaagaaactttacatgataccagctgcggactctcactggagaatgccggcttctttttttatccatatcgtccatcagggtccagtgctaacttctgactgctgtaaagagaaactgaaagagttcaccgacaatgctggaatcgttatcttcattgttttccgaagtgggtaaaaaggctgacgcgatgatcaagcattttggcgaggatcctatccgttgccccttcaaacaagggagaagcaccaaaaatttatcagcactctaa

SEQ ID NO: 27254 - DNA, 6386 bp, Zea Mays
tgccttgctcctcctcctgctgctgcgctccgccgcggagccctaggcggagctgcggaccccgtgaccccccgcggcaccgccccggagctcggcggaggcggcgggcacgtcctcctcatgcctttggcgccccggtcggagccgatcggtggccgcctgaggagacgcagcagctcggcgggcgccggcggagaggcggcgggcacgtcctcctcatgcctttggcgccccggtcggagccgatcggtggccgcctgaggagacgcagcagctcggcgggcgccggcggagaggcggcgggcgcggaggtggaggcggaggcggaggaggaggaaggggagaatggcgctcttccgcaagttcttcctcaagaagaccccggatcggctgctcgagatctccgagaacgtctacgtgtttgactgttgcttctcgactgattccatgggtgaggatgagtatcgggattacttgagtggcattgtcgcgcaattgcaggaattttttccggacacatcacttatggcatccaatttttggtctggggacaaaagaagccggatatcagatattttatctgagtatgacatgacagtaatggactacccacaacagtatgaaggatgtccgttgcttcagctcgagatgatccaccatttcttgaaatcatgtgaaaattggctatcagtggaaggacaacataacatgcttttgatgcattgcgagagagggggttggccagtgcttgcattcatgttggccggactgcttttgtatcgcaaaatatatactggcgagcagaggacactagaaatggtctacaagcaggctcgcagggactttatacagcagttctttcccttgaatccccagccttcacatttgagatatctgcactatataacaagacaaggaggtggttcagaatggcctcctattagcagacccctcatcttggattcaatagttctccatgttgttccgcggtttgacacagatggtggttgtaggccatacttgattgtacatgggcaagactcaagtcctggtaacaagagtgcaaaggtcctttatgagatgccaaaaacaaagaagcaccttcagcgttatggacaggcagaggttcccataaaattaagtgtgtcctgccatgttcatggagatgtggtacttgaattcatccatattggcgataatatagagaataaggaaacaatgttccgggtcatgttcaacactgcattcgttcaatcaaacatccttgaactgaatcgtgatgatattgatgttgcttggaatgtgaataatcagttcccaagggactttcgagctgaggtacacttttcagaccctgtttcatttaagcctgctgctaccatcgaggaggtagctgatgatggagacgagactgatgttgcttcggtagacacaggagaggagttttatgaagcagaggagtattggcatgatgctagaaaagacccagcaactcattcaattgatggtggaatatcattaaatgacattgcagaatttgatggtggggcaacaactgaagaaaggagcagcctagagaagcaccgatctgatgagggtgtgaagattgctgtctcccagaattttggtagtatgaatgaaaaagtggcaattgcacctacctcaagttttgagaatcaagaaggattgcagcagcctcgtgaagttcttccaaatgctaaactaagcaaaaataatgatcaagagaacagtgatgtgcatgatatacaggtggttgctacatctgttgattcagagggacacaagtttggatctaccggtcaggaggacacgaaaggtgtaattgcacaaactttagtcacgacagtcgatctaagtggcagtgatggaattcactgccagactgatgaacaaacaaaaatgtcagaataccctgatttggactacactgcttttggctctcctagaagtttgtcacgtacagatggggatgcccacatgagaactaagaaaaatgaagggttgcagaatggtgatattaagattatcactgagaacacaataagtgtggacaacgagctagtgatctatgaagagaaaactatagttgtcaatggtaatgcaatacaggtagtaaaaaacgttgtcaatgaagagagcatcgcggctaagataggcaaaccaattactgagagtaggacctcattggacaatgacaatggcaagattcaaactgctaaaccttctgatatagccaatggcaaattggatgggtgtagattagaatcttgccttgaaaccgtgcctaccaagaaaaccactgtccatgacagaattgttgtcttaccagccactggagtagcaactgagataaaagccaagcaagaggtgcttgttgacaaacaggattttggtatagttcttcctcaaagtcgaacagtagccagggctaggagtccgaggcttggaagtgatgaccgagggcaaatccctgataaagctgtgttatcagtattgaaggagatggtagtaggcaatgcaaagatggaagatcaaccaaagcttgccaaaccaaaaataatgcgtagatggatctcaccaaagaaggaatctgacgctacctctgtgcgcagaccatctcaccctccatctagatactacagttcaccagctgcactaggtattcgatccatatctacagatggtaaaatcagcgttgtgaatgatgcacctttattatcactaaaacaaccatatggcagcaacttgacacgagaagcaacatctgcacagtctgctccatcgcctccacaaaaatccttgttactaggtgcacaaagtgcatcaagaagccaggtttctccaccgccaccgcctccacctccacctgcaaccaactattcttcaagttctacgcctatgcacatggggttagcttcaacaggtttgtcaaacttacctcaaggtgcttctccacctaggtcaccggtagcacaaaaacatgcatttgcccctcccgctcctcccccgcccccacctccacccccgaggtcaggtgtaggtggaaatactccacctccgcctcctccaaggctaaataacagtgcaatcgctccaccgccacccccatccaccataacacgatcaagtgctcctcctccaccaccaccaccacaatcaatgtcacgttctgctcctccgccacctccgccgccaccaccatcattgtgttctaatgttccattgccacctctttcatgcacactttctgctccacctcctccgccgccaccaccactaccttctatggcacgttcagcagcaccatctcccccgccacctcctcctagccgaggagcacccccaccccttccccttggtcgaggagcacctccacccccacccccaccaccaccacctggccgaggagcacccccacccccacctcctcctggccggggagcatccctgcccccacctcctccccctagccgaggagcacccccgcccccacctcctcctgtttcacgtgcaggacctccaccacctccgcctcctccaggtgctcgctgtggacctccacctcctccaccccctccaggtgcaagtgctccacctccacctcctcctccaggtgcacggccaggagctccaccaccaccgcctcctctaggagcgcggccaggagctccacctcccccacccccacctggaggtggtggaagaggacctctaccacctcgtgcaccaggtgtgccaactccacctagagcaccaggtgtaccgctaccaccaggaagtaatccatcattaggcagaggacgtggggctgtacgccctatgggatcagctattggggctgctgcctcacgcaagtcaactttgaagccattgcactgggtcaaagtgacaagggcccttcaaggtagtctttgggaagaattgcagcgcaacactgactcgcagagcgtttcagagttcgatgtatcagaacttgagagcctttttcctgcagctgttccaaagtctgatgacagctcaaaatctgaacgtagaaaatcacttggatcaaaaccagaaaaagtgcatctaattgagttgaggagggcaaataacacagagatcatgctgacaaaagttaaaatgccactctcggatttggtgagtgcagctctcacgctagatcaatctaccttggatgttgatcaagtggagaatctcataaagttctgtcctacgaaagaagaaatggaacttctcaagaattacactggagacaaacagattcttgggaaatgtgaacagttcttcttagaattgatgaaagtgcctagaatggagtcgaaactgcgagtattctccttcaagatccagtttggttcacaagttgctgatctgagaagaaacttggatatcatagactcttcttgtaatgagatccgaacttctctcaagttgaaagaaataatgaagaaaatccttctccttggaaatactctgaaccagggaactgctagaggggctgcggttggcttccggttggacagtcttctaaaacttacagacacccgagcaacaaataataagatgacactaatgcactacctctgtaaggtacttgctgcaagatctccacagcttttaaacttctatgcggatcttgttagcttagacgccgcatcaaagatacaactaaaaatgttggccgaggaaatgcaagcagttagtaaagggctggaaaaggttcagcttgagtatgatgcttcagaaagggatggtccagtatccaaaatttttcgtgagaaactgaaagagttcaccgacaatgctggatctgatgtgcagtcgttatcttcattgttttctgaagtgggtaaaaaggctgacgcgttgatcaagtattttggcgaggatcctgtccgttgccccttcgaacaagtgatctccaccctcttaacttttgtaacaacatttcgaaaagcacatgaggagaacctgaagcaagctgaacttgagaagaaaaaagctgaaaaagaggcagaagcagagaaggccaaaaacgcacaattaactggcaaaaatcactctaaatcatcaaatccaagccgacaagctaagcaagccatagagaggacaagatctgtaagcagacgaggaagagatgctgggtgattatcccgaatggccggctattgtggctgtgcttctgatctgcttgcgaggcaaatgaacgaccgcatgatgcatttctggcaaggggagtttcgtggacggacgccgtggcatccgtcgggtgcagcgcgatcgcatcaaagaaactttacatgataccagctgcggactctcactggagaatgccggcttctttttttatccatatcgtccatcagggtccagtgctaacttctgactgctgtaaagagcgaatgcgtcgtcacacccagcgtagccaattcatcagggatctggaggaggccagaaaggacgaagcggcggcggtgccgtgtcctacggtcctacctgtcagttgccgcggtgtcctcctgtcctgatccacgtcgccgccactgacagactcctctctcaccgtggcacgaattgatgagccacgaattgaggattgatcaaggtcttggcatcaacaaagctgccagcggtttttcagcttcattttagtttgtttatatagatctgtgccttgatcgaggtaggacgattcctagttaggctttgttcgtttacaccaatcccgctctggattagcatggattggaattaaatccatacctcaatccatgccccaaaataatccatgactacttaattttttttgttcggttaaacccatcatggaatataaaccaaaggtttaggaattttttaaactatggaagacatggattctatccatagcccattaggtatggaacaaatccatgagatattgcacaagtttacattagaatccatggatcaaaagaataactagctttgaaagtcacatggatttgttgatggatttaatcccaccatgggattgggtgtgagatatggattcacccaatccatatccggattaaatccatggtgggattatatcccatgtaaccgaacaaggccttatgagtttcaatttcttgtacgccaaggactggatctggaactgcggtcggtcggttgtaacgttgctttattatatggcttcaaagaggctaggaaatgagactgaggcgctagaaaagaaggttgtggagtggggtgagcccagtgtgccgtccggcaagcagggtaaaaaggctgacgcgatgatcaagcattttggcgaggatcctatccgttgccccttcaaacaagggagaagcaccaaaaatttatcagcactctaa

SEQ ID NO: 27255 - DNA, 6356 bp, Zea Mays
cgaccgccccccgggctccgacgcccttcctcaccaccgtgccttgctcctcctcctgctgctgcgctccgccgcggagccctaggcggagctgcggaccccgtgaccccccgcggcaccgccccggagctcggcggaggcggcgggcacgtcctcctcatgcctttggcgccccggtcggagccgatcggtggccgcctgaggagacgcagcagctcggcgggcgccggcggagaggcggcgggcacgtcctcctcatgcctttggcgccccggtcggagccgatcggtggccgcctgaggagacgcagcagctcggcgggcgccggcggagaggcggcgggcgcggaggtggaggcggaggcggaggaggaggaaggggagaatggcgctcttccgcaagttcttcctcaagaagaccccggatcggctgctcgagatctccgagaacgtctacgtgtttgactgttgcttctcgactgattccatgggtgaggatgagtatcgggattacttgagtggcattgtcgcgcaattgcaggaattttttccggacacatcacttatggcatccaatttttggtctggggacaaaagaagccggatatcagatattttatctgagtatgacatgacagtaatggactacccacaacagtatgaaggatgtccgttgcttcagctcgagatgatccaccatttcttgaaatcatgtgaaaattggctatcagtggaaggacaacataacatgcttttgatgcattgcgagagagggggttggccagtgcttgcattcatgttggccggactgcttttgtatcgcaaaatatatactggcgagcagaggacactagaaatggtctacaagcaggctcgcagggactttatacagcagttctttcccttgaatccccagccttcacatttgagatatctgcactatataacaagacaaggaggtggttcagaatggcctcctattagcagacccctcatcttggattcaatagttctccatgttgttccgcggtttgacacagatggtggttgtaggccatacttgattgtacatgggcaagactcaagtcctggtaacaagagtgcaaaggtcctttatgagatgccaaaaacaaagaagcaccttcagcgttatggacaggcagaggttcccataaaattaagtgtgtcctgccatgttcatggagatgtggtacttgaattcatccatattggcgataatatagagaataaggaaacaatgttccgggtcatgttcaacactgcattcgttcaatcaaacatccttgaactgaatcgtgatgatattgatgttgcttggaatgtgaataatcagttcccaagggactttcgagctgaggtacacttttcagaccctgtttcatttaagcctgctgctaccatcgaggaggtagctgatgatggagacgagactgatgttgcttcggtagacacaggagaggagttttatgaagcagaggagtattggcatgatgctagaaaagacccagcaactcattcaattgatggtggaatatcattaaatgacattgcagaatttgatggtggggcaacaactgaagaaaggagcagcctagagaagcaccgatctgatgagggtgtgaagattgctgtctcccagaattttggtagtatgaatgaaaaagtggcaattgcacctacctcaagttttgagaatcaagaaggattgcagcagcctcgtgaagttcttccaaatgctaaactaagcaaaaataatgatcaagagaacagtgatgtgcatgatatacaggtggttgctacatctgttgattcagagggacacaagtttggatctaccggtcaggaggacacgaaaggtgtaattgcacaaactttagtcacgacagtcgatctaagtggcagtgatggaattcactgccagactgatgaacaaacaaaaatgtcagaataccctgatttggactacactgcttttggctctcctagaagtttgtcacgtacagatggggatgcccacatgagaactaagaaaaatgaagggttgcagaatggtgatattaagattatcactgagaacacaataagtgtggacaacgagctagtgatctatgaagagaaaactatagttgtcaatggtaatgcaatacaggtagtaaaaaacgttgtcaatgaagagagcatcgcggctaagataggcaaaccaattactgagagtaggacctcattggacaatgacaatggcaagattcaaactgctaaaccttctgatatagccaatggcaaattggatgggtgtagattagaatcttgccttgaaaccgtgcctaccaagaaaaccactgtccatgacagaattgttgtcttaccagccactggagtagcaactgagataaaagccaagcaagaggtgcttgttgacaaacaggattttggtatagttcttcctcaaagtcgaacagtagccagggctaggagtccgaggcttggaagtgatgaccgagggcaaatccctgataaagctgtgttatcagtattgaaggagatggtagtaggcaatgcaaagatggaagatcaaccaaagcttgccaaaccaaaaataatgcgtagatggatctcaccaaagaaggaatctgacgctacctctgtgcgcagaccatctcaccctccatctagatactacagttcaccagctgcactaggtattcgatccatatctacagatggtaaaatcagcgttgtgaatgatgcacctttattatcactaaaacaaccatatggcagcaacttgacacgagaagcaacatctgcacagtctgctccatcgcctccacaaaaatccttgttactaggtgcacaaagtgcatcaagaagccaggtttctccaccgccaccgcctccacctccacctgcaaccaactattcttcaagttctacgcctatgcacatggggttagcttcaacaggtttgtcaaacttacctcaaggtgcttctccacctaggtcaccggtagcacaaaaacatgcatttgcccctcccgctcctcccccgcccccacctccacccccgaggtcaggtgtaggtggaaatactccacctccgcctcctccaaggctaaataacagtgcaatcgctccaccgccacccccatccaccataacacgatcaagtgctcctcctccaccaccaccaccacaatcaatgtcacgttctgctcctccgccacctccgccgccaccaccatcattgtgttctaatgttccattgccacctctttcatgcacactttctgctccacctcctccgccgccaccaccactaccttctatggcacgttcagcagcaccatctcccccgccacctcctcctagccgaggagcacccccaccccttccccttggtcgaggagcacctccacccccacccccaccaccaccacctggccgaggagcacccccacccccacctcctcctggccggggagcatccctgcccccacctcctccccctagccgaggagcacccccgcccccacctcctcctgtttcacgtgcaggacctccaccacctccgcctcctccaggtgctcgctgtggacctccacctcctccaccccctccaggtgcaagtgctccacctccacctcctcctccaggtgcacggccaggagctccaccaccaccgcctcctctaggagcgcggccaggagctccacctcccccacccccacctggaggtggtggaagaggacctctaccacctcgtgcaccaggtgtgccaactccacctagagcaccaggtgtaccgctaccaccaggaagtaatccatcattaggcagaggacgtggggctgtacgccctatgggatcagctattggggctgctgcctcacgcaagtcaactttgaagccattgcactgggtcaaagtgacaagggcccttcaaggtagtctttgggaagaattgcagcgcaacactgactcgcagagcgtttcagagttcgatgtatcagaacttgagagcctttttcctgcagctgttccaaagtctgatgacagctcaaaatctgaacgtagaaaatcacttggatcaaaaccagaaaaagtgcatctaattgagttgaggagggcaaataacacagagatcatgctgacaaaagttaaaatgccactctcggatttggtgagtgcagctctcacgctagatcaatctaccttggatgttgatcaagtggagaatctcataaagttctgtcctacgaaagaagaaatggaacttctcaagaattacactggagacaaacagattcttgggaaatgtgaacagttcttcttagaattgatgaaagtgcctagaatggagtcgaaactgcgagtattctccttcaagatccagtttggttcacaagttgctgatctgagaagaaacttggatatcatagactcttcttgtaatgagatccgaacttctctcaagttgaaagaaataatgaagaaaatccttctccttggaaatactctgaaccagggaactgctagagagtactacttccacttaacatgataaatgccagactcaagtaggactgttctgtggtttgtaaaccatagctctatctttcctgaacttcaggatgtcatggcataatgctatgttacatagccagtgcatgttctccatcttctactcgatcaacaggtgtacaatgtttcagtttaaacctgtatactcgtcaccaatgtctttaaccaatattgttgtctttatgcatgcgaccaagaagttgaatagaatcgaagactcaatacacaatgaactgtattttgcatgaagatggtcagatgttccgtgagtgttgtatgggataggggctgcggttggcttccggttggacagtcttctaaaacttacagacacccgagcaacaaataataagatgacactaatgcactacctctgtaaggtacttgctgcaagatctccacagcttttaaacttctatgcggatcttgttagcttagacgccgcatcaaagatacaactaaaaatgttggccgaggaaatgcaagcagttagtaaagggctggaaaaggttcagcttgagtatgatgcttcagaaagggatggtccagtatccaaaatttttcgtgagaaactgaaagagttcaccgacaatgctggatctgatgtgcagtcgttatcttcattgttttctgaagtgggtaaaaaggctgacgcgttgatcaagtattttggcgaggatcctgtccgttgccccttcgaacaagtgatctccaccctcttaacttttgtaacaacatttcgaaaagcacatgaggagaacctgaagcaagctgaacttgagaagaaaaaagctgaaaaagaggcagaagcagagaaggccaaaaacgcacaattaactggcaaaaatcactctaaatcatcaaatccaagccgacaagctaagcaagccatagagaggacaagatctgtaagcagacgaggaagagatgctgggtgattatcccgaatggccggctattgtggctgtgcttctgatctgcttgcgaggcaaatgaacgaccgcatgatgcatttctggcaaggggagtttcgtggacggacgccgtggcatccgtcgggtgcagcgcgatcgcatcaaagaaactttacatgataccagctgcggactctcactggagaatgccggcttctttttttatccatatcgtccatcagggtccagtgctaacttctgactgctgtaaagagcgaatgcgtcgtcacacccagcgtagccaattcatcagggatctggaggaggccagaaaggacgaagcggcggcggtgccgtgtcctacggtcctacctgtcagttgccgcggtgtcctcctgtcctgatccacgtcgccgccactgacagactcctctctcaccgtggcacgaattgatgagccacgaattgaggattgatcaaggtcttggcatcaacaaagctgccagcggtttttcagcttcattttagtttgtttatatagatctgtgccttgatcgaggtaggacgattcctagttatgagtttcaatttcttgtacgccaaggactggatctggaactgcggtcggtcggttgtaacgttgctttattatatggcttcaaagaggctaggaaatgagactgaggcgctagaaaagaaggttgtggagtggggtgagcccagtgtgccgtccggcaagcagggtaaaaaggctgacgcgatgatcaagcattttggcgaggatcctatccgttgccccttcaaacaagggagaagcaccaaaaatttatcagcactctaa

SEQ ID NO: 27256 - DNA, 5662 bp, Zea Mays
ccgaataccacggtgcctccgcctcgaccgccccccgggctccgacgcccttcctcaccaccgtgccttgctcctcctcctgctgctgcgctccgccgcggagccctaggcggagctgcggaccccgtgaccccccgcggcaccgccccggagctcggcggaggcggcgggcacgtcctcctcatgcctttggcgccccggtcggagccgatcggtggccgcctgaggagacgcagcagctcggcgggcgccggcggagaggcggcgggcacgtcctcctcatgcctttggcgccccggtcggagccgatcggtggccgcctgaggagacgcagcagctcggcgggcgccggcggagaggcggcgggcgcggaggtggaggcggaggcggaggaggaggaaggggagaatggcgctcttccgcaagttcttcctcaagaagaccccggatcggctgctcgagatctccgagaacgtctacgtgtttgactgttgcttctcgactgattccatgggtgaggatgagtatcgggattacttgagtggcattgtcgcgcaattgcaggaattttttccggacacatcacttatggcatccaatttttggtctggggacaaaagaagccggatatcagatattttatctgagtatgacatgacagtaatggactacccacaacagtatgaaggatgtccgttgcttcagctcgagatgatccaccatttcttgaaatcatgtgaaaattggctatcagtggaaggacaacataacatgcttttgatgcattgcgagagagggggttggccagtgcttgcattcatgttggccggactgcttttgtatcgcaaaatatatactggcgagcagaggacactagaaatggtctacaagcaggctcgcagggactttatacagcagttctttcccttgaatccccagccttcacatttgagatatctgcactatataacaagacaaggaggtggttcagaatggcctcctattagcagacccctcatcttggattcaatagttctccatgttgttccgcggtttgacacagatggtggttgtaggccatacttgattgtacatgggcaagactcaagtcctggtaacaagagtgcaaaggtcctttatgagatgccaaaaacaaagaagcaccttcagcgttatggacaggcagaggttcccataaaattaagtgtgtcctgccatgttcatggagatgtggtacttgaattcatccatattggcgataatatagagaataaggaaacaatgttccgggtcatgttcaacactgcattcgttcaatcaaacatccttgaactgaatcgtgatgatattgatgttgcttggaatgtgaataatcagttcccaagggactttcgagctgaggtacacttttcagaccctgtttcatttaagcctgctgctaccatcgaggaggtagctgatgatggagacgagactgatgttgcttcggtagacacaggagaggagttttatgaagcagaggagtattggcatgatgctagaaaagacccagcaactcattcaattgatggtggaatatcattaaatgacattgcagaatttgatggtggggcaacaactgaagaaaggagcagcctagagaagcaccgatctgatgagggtgtgaagattgctgtctcccagaattttggtagtatgaatgaaaaagtggcaattgcacctacctcaagttttgagaatcaagaaggattgcagcagcctcgtgaagttcttccaaatgctaaactaagcaaaaataatgatcaagagaacagtgatgtgcatgatatacaggtggttgctacatctgttgattcagagggacacaagtttggatctaccggtcaggaggacacgaaaggtgtaattgcacaaactttagtcacgacagtcgatctaagtggcagtgatggaattcactgccagactgatgaacaaacaaaaatgtcagaataccctgatttggactacactgcttttggctctcctagaagtttgtcacgtacagatggggatgcccacatgagaactaagaaaaatgaagggttgcagaatggtgatattaagattatcactgagaacacaataagtgtggacaacgagctagtgatctatgaagagaaaactatagttgtcaatggtaatgcaatacaggtagtaaaaaacgttgtcaatgaagagagcatcgcggctaagataggcaaaccaattactgagagtaggacctcattggacaatgacaatggcaagattcaaactgctaaaccttctgatatagccaatggcaaattggatgggtgtagattagaatcttgccttgaaaccgtgcctaccaagaaaaccactgtccatgacagaattgttgtcttaccagccactggagtagcaactgagataaaagccaagcaagaggtgcttgttgacaaacaggattttggtatagttcttcctcaaagtcgaacagtagccagggctaggagtccgaggcttggaagtgatgaccgagggcaaatccctgataaagctgtgttatcagtattgaaggagatggtagtaggcaatgcaaagatggaagatcaaccaaagcttgccaaaccaaaaataatgcgtagatggatctcaccaaagaaggaatctgacgctacctctgtgcgcagaccatctcaccctccatctagatactacagttcaccagctgcactaggtattcgatccatatctacagatggtaaaatcagcgttgtgaatgatgcacctttattatcactaaaacaaccatatggcagcaacttgacacgagaagcaacatctgcacagtctgctccatcgcctccacaaaaatccttgttactaggtgcacaaagtgcatcaagaagccaggtttctccaccgccaccgcctccacctccacctcctccgccgccaccaccactaccttctatggcacgttcagcagcaccatctcccccgccacctcctcctagccgaggagcacccccaccccttccccttggtcgaggagcacctccacccccacccccaccaccaccacctggccgaggagcacccccacccccacctcctcctggccggggagcatccctgcccccacctcctccccctagccgaggagcacccccgcccccacctcctcctgtttcacgtgcaggacctccaccacctccgcctcctccaggtgctcgctgtggacctccacctcctccaccccctccaggtgcaagtgctccacctccacctcctcctccaggtgcacggccaggagctccaccaccaccgcctcctctaggagcgcggccaggagctccacctcccccacccccacctggaggtggtggaagaggacctctaccacctcgtgcaccaggtgtgccaactccacctagagcaccaggtgtaccgctaccaccaggaagtaatccatcattaggcagaggacgtggggctgtacgccctatgggatcagctattggggctgctgcctcacgcaagtcaactttgaagccattgcactgggtcaaagtgacaagggcccttcaaggtagtctttgggaagaattgcagcgcaacactgactcgcagagcgtttcagagttcgatgtatcagaacttgagagcctttttcctgcagctgttccaaagtctgatgacagctcaaaatctgaacgtagaaaatcacttggatcaaaaccagaaaaagtgcatctaattgagttgaggagggcaaataacacagagatcatgctgacaaaagttaaaatgccactctcggatttggtgagtgcagctctcacgctagatcaatctaccttggatgttgatcaagtggagaatctcataaagttctgtcctacgaaagaagaaatggaacttctcaagaattacactggagacaaacagattcttgggaaatgtgaacagttcttcttagaattgatgaaagtgcctagaatggagtcgaaactgcgagtattctccttcaagatccagtttggttcacaagttgctgatctgagaagaaacttggatatcatagactcttcttgtaatgagatccgaacttctctcaagttgaaagaaataatgaagaaaatccttctccttggaaatactctgaaccagggaactgctagaggggctgcggttggcttccggttggacagtcttctaaaacttacagacacccgagcaacaaataataagatgacactaatgcactacctctgtaaggtacttgctgcaagatctccacagcttttaaacttctatgcggatcttgttagcttagacgccgcatcaaagatacaactaaaaatgttggccgaggaaatgcaagcagttagtaaagggctggaaaaggttcagcttgagtatgatgcttcagaaagggatggtccagtatccaaaatttttcgtgagaaactgaaagagttcaccgacaatgctggatctgatgtgcagtcgttatcttcattgttttctgaagtgggtaaaaaggctgacgcgttgatcaagtattttggcgaggatcctgtccgttgccccttcgaacaagtgatctccaccctcttaacttttgtaacaacatttcgaaaagcacatgaggagaacctgaagcaagctgaacttgagaagaaaaaagctgaaaaagaggcagaagcagagaaggccaaaaacgcacaattaactggcaaaaatcactctaaatcatcaaatccaagccgacaagctaagcaagccatagagaggacaagatctgtaagcagacgaggaagagatgctgggtgattatcccgaatggccggctattgtggctgtgcttctgatctgcttgcgaggcaaatgaacgaccgcatgatgcatttctggcaaggggagtttcgtggacggacgccgtggcatccgtcgggtgcagcgcgatcgcatcaaagaaactttacatgataccagctgcggactctcactggagaatgccggcttctttttttatccatatcgtccatcagggtccagtgctaacttctgactgctgtaaagagcgaatgcgtcgtcacacccagcgtagccaattcatcagggatctggaggaggccagaaaggacgaagcggcggcggtgccgtgtcctacggtcctacctgtcagttgccgcggtgtcctcctgtcctgatccacgtcgccgccactgacagactcctctctcaccgtggcacgaattgatgagccacgaattgaggattgatcaaggtcttggcatcaacaaagctgccagcggtttttcagcttcattttagtttgtttatatagatctgtgccttgatcgaggtaggacgattcctagttatgagtttcaatttcttgtacgccaaggactggatctggaactgcggtcggtcggttgtaacgttgctttattatatggcttcaaagaggctaggaaatgagactgaggcgctagaaaagaaggttgtggagtggggtgagcccagtgtgccgtccggcaagcagggtaaaaaggctgacgcgatgatcaagcattttggcgaggatcctatccgttgccccttcaaacaagggagaagcaccaaaaatttatcagcactctaa

SEQ ID NO: 27257 - DNA, 5911 bp, Zea Mays
gaaaatacaagaaaagatagcgaggagaagaaggcagcagcaagtagtagaggaagaggcgcccgaataccacggtgcctccgcctcgaccgccccccgggctccgacgcccttcctcaccaccgtgccttgctcctcctcctgctgctgcgctccgccgcggagccctaggcggagctgcggaccccgtgaccccccgcggcaccgccccggagctcggcggaggcggcgggcacgtcctcctcatgcctttggcgccccggtcggagccgatcggtggccgcctgaggagacgcagcagctcggcgggcgccggcggagaggcggcgggcacgtcctcctcatgcctttggcgccccggtcggagccgatcggtggccgcctgaggagacgcagcagctcggcgggcgccggcggagaggcggcgggcgcggaggtggaggcggaggcggaggaggaggaaggggagaatggcgctcttccgcaagttcttcctcaagaagaccccggatcggctgctcgagatctccgagaacgtctacgtgtttgactgttgcttctcgactgattccatgggtgaggatgagtatcgggattacttgagtggcattgtcgcgcaattgcaggaattttttccggacacatcacttatggcatccaatttttggtctggggacaaaagaagccggatatcagatattttatctgagtatgacatgacagtaatggactacccacaacagtatgaaggatgtccgttgcttcagctcgagatgatccaccatttcttgaaatcatgtgaaaattggctatcagtggaaggacaacataacatgcttttgatgcattgcgagagagggggttggccagtgcttgcattcatgttggccggactgcttttgtatcgcaaaatatatactggcgagcagaggacactagaaatggtctacaagcaggctcgcagggactttatacagcagttctttcccttgaatccccagccttcacatttgagatatctgcactatataacaagacaaggaggtggttcagaatggcctcctattagcagacccctcatcttggattcaatagttctccatgttgttccgcggtttgacacagatggtggttgtaggccatacttgattgtacatgggcaagactcaagtcctggtaacaagagtgcaaaggtcctttatgagatgccaaaaacaaagaagcaccttcagcgttatggacaggcagaggttcccataaaattaagtgtgtcctgccatgttcatggagatgtggtacttgaattcatccatattggcgataatatagagaataaggaaacaatgttccgggtcatgttcaacactgcattcgttcaatcaaacatccttgaactgaatcgtgatgatattgatgttgcttggaatgtgaataatcagttcccaagggactttcgagctgaggtacacttttcagaccctgtttcatttaagcctgctgctaccatcgaggaggtagctgatgatggagacgagactgatgttgcttcggtagacacaggagaggagttttatgaagcagaggagtattggcatgatgctagaaaagacccagcaactcattcaattgatggtggaatatcattaaatgacattgcagaatttgatggtggggcaacaactgaagaaaggagcagcctagagaagcaccgatctgatgagggtgtgaagattgctgtctcccagaattttggtagtatgaatgaaaaagtggcaattgcacctacctcaagttttgagaatcaagaaggattgcagcagcctcgtgaagttcttccaaatgctaaactaagcaaaaataatgatcaagagaacagtgatgtgcatgatatacaggtggttgctacatctgttgattcagagggacacaagtttggatctaccggtcaggaggacacgaaaggtgtaattgcacaaactttagtcacgacagtcgatctaagtggcagtgatggaattcactgccagactgatgaacaaacaaaaatgtcagaataccctgatttggactacactgcttttggctctcctagaagtttgtcacgtacagatggggatgcccacatgagaactaagaaaaatgaagggttgcagaatggtgatattaagattatcactgagaacacaataagtgtggacaacgagctagtgatctatgaagagaaaactatagttgtcaatggtaatgcaatacaggtagtaaaaaacgttgtcaatgaagagagcatcgcggctaagataggcaaaccaattactgagagtaggacctcattggacaatgacaatggcaagattcaaactgctaaaccttctgatatagccaatggcaaattggatgggtgtagattagaatcttgccttgaaaccgtgcctaccaagaaaaccactgtccatgacagaattgttgtcttaccagccactggagtagcaactgagataaaagccaagcaagaggtgcttgttgacaaacaggattttggtatagttcttcctcaaagtcgaacagtagccagggctaggagtccgaggcttggaagtgatgaccgagggcaaatccctgataaagctgtgttatcagtattgaaggagatggtagtaggcaatgcaaagatggaagatcaaccaaagcttgccaaaccaaaaataatgcgtagatggatctcaccaaagaaggaatctgacgctacctctgtgcgcagaccatctcaccctccatctagatactacagttcaccagctgcactaggtattcgatccatatctacagatggtaaaatcagcgttgtgaatgatgcacctttattatcactaaaacaaccatatggcagcaacttgacacgagaagcaacatctgcacagtctgctccatcgcctccacaaaaatccttgttactaggtgcacaaagtgcatcaagaagccaggtttctccaccgccaccgcctccacctccacctgcaaccaactattcttcaagttctacgcctatgcacatggggttagcttcaacaggtttgtcaaacttacctcaaggtgcttctccacctaggtcaccggtagcacaaaaacatgcatttgcccctcccgctcctcccccgcccccacctccacccccgaggtcaggtgtaggtggaaatactccacctccgcctcctccaaggctaaataacagtgcaatcgctccaccgccacccccatccaccataacacgatcaagtgctcctcctccaccaccaccaccacaatcaatgtcacgttctgctcctccgccacctccgccgccaccaccatcattgtgttctaatgttccattgccacctctttcatgcacactttctgctccacctcctccgccgccaccaccactaccttctatggcacgttcagcagcaccatctcccccgccacctcctcctagccgaggagcacccccaccccttccccttggtcgaggagcacctccacccccacccccaccaccaccacctggccgaggagcacccccacccccacctcctcctggccggggagcatccctgcccccacctcctccccctagccgaggagcacccccgcccccacctcctcctgtttcacgtgcaggacctccaccacctccgcctcctccaggtgctcgctgtggacctccacctcctccaccccctccaggtgcaagtgctccacctccacctcctcctccaggtgcacggccaggagctccaccaccaccgcctcctctaggagcgcggccaggagctccacctcccccacccccacctggaggtggtggaagaggacctctaccacctcgtgcaccaggtgtgccaactccacctagagcaccaggtgtaccgctaccaccaggaagtaatccatcattaggcagaggacgtggggctgtacgccctatgggatcagctattggggctgctgcctcacgcaagtcaactttgaagccattgcactgggtcaaagtgacaagggcccttcaaggtagtctttgggaagaattgcagcgcaacactgactcgcagagcgtttcagagttcgatgtatcagaacttgagagcctttttcctgcagctgttccaaagtctgatgacagctcaaaatctgaacgtagaaaatcacttggatcaaaaccagaaaaagtgcatctaattgagttgaggagggcaaataacacagagatcatgctgacaaaagttaaaatgccactctcggatttggtgagtgcagctctcacgctagatcaatctaccttggatgttgatcaagtggagaatctcataaagttctgtcctacgaaagaagaaatggaacttctcaagaattacactggagacaaacagattcttgggaaatgtgaacagttcttcttagaattgatgaaagtgcctagaatggagtcgaaactgcgagtattctccttcaagatccagtttggttcacaagttgctgatctgagaagaaacttggatatcatagactcttcttgtaatgagatccgaacttctctcaagttgaaagaaataatgaagaaaatccttctccttggaaatactctgaaccagggaactgctagaggggctgcggttggcttccggttggacagtcttctaaaacttacagacacccgagcaacaaataataagatgacactaatgcactacctctgtaaggtacttgctgcaagatctccacagcttttaaacttctatgcggatcttgttagcttagacgccgcatcaaagatacaactaaaaatgttggccgaggaaatgcaagcagttagtaaagggctggaaaaggttcagcttgagtatgatgcttcagaaagggatggtccagtatccaaaatttttcgtgagaaactgaaagagttcaccgacaatgctggatctgatgtgcagtcgttatcttcattgttttctgaagtgggtaaaaaggctgacgcgttgatcaagtattttggcgaggatcctgtccgttgccccttcgaacaagtgatctccaccctcttaacttttgtaacaacatttcgaaaagcacatgaggagaacctgaagcaagctgaacttgagaagaaaaaagctgaaaaagaggcagaagcagagaaggccaaaaacgcacaattaactggcaaaaatcactctaaatcatcaaatccaagccgacaagctaagcaagccatagagaggacaagatctgtaagcagacgaggaagagatgctgggtgattatcccgaatggccggctattgtggctgtgcttctgatctgcttgcgaggcaaatgaacgaccgcatgatgcatttctggcaaggggagtttcgtggacggacgccgtggcatccgtcgggtgcagcgcgatcgcatcaaagaaactttacatgataccagctgcggactctcactggagaatgccggcttctttttttatccatatcgtccatcagggtccagtgctaacttctgactgctgtaaagagcgaatgcgtcgtcacacccagcgtagccaattcatcagggatctggaggaggccagaaaggacgaagcggcggcggtgccgtgtcctacggtcctacctgtcagttgccgcggtgtcctcctgtcctgatccacgtcgccgccactgacagactcctctctcaccgtggcacgaattgatgagccacgaattgaggattgatcaagaaactgaaagagttcaccgacaatgctggaatcgttatcttcattgttttccgaagtgggtaaaaaggctgacgcgatgatcaagcattttggcgaggatcctatccgttgccccttcaaacaagggagaagcaccaaaaatttatcagcactctaa

SEQ ID NO: 27258 - DNA, 5884 bp, Zea Mays
cagcaagcgaaaatacaagaaaagatagcgaggagaagaaggcagcagcaagtagtagaggaagaggcgcccgaataccacggtgcctccgcctcgaccgccccccgggctccgacgcccttcctcaccaccgtgccttgctcctcctcctgctgctgcgctccgccgcggagccctaggcggagctgcggaccccgtgaccccccgcggcaccgccccggagctcggcggaggcggcgggcacgtcctcctcatgcctttggcgccccggtcggagccgatcggtggccgcctgaggagacgcagcagctcggcgggcgccggcggagaggcggcgggcacgtcctcctcatgcctttggcgccccggtcggagccgatcggtggccgcctgaggagacgcagcagctcggcgggcgccggcggagaggcggcgggcgcggaggtggaggcggaggcggaggaggaggaaggggagaatggcgctcttccgcaagttcttcctcaagaagaccccggatcggctgctcgagatctccgagaacgtctacgtgtttgactgttgcttctcgactgattccatgggtgaggatgagtatcgggattacttgagtggcattgtcgcgcaattgcaggaattttttccggacacatcacttatggcatccaatttttggtctggggacaaaagaagccggatatcagatattttatctgagtatgacatgacagtaatggactacccacaacagtatgaaggatgtccgttgcttcagctcgagatgatccaccatttcttgaaatcatgtgaaaattggctatcagtggaaggacaacataacatgcttttgatgcattgcgagagagggggttggccagtgcttgcattcatgttggccggactgcttttgtatcgcaaaatatatactggcgagcagaggacactagaaatggtctacaagcaggctcgcagggactttatacagcagttctttcccttgaatccccagccttcacatttgagatatctgcactatataacaagacaaggaggtggttcagaatggcctcctattagcagacccctcatcttggattcaatagttctccatgttgttccgcggtttgacacagatggtggttgtaggccatacttgattgtacatgggcaagactcaagtcctggtaacaagagtgcaaaggtcctttatgagatgccaaaaacaaagaagcaccttcagcgttatggacaggcagaggttcccataaaattaagtgtgtcctgccatgttcatggagatgtggtacttgaattcatccatattggcgataatatagagaataaggaaacaatgttccgggtcatgttcaacactgcattcgttcaatcaaacatccttgaactgaatcgtgatgatattgatgttgcttggaatgtgaataatcagttcccaagggactttcgagctgaggtacacttttcagaccctgtttcatttaagcctgctgctaccatcgaggaggtagctgatgatggagacgagactgatgttgcttcggtagacacaggagaggagttttatgaagcagaggagtattggcatgatgctagaaaagacccagcaactcattcaattgatggtggaatatcattaaatgacattgcagaatttgatggtggggcaacaactgaagaaaggagcagcctagagaagcaccgatctgatgagggtgtgaagattgctgtctcccagaattttggtagtatgaatgaaaaagtggcaattgcacctacctcaagttttgagaatcaagaaggattgcagcagcctcgtgaagttcttccaaatgctaaactaagcaaaaataatgatcaagagaacagtgatgtgcatgatatacaggtggttgctacatctgttgattcagagggacacaagtttggatctaccggtcaggaggacacgaaaggtgtaattgcacaaactttagtcacgacagtcgatctaagtggcagtgatggaattcactgccagactgatgaacaaacaaaaatgtcagaataccctgatttggactacactgcttttggctctcctagaagtttgtcacgtacagatggggatgcccacatgagaactaagaaaaatgaagggttgcagaatggtgatattaagattatcactgagaacacaataagtgtggacaacgagctagtgatctatgaagagaaaactatagttgtcaatggtaatgcaatacaggtagtaaaaaacgttgtcaatgaagagagcatcgcggctaagataggcaaaccaattactgagagtaggacctcattggacaatgacaatggcaagattcaaactgctaaaccttctgatatagccaatggcaaattggatgggtgtagattagaatcttgccttgaaaccgtgcctaccaagaaaaccactgtccatgacagaattgttgtcttaccagccactggagtagcaactgagataaaagccaagcaagaggtgcttgttgacaaacaggattttggtatagttcttcctcaaagtcgaacagtagccagggctaggagtccgaggcttggaagtgatgaccgagggcaaatccctgataaagctgtgttatcagtattgaaggagatggtagtaggcaatgcaaagatggaagatcaaccaaagcttgccaaaccaaaaataatgcgtagatggatctcaccaaagaaggaatctgacgctacctctgtgcgcagaccatctcaccctccatctagatactacagttcaccagctgcactaggtattcgatccatatctacagatggtaaaatcagcgttgtgaatgatgcacctttattatcactaaaacaaccatatggcagcaacttgacacgagaagcaacatctgcacagtctgctccatcgcctccacaaaaatccttgttactaggtgcacaaagtgcatcaagaagccaggtttctccaccgccaccgcctccacctccacctgcaaccaactattcttcaagttctacgcctatgcacatggggttagcttcaacaggtttgtcaaacttacctcaaggtgcttctccacctaggtcaccggtagcacaaaaacatgcatttgcccctcccgctcctcccccgcccccacctccacccccgaggtcaggtgtaggtggaaatactccacctccgcctcctccaaggctaaataacagtgcaatcgctccaccgccacccccatccaccataacacgatcaagtgctcctcctccaccaccaccaccacaatcaatgtcacgttctgctcctccgccacctccgccgccaccaccatcattgtgttctaatgttccattgccacctctttcatgcacactttctgctccacctcctccgccgccaccaccactaccttctatggcacgttcagcagcaccatctcccccgccacctcctcctagccgaggagcacccccaccccttccccttggtcgaggagcacctccacccccacccccaccaccaccacctggccgaggagcacccccacccccacctcctcctggccggggagcatccctgcccccacctcctccccctagccgaggagcacccccgcccccacctcctcctgtttcacgtgcaggacctccaccacctccgcctcctccaggtgctcgctgtggacctccacctcctccaccccctccaggtgcaagtgctccacctccacctcctcctccaggtgcacggccaggagctccaccaccaccgcctcctctaggagcgcggccaggagctccacctcccccacccccacctggaggtggtggaagaggacctctaccacctcgtgcaccaggtgtgccaactccacctagagcaccaggtgtaccgctaccaccaggaagtaatccatcattaggcagaggacgtggggctgtacgccctatgggatcagctattggggctgctgcctcacgcaagtcaactttgaagccattgcactgggtcaaagtgacaagggcccttcaaggtagtctttgggaagaattgcagcgcaacactgactcgcagagcgtttcagagttcgatgtatcagaacttgagagcctttttcctgcagctgttccaaagtctgatgacagctcaaaatctgaacgtagaaaatcacttggatcaaaaccagaaaaagtgcatctaagtgcagctctcacgctagatcaatctaccttggatgttgatcaagtggagaatctcataaagttctgtcctacgaaagaagaaatggaacttctcaagaattacactggagacaaacagattcttgggaaatgtgaacagttcttcttagaattgatgaaagtgcctagaatggagtcgaaactgcgagtattctccttcaagatccagtttggttcacaagttgctgatctgagaagaaacttggatatcatagactcttcttgtaatgagatccgaacttctctcaagttgaaagaaataatgaagaaaatccttctccttggaaatactctgaaccagggaactgctagagagtactacttccacttaacatgataaatgccagactcaagtaggactgttctgtggtttgtaaaccatagctctatctttcctgaacttcaggatgtcatggcataatgctatgttacatagccagtgcatgttctccatcttctactcgatcaacagttgaatagaatcgaagactcaatacacaatgaactgtattttgcatgaagatggtcagatgttccgtgagtgttgtatgggataggggctgcggttggcttccggttggacagtcttctaaaacttacagacacccgagcaacaaataataagatgacactaatgcactacctctgtaaggtacttgctgcaagatctccacagcttttaaacttctatgcggatcttgttagcttagacgccgcatcaaagatacaactaaaaatgttggccgaggaaatgcaagcagttagtaaagggctggaaaaggttcagcttgagtatgatgcttcagaaagggatggtccagtatccaaaatttttcgtgagaaactgaaagagttcaccgacaatgctggatctgatgtgcagtcgttatcttcattgttttctgaagtgggtaaaaaggctgacgcgttgatcaagtattttggcgaggatcctgtccgttgccccttcgaacaagtgatctccaccctcttaacttttgtaacaacatttcgaaaagcacatgaggagaacctgaagcaagctgaacttgagaagaaaaaagctgaaaaagaggcagaagcagagaaggccaaaaacgcacaattaactggcaaaaatcactctaaatcatcaaatccaagccgacaagctaagcaagccatagagaggacaagatctgtaagcagacgaggaagagatgctgggtgattatcccgaatggccggctattgtggctgtgcttctgatctgcttgcgaggcaaatgaacgaccgcatgatgcatttctggcaaggggagtttcgtggacggacgccgtggcatccgtcgggtgcagcgcgatcgcatcaaagaaactttacatgataccagctgcggactctcactggagaatgccggcttctttttttatccatatcgtccatcagggtccagtgctaacttctgactgctgtaaagagaaactgaaagagttcaccgacaatgctggaatcgttatcttcattgttttccgaagtgggtaaaaaggctgacgcgatgatcaagcattttggcgaggatcctatccgttgccccttcaaacaagggagaagcaccaaaaatttatcagcactctaa

SEQ ID NO: 27259 - DNA, 3307 bp, Zea Mays
gcaaaaggcactcgcgctcatcaaaggcgcaaaccgcaaaggcacgcccgcggcccgcggcgtggaccttttaagccccgcgctcgattcccccgtccccaccccacctgcgacggaactgcgactacgagctcaccccacgcccctcccccctgtcccgtcgagctccacagttgctgctgctgctgccgcttctccggccaatatcggtgcctaaccttttcagtcccggcggcgcggcagggcgggtttcgccgttcttggctgccgcgccgtcattcttgttctggcggtttcgtgatctgcccccgcgcagcgtctgctctgcggtcgcggaaacgccgtgccttctccgcgcgtccgctcgataacccctgcgtctccgccccgccccgcccgaccacgccttgcggaagcgtcgccgtcgtggtccgtcgacgggagcgcgcggtcagtggagctgcgtcaacagagtcgcgcactgctttgttttggtgatggctcgcgtcgcgtcgcgtcgcgtcttgatggaatcattaactagtcttccaggtcaatcccgtcgtgttcttgactactagtgccgtgttcgacccgtgacgcctgtggttggcgggcggaaggggtcaagctttccgatcttcattctttatttacaccgcggcagccggctctcagtctcagcccaatgctggcgtgagggaggggggtttgggagcggacaggggagacgattcttgaagaagatcacgcgctgatcttggcccgtgtccgtccgtgcgcgacctcggcgtatggttggtggcgattggcagtgctggtagcgcgccgccgccatgggctgcgtcgcgtccaagaacaccgtctcggtgacgccggcggccgactcgtccggcgggctcagggatcggagccatccgcgcgctcaggagtctgctgctcctgtgccgttgcccgtgcccgtgccttccctgcgtagctcgtcgtccgcggcgaggaggtcggagaaggtcaaggacgacgcggaggagccagggaaggccgtcgtagccgtggcggcgtcgtcccggagcttccgcctgcggagcctgcggaagagccttgagggtgagcaggtggctgccgggtggccgccgtggctcagcgccgtcgccggggaggccatccaggggtggatcccgctcaaggccgactccttcgagaagctggagaaggttgggcaaggcacatacagcagtgtattcagggcaagagaccttgagactggaaagatcgttgccttgaagaaggttcggttcgacaattttgagccagagagtgttagattcatggcaagggagatacaaatattgagaagacttgatcatccaaatgtcatgaaactggaaggcttgattacttcccggttatcgtgcagcctttatctagtatttgaatacatggagcatgatcttgcaggactttgctcctccccggacatcaaattcactgaagcacagctcaagtgctacatgaaccagttactgtcaggactggagcattgccattcacgacatgtggttcatcgtgatatcaagggtgctaatctccttgtgaataatgaaggggttctaaagatagctgattttggtcttgcaaatttctttgatcccagcaaaaaccatcctctgaccagccgtgttgttactctgtggtaccgaccacctgaactgctactaggttcaactcactatgatgcagctgtagatttgtggagtgttgggtgtgtgtttcctgagatgtatcgtgggaaacctatcctgcagggaagaaccgaggtggaacaactacacaagatttttaaactatgtggttcacctgctgatgattattggaagaaatcaaagttgcctcatgcaacaatatttaaaccacatcatccatatactagtaccctacgagatgtttttaaagagttaccagaaaatgcattgagtttactagaaactcttctgtcggtggagccctacaagcgtggtactgcatcaggtgctctttcctctgagtttttcaggacaaaaccttatgcgtgcgaaccttcgagcttgcctaattatgcacctaacaaggagatggatgcaaagttacgagagaatgcactcagaagaaaagcaagtagcagagggcacgggacagaagcatccaagaagtcttcaaggctcagtagagcagcaagagaacctagtgcagtccctaagcagataataagtagaacagaggaatccaaaactaatgtgaatgcaaccaaagatggtacaacacaggaccgtgcgaaactgaatggcgatgctaggctatttgtggacatacaaccagtgtcagcggctcaagttaaagagagtgctcgccacgttaagaatgaatcacgagagcaaatacctttctccgggccattgagtgtttcttcatctagtggctttgcatgggccagaagaccacatgaggaccgttcctttgctagatcacggaccagatctagctcaaggggccagtttcctgctgatgctgttcagggatgtaatacccaagctaaagagaatgctggccttagggagctgcatagcagagacatacctgtatcagtatcacacgtcggttccagagtccgagaccgggggcctcacgatgcggcgaagcgtgcagtcctgaagaagtggtcacagctagagcgtccagattcgttcgattcttgcgacacttaccactcccataacttctcgaacgccatgttccttgggggtactctctcatcgaagaatggcttcaagctccagggcggtcataatcaagaagagaaggtcgagtactcgggccctttgttgtcccagtcgcacaaggtcgatgaactgttgcagaagaacgagcgccacatccggcaagctgttcgaacatcatggttcaggagagcatgtcattagcttctgatgggcctctgctgccaatctgggaagcgggcaattgctgctgacgagtccattgttaactgaaaacatcatcaactttggtgatcctatctcacagcaaaacaaaattagctactgtgccttgctgcttctggggtttgttgtagattccccgaagtgccgtatccttttttttttgttgtacagagaaatattagcggctgactgacggggcggtgtggttgaacagaagattgtgtagttggaataaccagtaactaagctgcacaacatgcatggtgcggttgtagtaaaggcagcctctgaagaaaatgagaagtgaaatccaataactgttcgttgtc

SEQ ID NO: 27260 - DNA, 2121 bp, Zea Mays
attgaaaagttatatttcctatttattgataaaaccaatttgttgtcaaaatgaagtttcttttggtttgggaattctttgtcaaagagaattacccacttgttctgcaattaccaagcaggttctctcttttttaactctaaaccttgaaaatcttctgtggtatcataccctactttattttagggtgtcatcctaagttgatagtaagcttctgatggatttgagtgatataccagcaacagttcatgaggatgtgcctgaaactatttgaaatttccttgctcctaagtcctattgcacactcgttgctgtttcattgtgtttgtttgttgaatatggttgataaaaaaacttatgatacaggttgtggaggtttctacctccaagactggtaagcatggccacgccaaatgccactttgtcgccatagacatattcaatgggaaaaagcttgaagatattgttccttcatcacacaactgtgacattccgcatgtgaaccgtactgagtatcagctgattgatatttctgaggatggatttgtgagccttcttacttcagatggcaacactaaggatgatcttagactcccaactgatgagactcttgtggcccagattaaggaagggttcgaaagcgggaaggatcttgttgtgactgtccagtctgcgatgggggaggagcagatctgcgcgctgaaggatgttggccccaagtaacttccttggctttggagacggaaccctactctatctcaacttaaatcggaaaagaagtgtatcaccaaaggattgctaccgagacattcacctggcttgagctggcttttgctatagcgtgcaaggggttgctgggtgtcgtacctacctgacttatcattatctgtggttacattctggaccctgtattttctatgctttcatgtctctctactttctagtattaattatcaataagttggtttggaatggttgaattgcatccaatgcatgaagtttctttggttacctttctctttgctcgattgttctgcttccagtgttggtgtatactgtagtttctgagtattctctttgcgcctggggatccagaactggttttcggctttctactttcgattgtgcttcttacagtattacgggactctttggcttgggctttccgtgcaagcagctttttttcgagacagacttctaggctgttttgcaaaataaaacatgtctggttaagccactctttttaggttttaccgatgtaatagaaaaggtttttttaccaaaaggcctatgtcaaaatgtggttggacgtttggtacgactttaaaccactcttaatttttaactctctatttacatttttataaagattatattctatatgtagcatctacagtccaacatttattttgctgttgagtagataaattttgacttgatgagccatttaactagtcatttggagatgttgatgctgtgtattttaacgtaaagttgtagcttaagccggtgtgtggaagccctgctaaacgggcttatatatatctctttttttttctacaatcataaccacataccgaccataggctcgatgtgctccgctccgatcttcctaaaccatcagcctaacgtcttgataaggtttttcgttttgctctaaatccgtgtggattggatgtacttgagtgtctttaaatcctaaataagtctaaatctttcacatttttttctaatcgtattcaatccatatgtgattataactgaataagctttaataatttttttggttaacgttatttcttgtcttcgatggtatctcgataggccactaggatgtggcaacttaaaagtatgccctgcatgcggtcttctgtttgatccttttcccctctgagcttgttgcctccagaatttgctgctgcgtgcttagtgtcagggatggagccagaaagaagcttagtttaggagatactgaactaaactaatgtaaaaagtctttctacattatattatatatattgtgtatatttgagattacgaagggttcggaggctctataaaatcggaagccgtagcggggacgtcccttagggcttgtttaggataaaaggtaatgaagag

SEQ ID NO: 27261 - DNA, 1915 bp, Zea Mays
ctgaccgccgccgctcagatttgcttggatcgccatgtcggactcggaggagcaccacttcgaatcgaaggccgacgctggggcgtccaagacctacccgcagcaggctggcaccgtccgtaagaacggcttcatcgtcatcaagaaccgtccctgcaaggttgtggaggtttctacctccaagactggtaagcatggccacgccaaatgccactttgtcgccatagacatattcaatgggaaaaagcttgaagatattgttccttcatcacacaactgtgacattccgcatgtgaaccgtactgagtatcagctgattgatatttctgaggatggatttgtgagccttcttacttcagatggcaacactaaggatgatcttagactcccaactgatgagactcttgtggcccagattaaggaagggttcgaaagcgggaaggatcttgttgtgactgtccagtctgcgatgggggaggagcagatctgcgcgctgaaggatgttggccccaagtaacttccttggctttggagacggaaccctactctatctcaacttaaatcggaaaagaagtgtatcaccaaaggattgctaccgagacattcacctggcttgagctggcttttgctatagcgtgcaaggggttgctgggtgtcgtacctacctgacttatcattatctgtggttacattctggaccctgtattttctatgctttcatgtctctctactttctagtattaattatcaataagttggtttggaatggttgaattgcatccaatgcatgaagtttctttggttacctttctctttgctcgattgttctgcttccagtgttggtgtatactgtagtttctgagtattctctttgcgcctggggatccagaactggttttcggctttctactttcgattgtgcttcttacagtattacgggactctttggcttgggctttccgtgcaagcagctttttttcgagacagacttctaggctgttttgcaaaataaaacatgtctggttaagccactctttttaggttttaccgatgtaatagaaaaggtttttttaccaaaaggcctatgtcaaaatgtggttggacgtttggtacgactttaaaccactcttaatttttaactctctatttacatttttataaagattatattctatatgtagcatctacagtccaacatttattttgctgttgagtagataaattttgacttgatgagccatttaactagtcatttggagatgttgatgctgtgtattttaacgtaaagttgtagcttaagccggtgtgtggaagccctgctaaacgggcttatatatatctctttttttttctacaatcataaccacataccgaccataggctcgatgtgctccgctccgatcttcctaaaccatcagcctaacgtcttgataaggtttttcgttttgctctaaatccgtgtggattggatgtacttgagtgtctttaaatcctaaataagtctaaatctttcacatttttttctaatcgtattcaatccatatgtgattataactgaataagctttaataatttttttggttaacgttatttcttgtcttcgatggtatctcgataggccactaggatgtggcaacttaaaagtatgccctgcatgcggtcttctgtttgatccttttcccctctgagcttgttgcctccagaatttgctgctgcgtgcttagtgtcagggatggagccagaaagaagcttagtttaggagatactgaactaaactaatgtaaaaagtctttctacattatattatatatattgtgtatatttgagattacgaagggttcggaggctctataaaatcggaagccgtagcggggacgtcccttagggcttgtttaggataaaaggtaatgaagag

SEQ ID NO: 27262 - DNA, 5503 bp, Zea Mays
cagggagggtacagacggaggccatgaccacatagcagaacacggggagagagaccggccgggggccgggcccgtgacccgtgaggacgagggcagcatcaccggagacggagacggagagcgtcggtgggcgcggccgacccaggaggaaattttcactgcgctattgactcctgtggtgttgggcctcactgggcctggcgagctacgaagcaagagcgtcggtgagagttgttcgttttagctgcgcgacagggcgttaaccccaagaggcccagcgcctcgccgccaccaagcgcagggccgctacctccttgccgtcagatcctccgcccgccgccgctcttctctctgttggggtgcggtgaagactccttgctactcgtgtcgcaagtgtattatcgcgaaattgttgtctgggacaacaagaatgccataaggaaccacagataatcgtgcggtggttaactggttatggataatgacaatggcgatgtggatgacctgggttcagggtggtttgaagtgaaaaagaaacatcggtccagctcaaaatacacattgcagaggtcttcaggtggttccagccataaaattccaaacttactatcacggtcaggtgctaacagtgacagttcaaggtggcatgacaaactgcaacacccatctccgagcataaatgctaatgttggtgttgatgggtctggtagtggagagacaacaaatgttcatggtgaagggtgcaatgatgtaagcaccagccccagtggcctgaatagtggcttaaatgcttcagcctcagaggatagagtagaaagacttgaagaactggcggtggctgaaaaaacaagtgaatctcccgaaaatgatctggctgatcatgcagatccttcactgcctcatgaaccatccacctgttcaggcagtcctgcaaaatgcgcagatctttctcagcatgtaaaatgttctccaaaaacagagtctgtaggtgttttgtccattactcctgtcaagtttggagactttgatgaagttccaggtctatcattaccttcagattcatacagagacaataatacttctagaggccacagacatactgaagatgttgcacatttaaaaaatgtgcaaaaagatgcaagtgaactcaaaccggagacagacacttgtactacaattgatgaggcatctccaattatggtacaaggaacagagacacccaatcatgatagtggtttgatagcctcagttgattctgttaccctatcctgctccaaaaatgatcatgaagttccagttacatcttcatctgttcctgttgcttccatggaaggtagaacgttacttcatgacgaagcaccagcttctgcagattttggatctgaaactgctgagagcaaagaaagattcaggcagaggctatggtgttttctttttgagaatctgaatagggctgttgatgaactttacctcctctgtgaactagaatgtgacatggaacagattaatgaatccatacttgtccttgaagaagctatttctgattttcaagaacttaaatccagagcagagcattttgataataccaaaaaatctcctggtgtaccaaaggagggcatgccaatggctgtgaaagctgaccataggagacctcatgccttgtcttgggaggtcagaagaatgacaagttctccacacaggcaagaaatactgtcttcatctctagaggccttccagagaatccaattggaactggcatgcaagcaggctggtatagcagcagaaagatttacatccagctcttctgaaaaagttttgggtagttcatcaaagctgactacagcatcggcaactgttaggaatataagtttgaaagttgagagtcaggtgaaacttcctgataccagcgtgaaaaagattgctggcgagaagctaagtagggatgcattcaagtctggtaagtcgtatccacaaagtatgccttcatattctgcaaggagtagaagagggtcattagaaccaatctctgaaatagagaaacacacctttaagaaggacagggagttgctagaaaacaaatttgacaggctcaagtcaaccgatgttgttaaaaagactacagctcatcttgaaaaggaaaagcaaattacagcaccttggaagtccatggatgcctggaaggagaaaagaaactgggaagatatactgaaatctcctgtacggagttctcgtgtttctcactctccaggtgttggaagaaaagttacagaccgcgctcgtgttctacatgacaagttgatgtctcctgaaaagaaaaaaagaagtgctttggatatgaaaaaagaagcagaagaaaagcatgcgcgtgcactgcgaattaggagtcaactagagagcgagagggttcagaggctacaacgtacctctgaaaagttgcatcgtgtcaatgagtggcaggctgtacgcagctcaaaactgagagaagtaatgaatgcacgtcatcaacgtggtgaatctcgtcacgaagcatatcttgctcaggttgcaaaaagagctggtgatgagagtactaaggtcaatgaggtccgttttataacatcactgaatgaagaaaacaagaaattcttgctgaggcagaaacttcatgattctgagatgcggagagctgaaaagctacaggtgatcaaaacaaagcaaaaggaggacactgcaagggaagaagctgttttggagcgaaggaagttccttgaagctgagaagatgcaacgccttgctgaaatacagcgcaagaaagaagaagctattttcagaagagaagaggagcgcaaagcatctagtgctgcacgggaagcaagggctgcagaacaacaacgtcgaaaagagataagagcaaaagcgcaacaagaggaagctgaacttttagcccaaaagttagctgaaaaacttcgtgaaagtgagcagcggcgcaagtattacctagaacaaatacgagagcgagcctcaatggatcttagggatcagccttcaccttttcagcgtcgctttccaagtaaagattgccaaaaccgttctagttctgctaacagcggagaagattcacagacaactggcaattccagtgctgcagattctatggttaagtcatcgaataatgcacagataaaacgaaggattaaaaagattcgccagagattaatggctctaaagcatgaatttattgaaccatccataggtgaaagtacaggaatcacgcacaggtctggtcttggagctgccaaagctaagctaagtagatggcttcaagaccttcagagacttcgtcaagctagaaaagaaggtgctgccagtattggattgattgtcagtgacatagcgaagtatttagaagggaaggatcttgagctgcatgcatcaagacaagttggtttgcttgactttattgcgtctgcattacctgcgtcacatacttcaaagcctggagcttgtcaagtcactgtctaccttttgcgcctgttgagagtgttgctctcacttccagctaatcgaacttattttctagtacaaaatcttttacccccaattattcccatgctatcagcatcactggagaattatattaaggtggcagcatccaactctggaagttcaaatcttttgtctaataaaacatcagctgagactacagagtcatcgggtgaagtgttagatggatttttatggactgtggccatgatcgttggccatgtacacatcaatggtgaacaacttcaaatgcagggaggtttgatagaactgattgtagcttatcaaataattcatcgtctgcgagatctgtttgcactttatgataggccacaggtggaaggatccccactcccatcatctatactgtttggcctcaaccttttgtccgtattaacatccaaaccgggaaatttctctactatcgattgggagtcctgcaaatgcaggacactaggtggaaatatagtgcaagaatatgaatatcttagttcacaggacagtttggggtgtcaatcaatgacacttgatcagtttggtgatgccaaatcgccaaccatatacagtgaactggctgaagatagcaaatcctgtaaacaacatgacttgagcattcctgtggacagaaaattggttgatgaagctagtaaagacttgttagtgatggctgctggcctgaacaactcagcaatgcaaccatctgatttgggcattactacagagaagcattctggaaatcctagccagggagatgaaaataacacagtggacagttttcttgaaggaagaaagacgaataatgtatgtgcattgtatagtagttcaggaaaaggcaatgagatgaaccttaagcagcctgcaatgctcttactttctgcactggctgagactggccttgttactctaccatcacttttgactgctgtgttgctccaggcaaacaacaacaggtcatcatcagagcagacattggcgattcttccatcaaattttgaagaagtagccactggtgtattgaaagttttgaataatatggcacgtttggatataacccttttgcagcacatgctgcttccttttgagtcattgcatgaacaaatggagagtgccaaacgatcaggttggtttgctgcttctagagtctctgctacttcttggctacttttctttgttccatgctgggaaccaagctgttcttcggtggggaaagagtcccactatacttcacaaggtgtgcgacctgccatttgttttcttcagcgaccccgagttgatgcccatcttggctgctgctctgatcgctgtttgctacggttgcgatcagaacctaagcgttgtacagcaggaaataagcacggatatgctgcgctgcttgctcaagtcctgccaaacttcaggatcaaattctccagattccattgctgtggatggttctggaaacaattccactgaaagcattctggatatcaggaactcacagggtgacatcccaacaaggtcaagccgcaaaattggacggccagttattgggaagggtgtttcagggggtatcagattcaacagaaataaggttcagaaggatggtaggggaacaagagcaattgacgatgggcctctgaagcaaagagctcaagaagctgcatcgaacttcatgttgcatagaaagatcccagcttcttttttggacagagccgaggagttcttctgcagtgagacatgaaatcggccctgtggttcgcctaacttgtatggcacgagctactgaatttactgttttgcaaggatggtgtttcctgacctgatattttgatcgaatctgtagtctacagattaaaaaaatgagtcatgtacggaaacgaatgcactgtttgtacagaaacacagaagaaaaaactgataagagaatctgatttcgtatgaaagaaaggaactgtccataatttacttagtctttattaattttgaaaatgctacatgttct

SEQ ID NO: 27263 - DNA, 5676 bp, Zea Mays
cagggagggtacagacggaggccatgaccacatagcagaacacggggagagagaccggccgggggccgggcccgtgacccgtgaggacgagggcagcatcaccggagacggagacggagagcgtcggtgggcgcggccgacccaggaggaaattttcactgcgctattgactcctgtggtgttgggcctcactgggcctggcgagctacgaagcaagagcgtcggtgagagttgttcgttttagctgcgcgacagggcgttaaccccaagaggcccagcgcctcgccgccaccaagcgcagggccgctacctccttgccgtcagatcctccgcccgccgccgctcttctctctgttggggtgcggtgaagactccttgctactcgtgtcgcaagtgtattatcgcgaaattgttgtctgggacaacaagaatgccataaggaaccacagataatcgtgcggtggttaactggttatggataatgacaatggcgatgtggatgacctgggttcagggtggtttgaagtgaaaaagaaacatcggtccagctcaaaatacacattgcagaggtcttcaggtggttccagccataaaattccaaacttactatcacggtcaggtgctaacagtgacagttcaaggtggcatgacaaactgcaacacccatctccgagcataaatgctaatgttggtgttgatgggtctggtagtggagagacaacaaatgttcatggtgaagggtgcaatgatgtaagcaccagccccagtggcctgaatagtggcttaaatgcttcagcctcagaggatagagtagaaagacttgaagaactggcggtggctgaaaaaacaagtgaatctcccgaaaatgatctggctgatcatgcagatccttcactgcctcatgaaccatccacctgttcaggcagtcctgcaaaatgcgcagatctttctcagcatgtaaaatgttctccaaaaacagagtctgtaggtgttttgtccattactcctgtcaagtttggagactttgatgaagttccaggtctatcattaccttcagattcatacagagacaataatacttctagaggccacagacatactgaagatgttgcacatttaaaaaatgtgcaaaaagatgcaagtgaactcaaaccggagacagacacttgtactacaattgatgaggcatctccaattatggtacaaggaacagagacacccaatcatgatagtggtttgatagcctcagttgattctgttaccctatcctgctccaaaaatgatcatgaagttccagttacatcttcatctgttcctgttgcttccatggaaggtagaacgttacttcatgacgaagcaccagcttctgcagattttggatctgaaactgctgagagcaaagaaagattcaggcagaggctatggtgttttctttttgagaatctgaatagggctgttgatgaactttacctcctctgtgaactagaatgtgacatggaacagattaatgaatccatacttgtccttgaagaagctatttctgattttcaagaacttaaatccagagcagagcattttgataataccaaaaaatctcctggtgtaccaaaggagggcatgccaatggctgtgaaagctgaccataggagacctcatgccttgtcttgggaggtcagaagaatgacaagttctccacacaggcaagaaatactgtcttcatctctagaggccttccagagaatccaattggaactggcatgcaagcaggctggtatagcagcagaaagatttacatccagctcttctgaaaaagttttgggtagttcatcaaagctgactacagcatcggcaactgttaggaatataagtttgaaagttgagagtcaggtgaaacttcctgataccagcgtgaaaaagattgctggcgagaagctaagtagggatgcattcaagtctggtaagtcgtatccacaaagtatgccttcatattctgcaaggagtagaagagggtcattagaaccaatctctgaaatagagaaacacacctttaagaaggacagggagttgctagaaaacaaatttgacaggctcaagtcaaccgatgttgttaaaaagactacagctcatcttgaaaaggaaaagcaaattacagcaccttggaagtccatggatgcctggaaggagaaaagaaactgggaagatatactgaaatctcctgtacggagttctcgtgtttctcactctccaggtgttggaagaaaagttacagaccgcgctcgtgttctacatgacaagttgatgtctcctgaaaagaaaaaaagaagtgctttggatatgaaaaaagaagcagaagaaaagcatgcgcgtgcactgcgaattaggagtcaactagagagcgagagggttcagaggctacaacgtacctctgaaaagttgcatcgtgtcaatgagtggcaggctgtacgcagctcaaaactgagagaagtaatgaatgcacgtcatcaacgtggtgaatctcgtcacgaagcatatcttgctcaggttgcaaaaagagctggtgatgagagtactaaggtcaatgaggtccgttttataacatcactgaatgaagaaaacaagaaattcttgctgaggcagaaacttcatgattctgagatgcggagagctgaaaagctacaggtgatcaaaacaaagcaaaaggaggacactgcaagggaagaagctgttttggagcgaaggaagttccttgaagctgagaagatgcaacgccttgctgaaatacagcgcaagaaagaagaagctattttcagaagagaagaggagcgcaaagcatctagtgctgcacgggaagcaagggctgcagaacaacaacgtcgaaaagagataagagcaaaagcgcaacaagaggaagctgaacttttagcccaaaagttagctgaaaaacttcgtgaaagtgagcagcggcgcaagtattacctagaacaaatacgagagcgagcctcaatggatcttagggatcagccttcaccttttcagcgtcgctttccaagtaaagattgccaaaaccgttctagttctgctaacagcggagaagattcacagacaactggcaattccagtgctgcagattctatggttaagtcatcgaataatgcacagataaaacgaaggattaaaaagattcgccagagattaatggctctaaagcatgaatttattgaaccatccataggtgaaagtacaggaatcacgcacaggtctggtcttggagctgccaaagctaagctaagtagatggcttcaagaccttcagagacttcgtcaagctagaaaagaaggtgctgccagtattggattgattgtcagtgacatagcgaagtatttagaagggaaggatcttgagctgcatgcatcaagacaagttggtttgcttgactttattgcgtctgcattacctgcgtcacatacttcaaagcctggagcttgtcaagtcactgtctaccttttgcgcctgttgagagtgttgctctcacttccagctaatcgaacttattttctagtacaaaatcttttacccccaattattcccatgctatcagcatcactggagaattatattaaggtggcagcatccaactctggaagttcaaatcttttgtctaataaaacatcagctgagactacagagtcatcgggtgaagtgttagatggatttttatggactgtggccatgatcgttggccatgtacacatcaatggtgaacaacttcaaatgcagggaggtttgatagaactgattgtagcttatcaaataattcatcgtctgcgagatctgtttgcactttatgataggccacaggtggaaggatccccactcccatcatctatactgtttggcctcaaccttttgtccgtattaacatccaaaccgggaaatttctctactatcgattgggagtcctgcaaatgcaggacactaggtggaaatatagtgcaagaatatgaatatcttagttcacaggacagtttggggtgtcaatcaatgacacttgatcagtttggtgatgccaaatcgccaaccatatacagtgaactggctgaagatagcaaatcctgtaaacaacatgacttgagcattcctgtggacagaaaattggttgatgaagctagtaaagacttgttagtgatggctgctggcctgaacaactcagcaatgcaaccatctgatttgggcattactacagagaagcattctggaaatcctagccagggagatgaaaataacacagtggacagttttcttgaaggaagaaagacgaataatgtatgtgcattgtatagtagttcaggaaaaggcaatgagatgaaccttaagcagcctgcaatgctcttactttctgcactggctgagactggccttgttactctaccatcacttttgactgctgtgttgctccaggcaaacaacaacaggtcatcatcagagcagacattggcgattcttccatcaaattttgaagaagtagccactggtgtattgaaagttttgaataatatggcacgtttggatataacccttttgcagcacatgctgtctagatcagatctaaagatggagttcttccatttaatcagcttccttttgagtcattgcatgaacaaatggagagtgccaaacgatcaggaagttgatgacttggggagttggggtactggatcatgttatagtttctgccaggcttgaccatttgtgacccttttggatattattaccaagaaatttggacatactgccattttacacctgaatctcatggttggtttgctgcttctagagtctctgctacttcttggctacttttctttgttccatgctgggaaccaagctgttcttcggtggggaaagagtcccactatacttcacaaggtgtgcgacctgccatttgttttcttcagcgaccccgagttgatgcccatcttggctgctgctctgatcgctgtttgctacggttgcgatcagaacctaagcgttgtacagcaggaaataagcacggatatgctgcgctgcttgctcaagtcctgccaaacttcaggatcaaattctccagattccattgctgtggatggttctggaaacaattccactgaaagcattctggatatcaggaactcacagggtgacatcccaacaaggtcaagccgcaaaattggacggccagttattgggaagggtgtttcagggggtatcagattcaacagaaataaggttcagaaggatggtaggggaacaagagcaattgacgatgggcctctgaagcaaagagctcaagaagctgcatcgaacttcatgttgcatagaaagatcccagcttcttttttggacagagccgaggagttcttctgcagtgagacatgaaatcggccctgtggttcgcctaacttgtatggcacgagctactgaatttactgttttgcaaggatggtgtttcctgacctgatattttgatcgaatctgtagtctacagattaaaaaaatgagtcatgtacggaaacgaatgcactgtttgtacagaaacacagaagaaaaaactgataagagaatctgatttcgtatgaaagaaaggaactgtccataatttacttagtctttattaattttgaaaatgctacatgttct

SEQ ID NO: 27264 - DNA, 5629 bp, Zea Mays
gacacagggagggtacagacggaggccatgaccacatagcagaacacggggagagagaccggccgggggccgggcccgtgacccgtgaggacgagggcagcatcaccggagacggagacggagagcgtcggtgggcgcggccgacccaggaggaaattttcactgcgctattgactcctgtggtgttgggcctcactgggcctggcgagctacgaagcaagagcgtcggtgagagttgttcgttttagctgcgcgacagggcgttaaccccaagaggcccagcgcctcgccgccaccaagcgcagggccgctacctccttgccgtcagatcctccgcccgccgccgctcttctctctgttggggtgcggtgaagactccttgctactcgtgtcgcaagtgtattatcgcgaaattgttgtctgggacaacaagaatgccataaggaaccacagataatcgtgcggtggttaactggttatggataatgacaatggcgatgtggatgacctgggttcagggtggtttgaagtgaaaaagaaacatcggtccagctcaaaatacacattgcagaggtcttcaggtggttccagccataaaattccaaacttactatcacggtcaggtgctaacagtgacagttcaaggtggcatgacaaactgcaacacccatctccgagcataaatgctaatgttggtgttgatgggtctggtagtggagagacaacaaatgttcatggtgaagggtgcaatgatgtaagcaccagccccagtggcctgaatagtggcttaaatgcttcagcctcagaggatagagtagaaagacttgaagaactggcggtggctgaaaaaacaagtgaatctcccgaaaatgatctggctgatcatgcagatccttcactgcctcatgaaccatccacctgttcaggcagtcctgcaaaatgcgcagatctttctcagcatgtaaaatgttctccaaaaacagagtctgtaggtgttttgtccattactcctgtcaagtttggagactttgatgaagttccaggtctatcattaccttcagattcatacagagacaataatacttctagaggccacagacatactgaagatgttgcacatttaaaaaatgtgcaaaaagatgcaagtgaactcaaaccggagacagacacttgtactacaattgatgaggcatctccaattatggtacaaggaacagagacacccaatcatgatagtggtttgatagcctcagttgattctgttaccctatcctgctccaaaaatgatcatgaagttccagttacatcttcatctgttcctgttgcttccatggaaggtagaacgttacttcatgacgaagcaccagcttctgcagattttggatctgaaactgctgagagcaaagaaagattcaggcagaggctatggtgttttctttttgagaatctgaatagggctgttgatgaactttacctcctctgtgaactagaatgtgacatggaacagattaatgaatccatacttgtccttgaagaagctatttctgattttcaagaacttaaatccagagcagagcattttgataataccaaaaaatctcctggtgtaccaaaggagggcatgccaatggctgtgaaagctgaccataggagacctcatgccttgtcttgggaggtcagaagaatgacaagttctccacacaggcaagaaatactgtcttcatctctagaggccttccagagaatccaattggaactggcatgcaagcaggctggtatagcagcagaaagatttacatccagctcttctgaaaaagttttgggtagttcatcaaagctgactacagcatcggcaactgttaggaatataagtttgaaagttgagagtcaggtgaaacttcctgataccagcgtgaaaaagattgctggcgagaagctaagtagggatgcattcaagtctggtaagtcgtatccacaaagtatgccttcatattctgcaaggagtagaagagggtcattagaaccaatctctgaaatagagaaacacacctttaagaaggacagggagttgctagaaaacaaatttgacaggctcaagtcaaccgatgttgttaaaaagactacagctcatcttgaaaaggaaaagcaaattacagcaccttggaagtccatggatgcctggaaggagaaaagaaactgggaagatatactgaaatctcctgtacggagttctcgtgtttctcactctccaggtgttggaagaaaagttacagaccgcgctcgtgttctacatgacaagttgatgtctcctgaaaagaaaaaaagaagtgctttggatatgaaaaaagaagcagaagaaaagcatgcgcgtgcactgcgaattaggagtcaactagagagcgagagggttcagaggctacaacgtacctctgaaaagttgcatcgtgtcaatgagtggcaggctgtacgcagctcaaaactgagagaagtaatgaatgcacgtcatcaacgtggtgaatctcgtcacgaagcatatcttgctcaggttgcaaaaagagctggtgatgagagtactaaggtcaatgaggtccgttttataacatcactgaatgaagaaaacaagaaattcttgctgaggcagaaacttcatgattctgagatgcggagagctgaaaagctacaggtgatcaaaacaaagcaaaaggaggacactgcaagggaagaagctgttttggagcgaaggaagttccttgaagctgagaagatgcaacgccttgctgaaatacagcgcaagaaagaagaagctattttcagaagagaagaggagcgcaaagcatctagtgctgcacgggaagcaagggctgcagaacaacaacgtcgaaaagagataagagcaaaagcgcaacaagaggaagctgaacttttagcccaaaagttagctgaaaaacttcgtgaaagtgagcagcggcgcaagtattacctagaacaaatacgagagcgagcctcaatggatcttagggatcagccttcaccttttcagcgtcgctttccaagtaaagattgccaaaaccgttctagttctgctaacagcggagaagattcacagacaactggcaattccagtgctgcagattctatggttaagtcatcgaataatgcacagataaaacgaaggattaaaaagattcgccagagattaatggctctaaagcatgaatttattgaaccatccataggtgaaagtacaggaatcacgcacaggtctggtcttggagctgccaaagctaagctaagtagatggcttcaagaccttcagagacttcgtcaagctagaaaagaaggtgctgccagtattggattgattgtcagtgacatagcgaaggtacttctcatgcatcataatcatgcattgtttatactatagtaactatgtttgctaataccatttttttctttattttggtttagtatttagaagggaaggatcttgagctgcatgcatcaagacaagttggtttgcttgactttattgcgtctgcattacctgcgtcacatacttcaaagcctggagcttgtcaagtcactgtctaccttttgcgcctgttgagagtgttgctctcacttccagctaatcgaacttattttctagtacaaaatcttttacccccaattattcccatgctatcagcatcactggagaattatattaaggtggcagcatccaactctggaagttcaaatcttttgtctaataaaacatcagctgagactacagagtcatcgggtgaagtgttagatggatttttatggactgtggccatgatcgttggccatgtacacatcaatggtgaacaacttcaaatgcagggaggtttgatagaactgattgtagcttatcaaataattcatcgtctgcgagatctgtttgcactttatgataggccacaggtggaaggatccccactcccatcatctatactgtttggcctcaaccttttgtccgtattaacatccaaaccgggaaatttctctactatcgattgggagtcctgcaaatgcaggacactaggtggaaatatagtgcaagaatatgaatatcttagttcacaggacagtttggggtgtcaatcaatgacacttgatcagtttggtgatgccaaatcgccaaccatatacagtgaactggctgaagatagcaaatcctgtaaacaacatgacttgagcattcctgtggacagaaaattggttgatgaagctagtaaagacttgttagtgatggctgctggcctgaacaactcagcaatgcaaccatctgatttgggcattactacagagaagcattctggaaatcctagccagggagatgaaaataacacagtggacagttttcttgaaggaagaaagacgaataatgtatgtgcattgtatagtagttcaggaaaaggcaatgagatgaaccttaagcagcctgcaatgctcttactttctgcactggctgagactggccttgttactctaccatcacttttgactgctgtgttgctccaggcaaacaacaacaggtcatcatcagagcagacattggcgattcttccatcaaattttgaagaagtagccactggtgtattgaaagttttgaataatatggcacgtttggatataacccttttgcagcacatgctgatcagatctaaagatggagttcttccatttaatcagcttccttttgagtcattgcatgaacaaatggagagtgccaaacgatcaggttggtttgctgcttctagagtctctgctacttcttggctacttttctttgttccatgctgggaaccaagctgttcttcggtggggaaagagtcccactatacttcacaaggtgtgcgacctgccatttgttttcttcagcgaccccgagttgatgcccatcttggctgctgctctgatcgctgtttgctacggttgcgatcagaacctaagcgttgtacagcaggaaataagcacggatatgctgcgctgcttgctcaagtcctgccaaacttcaggatcaaattctccagattccattgctgtggatggttctggaaacaattccactgaaagcattctggatatcaggaactcacagggtgacatcccaacaaggtcaagccgcaaaattggacggccagttattgggaagggtgtttcagggggtatcagattcaacagaaataaggttcagaaggatggtaggggaacaagagcaattgacgatgggcctctgaagcaaagagctcaagaagctgcatcgaacttcatgttgcatagaaagatcccagcttcttttttggacagagccgaggagttcttctgcagtgagacatgaaatcggccctgtggttcgcctaacttgtatggcacgagctactgaatttactgttttgcaaggatggtgtttcctgacctgatattttgatcgaatctgtagtctacagattaaaaaaatgagtcatgtacggaaacgaatgcactgtttgtacagaaacacagaagaaaaaactgataagagaatctgatttcgtatgaaagaaaggaactgtccataatttacttagtctttattaattttgaaaatgctacatgttct

SEQ ID NO: 27265 - DNA, 5870 bp, Zea Mays
gtgaattttcttttctaaggtcgcatttatacccaagccgtttatgccgacgcaatctgcgaaattggcacttcaatttgcaatttcatagaaaacacagtatttgaaataaaaaataattgtacattacgaaaatattcatcacggtgaatctgataaatattaatttaaatataccaaccgatcaggtaatgatttatagaacaaactaaaggcgatgcagtgcagaacgcgctaacatgcaattattattatattaattgcagcaattagaagcaccactcctcccccactcctctactcccaggccccagccccagaggacacagggagggtacagacggaggccatgaccacatagcagaacacggggagagagaccggccgggggccgggcccgtgacccgtgaggacgagggcagcatcaccggagacggagacggagagcgtcggtgggcgcggccgacccaggaggaaattttcactgcgctattgactcctgtggtgttgggcctcactgggcctggcgagctacgaagcaagagcgtcggtgagagttgttcgttttagctgcgcgacagggcgttaaccccaagaggcccagcgcctcgccgccaccaagcgcagggccgctacctccttgccgtcagatcctccgcccgccgccgctcttctctctgttggggtgcggtgaagactccttgctactcgtgtcgcaagtgtattatcgcgaaattgttgtctgggacaacaagaatgccataaggaaccacagataatcgtgcggtggttaactggttatggataatgacaatggcgatgtggatgacctgggttcagggtggtttgaagtgaaaaagaaacatcggtccagctcaaaatacacattgcagaggtcttcaggtggttccagccataaaattccaaacttactatcacggtcaggtgctaacagtgacagttcaaggtggcatgacaaactgcaacacccatctccgagcataaatgctaatgttggtgttgatgggtctggtagtggagagacaacaaatgttcatggtgaagggtgcaatgatgtaagcaccagccccagtggcctgaatagtggcttaaatgcttcagcctcagaggatagagtagaaagacttgaagaactggcggtggctgaaaaaacaagtgaatctcccgaaaatgatctggctgatcatgcagatccttcactgcctcatgaaccatccacctgttcaggcagtcctgcaaaatgcgcagatctttctcagcatgtaaaatgttctccaaaaacagagtctgtaggtgttttgtccattactcctgtcaagtttggagactttgatgaagttccaggtctatcattaccttcagattcatacagagacaataatacttctagaggccacagacatactgaagatgttgcacatttaaaaaatgtgcaaaaagatgcaagtgaactcaaaccggagacagacacttgtactacaattgatgaggcatctccaattatggtacaaggaacagagacacccaatcatgatagtggtttgatagcctcagttgattctgttaccctatcctgctccaaaaatgatcatgaagttccagttacatcttcatctgttcctgttgcttccatggaaggtagaacgttacttcatgacgaagcaccagcttctgcagattttggatctgaaactgctgagagcaaagaaagattcaggcagaggctatggtgttttctttttgagaatctgaatagggctgttgatgaactttacctcctctgtgaactagaatgtgacatggaacagattaatgaatccatacttgtccttgaagaagctatttctgattttcaagaacttaaatccagagcagagcattttgataataccaaaaaatctcctggtgtaccaaaggagggcatgccaatggctgtgaaagctgaccataggagacctcatgccttgtcttgggaggtcagaagaatgacaagttctccacacaggcaagaaatactgtcttcatctctagaggccttccagagaatccaattggaactggcatgcaagcaggctggtatagcagcagaaagatttacatccagctcttctgaaaaagttttgggtagttcatcaaagctgactacagcatcggcaactgttaggaatataagtttgaaagttgagagtcaggtgaaacttcctgataccagcgtgaaaaagattgctggcgagaagctaagtagggatgcattcaagtctggtaagtcgtatccacaaagtatgccttcatattctgcaaggagtagaagagggtcattagaaccaatctctgaaatagagaaacacacctttaagaaggacagggagttgctagaaaacaaatttgacaggctcaagtcaaccgatgttgttaaaaagactacagctcatcttgaaaaggaaaagcaaattacagcaccttggaagtccatggatgcctggaaggagaaaagaaactgggaagatatactgaaatctcctgtacggagttctcgtgtttctcactctccaggtgttggaagaaaagttacagaccgcgctcgtgttctacatgacaagttgatgtctcctgaaaagaaaaaaagaagtgctttggatatgaaaaaagaagcagaagaaaagcatgcgcgtgcactgcgaattaggagtcaactagagagcgagagggttcagaggctacaacgtacctctgaaaagttgcatcgtgtcaatgagtggcaggctgtacgcagctcaaaactgagagaagtaatgaatgcacgtcatcaacgtggtgaatctcgtcacgaagcatatcttgctcaggttgcaaaaagagctggtgatgagagtactaaggtcaatgaggtccgttttataacatcactgaatgaagaaaacaagaaattcttgctgaggcagaaacttcatgattctgagatgcggagagctgaaaagctacaggtgatcaaaacaaagcaaaaggaggacactgcaagggaagaagctgttttggagcgaaggaagttccttgaagctgagaagatgcaacgccttgctgaaatacagcgcaagaaagaagaagctattttcagaagagaagaggagcgcaaagcatctagtgctgcacgggaagcaagggctgcagaacaacaacgtcgaaaagagataagagcaaaagcgcaacaagaggaagctgaacttttagcccaaaagttagctgaaaaacttcgtgaaagtgagcagcggcgcaagtattacctagaacaaatacgagagcgagcctcaatggatcttagggatcagccttcaccttttcagcgtcgctttccaagtaaagattgccaaaaccgttctagttctgctaacagcggagaagattcacagacaactggcaattccagtgctgcagattctatggttaagtcatcgaataatgcacagataaaacgaaggattaaaaagattcgccagagattaatggctctaaagcatgaatttattgaaccatccataggtgaaagtacaggaatcacgcacaggtctggtcttggagctgccaaagctaagctaagtagatggcttcaagaccttcagagacttcgtcaagctagaaaagaaggtgctgccagtattggattgattgtcagtgacatagcgaagtatttagaagggaaggatcttgagctgcatgcatcaagacaagttggtttgcttgactttattgcgtctgcattacctgcgtcacatacttcaaagcctggagcttgtcaagtcactgtctaccttttgcgcctgttgagagtgttgctctcacttccagctaatcgaacttattttctagtacaaaatcttttacccccaattattcccatgctatcagcatcactggagaattatattaaggtggcagcatccaactctggaagttcaaatcttttgtctaataaaacatcagctgagactacagagtcatcgggtgaagtgttagatggatttttatggactgtggccatgatcgttggccatgtacacatcaatggtgaacaacttcaaatgcagggaggtttgatagaactgattgtagcttatcaaataattcatcgtctgcgagatctgtttgcactttatgataggccacaggtggaaggatccccactcccatcatctatactgtttggcctcaaccttttgtccgtattaacatccaaaccgggaaatttctctactatcgattgggagtcctgcaaatgcaggacactaggtggaaatatagtgcaagaatatgaatatcttagttcacaggacagtttggggtgtcaatcaatgacacttgatcagtttggtgatgccaaatcgccaaccatatacagtgaactggctgaagatagcaaatcctgtaaacaacatgacttgagcattcctgtggacagaaaattggttgatgaagctagtaaagacttgttagtgatggctgctggcctgaacaactcagcaatgcaaccatctgatttgggcattactacagagaagcattctggaaatcctagccagggagatgaaaataacacagtggacagttttcttgaaggaagaaagacgaataatgtatgtgcattgtatagtagttcaggaaaaggcaatgagatgaaccttaagcagcctgcaatgctcttactttctgcactggctgagactggccttgttactctaccatcacttttgactgctgtgttgctccaggcaaacaacaacaggtcatcatcagagcagacattggcgattcttccatcaaattttgaagaagtagccactggtgtattgaaagttttgaataatatggcacgtttggatataacccttttgcagcacatgctgtctagatcagatctaaagatggagttcttccatttaatcagcttccttttgagtcattgcatgaacaaatggagagtgccaaacgatcaggttggtttgctgcttctagagtctctgctacttcttggctacttttctttgttccatgctgggaaccaagctgttcttcggtggggaaagagtcccactatacttcacaaggtgtgcgacctgccatttgttttcttcagcgaccccgagttgatgcccatcttggctgctgctctgatcgctgtttgctacggttgcgatcagaacctaagcgttgtacagcaggaaataagcacggatatgctgcgctgcttgctcaagtcctgccaaacttcaggatcaaattctccagattccattgctgtggatggttctggaaacaattccactgaaagcattctggatatcaggaactcacagggtgacatcccaacaaggtcaagccgcaaaattggacggccagttattgggaagggtgtttcagggggtatcagattcaacagaaataaggttcagaaggatggtaggggaacaagagcaattgacgatgggcctctgaagcaaagagctcaagaagctgcatcgaacttcatgttgcatagaaagatcccagcttcttttttggacagagccgaggagttcttctgcagtgagacatgaaatcggccctgtggttcgcctaacttgtatggcacgagctactgaatttactgttttgcaaggatggtgtttcctgacctgatattttgatcgaatctgtagtctacagattaaaaaaatgagtcatgtacggaaacgaatgcactgtttgtacagaaacacagaagaaaaaactgataagagaatctgatttcgtatgaaagaaaggaactgtccataatttacttagtctttattaattttgaaaatgctacatgttct

SEQ ID NO: 27266 - DNA, 2130 bp, Zea Mays
cgcggacgtttttactgaggaaggtccatccttctccctcctaggctccgtcggtctctctctctctttccttatccccggcccgtggcccgtgctaacggtgattagggttccgaatcgtgtttaagcgctgcgaaatcacggctggggcttcgtcctcgagtcgtcgtcctgctggatgtcacctcgtgtcccgcgccgacgccagtgctcgtcctcggagccgcctctctccgacgatcgccggagacggatacggtcgaagccgtcactgcaggccgcgctcgtgcgtcgtagcagatgtctagtagctccaacggccattatcctgctaatggtgcaaagattcttcatagaaaagaaaagaataaagagaaagtacagctcgacaaaaattcagccacttgggtgtgccagaaggacaggcattatgttgaaaaattagaaacagaattgatgaactgctatcaggaaattggatcagttaaatatacggagcgttgaagcaaacttcatgggagagcacattcacagtcttgaactgaagctgactgaacttgaaaagttcccagaaagagtgagagcgatggacaatgagctgatacgatctgattcccagtgctggcttctgatggaagaagtcagatgtaaagaagaggagttgcagaaggcagcctcacagatagagaagcttgaaagtacagctttagattcacaatgcgaaattgagagcttgaaacttgatttgactaatcttgagcagagactatttgacgctgagagattttcccaacatgctggtgagcacaaagctcaatttgacaaactactgggagaacatgagctccagctacatgaagcacagaaaactattcatcaacttgtatgggagaataagcaactgaaggagttgttgcctgtaagagctcctaaacaatctcctcctggatctggatggaaagttaacaaaacattggagaacggtgtgcatgcagaatgcgaaagtggcgatgtaattcttgaaaatatggcaaaacgaaatgaagaatctgaacttctaattgagcagctcaagagcttcgagaacaaaagttaaaggcaaaagaggatgcggaagatctcacccaagaaatggctgaactaagataccagataacaggcatgcttgaggaagaatacaagcgtcgatcttgcattgagcaggcagctattaaacatattcaggagctggaaactcaggtagtgatataggaaattttcacaccgtgtggttgcatctggaattatagctacaaatgtttctgaattttttttttctatcatctcaaacttagtagctgacataactagtaatgaaatggacgtgctgccttggtcttgttatattaatgacttctttgtctggtgcctcttaaatttcttatctctccatgatgtttgagacaggtttccaaagagaagacaaaactgagtggggcacttaagcgattgcaggaatcacatgaactagctcgcacacaagctatggagattaagaagttgaaggctgctttagagagattgaattcggtgacgaacctgggtacagtttgcaaatcttgctcttgcgggttctctgcaatgttggtagagctgtctaattgctcgatcgaaggaccttcaggcagcgccagatctctcaattccaaccacattgatgagaagtcacagaatcaggctctaatagagtggcgtccccgtgaagcctcagatgatgacggtggttggtcgattcgcgcctttgcagagaaaatcaacagaaaatcccgcctcctccctccatctgcacgccaagaaagggaactgccactacagccgaacgacctcctgcgcgtcggcgtcgcagggcccgccgtcgccgagcagcccacaaatttgccggcctcgaggaggcaatccacgccgcctacgccgctgcctagacgctgttggaccacctcccgtggtacctggcagctagctcagtgcagggtgctgccgtcgacgagcgtcaccgtcgccgagcaggccacaaattcgccttacgtcgtcgcctatacgccgtcggaacacctcctacggtacctggcggctagctcagtgcgagagtag

SEQ ID NO: 27267 - DNA, 508 bp, Zea Mays
ccgcccccgccagcacgccaagcgtggatctcgcgcaactcccagcgcgcagccgctgatcccatccccgcgctcccctccgctaccccatccatctcgcctcctcacctcatgccatcagcgcgtccgcggccctccgccctcgccctcgccccgtcgttctcgcgtcctccctctcctgtaatggcgcgcggtgaggaccacgcatattcgatttgggtcggggaaggtccgcctccgagctgttaatggaagagtaaaggaatactcggagcagacccgagaaggcgacgaccaacatgttttcaagttctcaagccttcttgatgacgagattgtgatattcatgatataacagcaaggactgattgcaacaagacttgaagatctagggaagaaagaggcaagacttcaagaactgccacttctacatgagatatctggccgtttgattacattagtttcataggtgtccagagaggacctcatggagtagtatgcattttca

SEQ ID NO: 27268 - DNA, 1874 bp, Zea Mays
gcccccgccagcgccgtcccttccctgcaatcccgcccccgccagcacgccaagcgtggatctcgcgcaactcccagcgcgcagccgctgatcccatccccgcgctcccctccgctaccccatccatctcgcctcctcacctcatgccatcagcgcgtccgcggccctccgccctcgccctcgccccgtcgttctcgcgtcctccctctcctgtaatggcgcgcggtgaggaccacgcatattcgatttgggtcggggaaggtccgcctccgagctgttaatggaaggttcgtctacgcgtcgctctctaccgcccgccaatctcgcgtctgcgcgccgctctcttccgccctccaatctcgctcaaccgcaccctgctcaattaaaccctagctacgcttcctccagatcccggcatctcggctccatggccatcctcgtccctcgctccagcctcaaatctcaccctgtcgatattcgtttcagggatagttgtactcgtcacgttcctgctcagggacaagctcagctacatcttcaccggcgacaaggtcgtctcgtgcaccgtcactgacctgtgtccgctgctcgttgggaccatcgtgctcttcgggatctagcccgtgttgtcaggtggtttttctttttcccttatccaaactgaaattgtggtgcatcttctctcccctcgccccagatcgccgccccactctcctctctctcccgcacaccaagcggtcgcaaatcccagccagcagccaccaccgatctcctctctaatcgccccagatcgtcgctctccatggagggcgcgtggtggccgggccgcgaatctcgaataccccgcgaccgcaccccagatcgtcgccccgactctccatgtaaggctcgtccgcgacatcccaatcttcgcggctccgtcgtccatggaaggcgcgacctccccccagatccactctcctctctcacgcaatccctgctgacgcgacccagatcgcgaccctcgctctcaatcctcgcccacactctccatggatctgggtaatctgtcctcgcccacggtcctatctgctcacatggatctgattgaggtttccatcgacggggtaatcggtcttgctctcgatcctcgcccacgctctccaggatatcgcccacgctcttcagaaaacagtgaaaagataactgcttgttggtttcttttgatttctctactcattttctctacatgttttacaatccttcaaaaatcatgtttattgcagcatcttattgcatatctgtttttgctcttctatgtttgcttcctatttttgagaagcatttgctattctctatctttgagattatgaatactgccgaatccatatgctggcaaacaaatttcttaactgtactcttttgtatattcaggcaattgatcacataaataattcagctgccaaatcgagtatgtttgtccattcattgcccatcatgaatcccagacaaatatcgatcttgactccacgcgcatgcatgcactttttagagtttttcattcactgaacaaagacattttagagtgaataaatgaggctccatacacttcagttcactgaaactgaattgctcttgtatacttcatttcatgctttattcgaagagtaaaggaatactcggagcagacccgagaaggcgacgaccaacatgttttcaagttctcaagccttcttgatgacgagcaaggactgattgcaacaagacttgaagatctagggaagaaagaggcaagacttcaagaactgccacttctacatgagatatctggccgtttgattacattagtttcataggtgtccagagaggacctcatggagtagtatgcattttca

SEQ ID NO: 27269 - DNA, 1131 bp, Zea Mays
aacaaagaacaccagaggagagtggggatgagagagagagagagagagagagagagagagagagatggtgagtgagaaggcttgtccagtggtggacaagtgaacaacccccctctgcagtctgcacactgcactgcactgatcccacaccacatgccatcatacaacacatgcatgccaaatctatccagcagcacctattgctgcataaagatttgctgttccactgtcctagccaatcagtgtgtcaccaaaggccacatagcttgcagctccggagcttccatcactgtacccttccggcccctccccctctccttgcttgaagctgctccctgctgtttcagctggcacctagcaggctcacatactcgatacctggctccattgatctagcttgcacaacacaacggcttctaacctttacgcatagtagcgttgctttgcttcgctgtctgtctgtctgtcagagagagagagagagagagagagagagagagagagagaggtgcagtgcagtaccgtactctcgttgcttgcttcccagttccctctctcactctctggtacgaagtgaaccgtagtttgcagagccacaccaacctgtagcgtgacagtaccgtagtacactgggcatgcagcggctgaagcaattggttacttcggggcaaccaatcggctccagcctcgcacaagcacaaggtagacctcacacctcaggttggtgagcaaaagcaggagcagagcaaaggctaccagttggcgaagttaaaaataacaaaactgaccgagtaaacagatgggtagctttcgagctaatcttagcatctgctaaactgaagcacctcgggatatcatcatcataggcagtcttattgatctagtgtactgaagaacagaaatgctaaaaccattgaagtaataacctgatagaaaacccgactcctgcttcaagactcccttggtaagcttgggggaaaaaaataaattgaattggatgaatctgtacagagccccacattcatcacttcgcggcaaacttggttcaggtctcctccgctgcagccggtgggaagttgagatcaagtaacccgtcggcgactgctgaatgctgctcctgatggtctgcgc

SEQ ID NO: 27270 - DNA, 567 bp, Zea Mays
cacagaacagccggtagtcgtctgccagtcagtgagggtaggatcctcccaggattgtccggcagcgcggcgggggatgggcttcttgctggtagagggatcggagggcctggcgttcgcggcggcggcggggtcgaggacgtcgctggtggcgagagcagccttgacgctctgcagcgcctcgggggttatggtctgcgcgtcccgctggaagagctgatgcgcctgatgcagctgttgctggtactgttggtagctgctcgccgccataggcggcggcatctgcggctgcggctggtgctgctgcaggtggaaagggagagggaagtagctgggccccgccggcgccgaagacgccgacccaggaggcggcgggggaggaggattcataggcatgtaggcggatcgattcgggagtgtcccaaacgacgccgccgcgatcaaagcattagggtttactcgtcgctcgtcaagcgctaccgccaaatgctctcaccctcatctatgcgtctgccaccttccgcaagatctttctgctggctacagatttatgtttcggtggagtag

SEQ ID NO: 27271 - DNA, 2967 bp, Zea Mays
cagctccgcctgacccacacgtcagctctgtagaaggcggcccgcacaccagagcgttcgaccccacccggtgccgggcgtctccactcgcgctcgcgcaccgcttggcctctcctccgccgcctcccacttccgtgctccccgctccggcgaattggtgcccacctgcgagctcgccccgttatagtgcactgcattaaaggcactgcgatccttccttttgtatctgggttattcttgaagaattaattttcactctggaggaaaaatgagtggtcctccaaagaggttgcatgaggagagtagccactctacacctgcaaagcggcctttggacgacaacagcttgtactcaagcccttctgggaaagctattcagtcaagcagcagtgatttccatggtttttttgaacatgatggtagatttgccaaaattcaacgtgttgaggctcgtgatgataagaggccaccccttgtccatcggatgcatggtagctccaactttgttgatcacaccgtcttgtctgacagcagattagaaccaaagcacaataaagatacaagggacaataaggcggatgatcgtgacacaaaagctgatgctcgggatgtctatagtgatcccagtattgagtttcagtttaataaaattgacagtgatgtaaaaatagacaatagagctgatggaaatgaaataagggctgacaggaggggtcaccacgattacaaaggtgatactaaatttgacaaggataatcatcctattgttgcatcgagcttaggctggaaagacaacaaagaacataggggcaaaaggtactttgagcagccatctgataatgcggattggcgtttcccccgtcccggtttgcaaggtactgatgaaactctcaaaggtctaacttccatggaagaccgtaattcaagagatgcacatgattctgcttttgacaacaaagctgaatcaaaaggtgaagataagtttagagacaaggataggaaaaagaaggatgagaaacatagagactttggttcaagagaaggtgagagaaatgatcgtcggaccggtatccagcttggaggtagtggagttgagcgaagagaaatgcaaagggaagagagggatgctgaaaaatgggacagggaaagaaaagattccttgagagacaaggaaggcaatgatagggaaaaggattctgctaagaaagatccatctatggtaatggaaaaggataacacaatagttgaaaaacttttatctgatggacctgttaaaaatgctgaacatgagaatacaacaacagaaactaaggtgcttaaggacgatgcatggaaaggtcatgacagggatcctaaagacaagaaaagagagaaggatttggatgcaggagacaggcatgagcaaagaagcaaatataatgacaaggaatcagatgataatggcaccgaaggtgatacagaaaaagataaagatgtttttggaagtgttcaacgcaggaggatggtgcgaccaaggggaggtggtagccaagcatctcaacgtgatccccgatttcgatcccgaacgcgtgatggcgaagggtaatcttaaggtaaatctgaggtttctgccattctttataaagccggagagtgcatgcaggagcttctgaaatcatggaaagattttgaagcaactcaggaggctacaaatgttgaaagtctacaaaacggtcctactcttgaaattcggatacctgccgaatttgttacttccactaatcgtcaagtaaagggtgctcaactttggggaacagatatatatacaaatgattcagatcttgtggctgtgctaatgcatactggctattgctcgcctacgtcctcccctcccccatctgccatccaagagcttcatgcaactgttcaagttctaccaccacaagagagttatacttcaacattgaggaacaacgtacgctcacgtgcttggggtgctgggattggttgtagcttccgcatagaacgctgctgcatagttaagaaaggcggtggcaccattgatcttgaaccacgccttagtcacacatcagctgtggagcctacacttgctccagttgcggttgagcgcacaatgacgacaagagctgcagcttccaatgcattgcgacaacaaagatttgtccgtgaagtgacaatacagtacaacctctgcaacgagccatggttaaaatatagtataagcattgtggcagacaagggattgaaaaagtcactttatacttctgctagactgaagaaaggagaagtaatatatttggagacacattttaataggtacgagctgtgcttcagtggagagaagcctcggggtattggatcgagctctaatgcatctgatgcagaacctgagaaacaccagagcagtagtcaccattcgcaaaacggctctgtggagcatgaactccgggatgtgttccgatggtcccggtgtaagaaggccatgcctgaaagtgccatgcgctccactggtatcccactaccagcagatcagctcgaggtgttgcaggataacctagaatgggaggacgtgcagtggtcgcagaccggtgtttgggtggctgggaaggagtatcccctcgcccgagttcacttcctctccgggaactagcagcagctgatgttgcagccaacgaaggagctatcgtttcctgtggacaggagaggagcttgccaacattataaggtcgatccggccaccctctatgagtcccttgacggacttgtaccgaagaacatacaagtcatcagcaaccaggtccacaacctcctctccacttcacgaaagcaagcatcataggtcagcagagcttgaaaacgcgcaaagcaagaattgtgtgtgtgtgtgtgtagctacttacatgtcatctagctggaatgcacctacgtcgcccttggtcttacagaagacgaaggtgtcaagctgag

SEQ ID NO: 27272 - DNA, 2979 bp, Zea Mays
atacttcagctccgcctgacccacacgtcagctctgtagaaggcggcccgcacaccagagcgttcgaccccacccggtgccgggcgtctccactcgcgctcgcgcaccgcttggcctctcctccgccgcctcccacttccgtgctccccgctccggcgaattggtgcccacctgcgagctcgccccgttatagtgcactgcattaaaggcactgcgatccttccttttgtatctgggttattcttgaagaattaattttcactctggaggaaaaatgagtggtcctccaaagaggttgcatgaggagagtagccactctacacctgcaaagcggcctttggacgacaacagcttgtactcaagcccttctgggaaagctattcagtcaagcagcagtgatttccatggtttttttgaacatgatggtagatttgccaaaattcaacgtgttgaggctcgtgatgataagaggccaccccttgtccatcggatgcatggtagctccaactttgttgatcacaccgtcttgtctgacagcagattagaaccaaagcacaataaagatacaagggacaataaggcggatgatcgtgacacaaaagctgatgctcgggatgtctatagtgatcccagtattgagtttcagtttaataaaattgacagtgatgtaaaaatagacaatagagctgatggaaatgaaataagggctgacaggaggggtcaccacgattacaaaggtgatactaaatttgacaaggataatcatcctattgttgcatcgagcttaggctggaaagacaacaaagaacataggggcaaaaggtactttgagcagccatctgataatgcggattggcgtttcccccgtcccggtttgcaaggtactgatgaaactctcaaaggtctaacttccatggaagaccgtaattcaagagatgcacatgattctgcttttgacaacaaagctgaatcaaaaggtgaagataagtttagagacaaggataggaaaaagaaggatgagaaacatagagactttggttcaagagaaggtgagagaaatgatcgtcggaccggtatccagcttggaggtagtggagttgagcgaagagaaatgcaaagggaagagagggatgctgaaaaatgggacagggaaagaaaagattccttgagagacaaggaaggcaatgatagggaaaaggattctgctaagaaagatccatctatggtaatggaaaaggataacacaatagttgaaaaacttttatctgatggacctgttaaaaatgctgaacatgagaatacaacaacagaaactaaggtgcttaaggacgatgcatggaaaggtcatgacagggatcctaaagacaagaaaagagagaaggatttggatgcaggagacaggcatgagcaaagaagcaaatataatgacaaggaatcagatgataatggcaccgaaggtgatacagaaaaagataaagatgtttttggaagtgttcaacgcaggaggatggtgcgaccaaggggaggtggtagccaagcatctcaacgtgatccccgatttcgatcccgaacgcgtgatggcgaaggggctcaaggtaaatctgaggtttctgccattctttataaagccggagagtgcatgcaggagcttctgaaatcatggaaagattttgaagcaactcaggaggctacaaatgttgaaagtctacaaaacggtcctactcttgaaattcggatacctgccgaatttgttacttccactaatcgtcaagtaaagggtgctcaactttggggaacagatatatatacaaatgattcagatcttgtggctgtgctaatgcatactggctattgctcgcctacgtcctcccctcccccatctgccatccaagagcttcatgcaactgttcaagttctaccaccacaagagagttatacttcaacattgaggaacaacgtacgctcacgtgcttggggtgctgggattggttgtagcttccgcatagaacgctgctgcatagttaagaaaggcggtggcaccattgatcttgaaccacgccttagtcacacatcagctgtggagcctacacttgctccagttgcggttgagcgcacaatgacgacaagagctgcagcttccaatgcattgcgacaacaaagatttgtccgtgaagtgacaatacagtacaacctctgcaacgagccatggttaaaatatagtataagcattgtggcagacaagggattgaaaaagtcactttatacttctgctagactgaagaaaggagaagtaatatatttggagacacattttaatagtctccacaggtacgagctgtgcttcagtggagagaagcctcggggtattggatcgagctctaatgcatctgatgcagaacctgagaaacaccagagcagtagtcaccattcgcaaaacggctctgtggagcatgaactccgggatgtgttccgatggtcccggtgtaagaaggccatgcctgaaagtgccatgcgctccactggtatcccactaccagcagatcagctcgaggtgttgcaggataacctagaatgggaggacgtgcagtggtcgcagaccggtgtttgggtggctgggaaggagtatcccctcgcccgagttcacttcctctccgggaactagcagcagctgatgttgcagccaacgaaggagctatcgtttcctgtggacaggagaggagcttgccaacattataaggtcgatccggccaccctctatgagtcccttgacggacttgtaccgaagaacatacaagtcatcagcaaccaggtccacaacctcctctccacttcacgaaagcaagcatcataggtcagcagagcttgaaaacgcgcaaagcaagaattgtgtgtgtgtgtgtgtagctacttacatgtcatctagctggaatgcacctacgtcgcccttggtcttacagaagacgaaggtgtcaagctgag

SEQ ID NO: 27273 - DNA, 3010 bp, Zea Mays
acgaatgcagctccgccgctccatccgtcaacaagaccgaatacttcagctccgcctgacccacacgtcagctctgtagaaggcggcccgcacaccagagcgttcgaccccacccggtgccgggcgtctccactcgcgctcgcgcaccgcttggcctctcctccgccgcctcccacttccgtgctccccgctccggcgaattggtgcccacctgcgagctcgccccgttatagtgcactgcattaaaggcactgcgatccttccttttgtatctgggttattcttgaagaattaattttcactctggaggaaaaatgagtggtcctccaaagaggttgcatgaggagagtagccactctacacctgcaaagcggcctttggacgacaacagcttgtactcaagcccttctgggaaagctattcagtcaagcagcagtgatttccatggtttttttgaacatgatggtagatttgccaaaattcaacgtgttgaggctcgtgatgataagaggccaccccttgtccatcggatgcatggtagctccaactttgttgatcacaccgtcttgtctgacagcagattagaaccaaagcacaataaagatacaagggacaataaggcggatgatcgtgacacaaaagctgatgctcgggatgtctatagtgatcccagtattgagtttcagtttaataaaattgacagtgatgtaaaaatagacaatagagctgatggaaatgaaataagggctgacaggaggggtcaccacgattacaaaggtgatactaaatttgacaaggataatcatcctattgttgcatcgagcttaggctggaaagacaacaaagaacataggggcaaaaggtactttgagcagccatctgataatgcggattggcgtttcccccgtcccggtttgcaaggtactgatgaaactctcaaaggtctaacttccatggaagaccgtaattcaagagatgcacatgattctgcttttgacaacaaagctgaatcaaaaggtgaagataagtttagagacaaggataggaaaaagaaggatgagaaacatagagactttggttcaagagaaggtgagagaaatgatcgtcggaccggtatccagcttggaggtagtggagttgagcgaagagaaatgcaaagggaagagagggatgctgaaaaatgggacagggaaagaaaagattccttgagagacaaggaaggcaatgatagggaaaaggattctgctaagaaagatccatctatggtaatggaaaaggataacacaatagttgaaaaacttttatctgatggacctgttaaaaatgctgaacatgagaatacaacaacagaaactaaggtgcttaaggacgatgcatggaaaggtcatgacagggatcctaaagacaagaaaagagagaaggatttggatgcaggagacaggcatgagcaaagaagcaaatataatgacaaggaatcagatgataatggcaccgaaggtgatacagaaaaagataaagatgtttttggaagtgttcaacgcaggaggatggtgcgaccaaggggaggtggtagccaagcatctcaacgtgatccccgatttcgatcccgaacgcgtgatggcgaaggggctcaaggtaaatctgaggtttctgccattctttataaagccggagagtgcatgcaggagcttctgaaatcatggaaagattttgaagcaactcaggaggctacaaatgttgaaagtctacaaaacggtcctactcttgaaattcggatacctgccgaatttgttacttccactaatcgtcaagtaaagggtgctcaactttggggaacagatatatatacaaatgattcagatcttgtggctgtgctaatgcatactggctattgctcgcctacgtcctcccctcccccatctgccatccaagagcttcatgcaactgttcaagttctaccaccacaagagagttatacttcaacattgaggaacaacgtacgctcacgtgcttggggtgctgggattggttgtagcttccgcatagaacgctgctgcatagttaagaaaggcggtggcaccattgatcttgaaccacgccttagtcacacatcagctgtggagcctacacttgctccagttgcggttgagcgcacaatgacgacaagagctgcagcttccaatgcattgcgacaacaaagatttgtccgtgaagtgacaatacagtacaacctctgcaacgagccatggttaaaatatagtataagcattgtggcagacaagggattgaaaaagtcactttatacttctgctagactgaagaaaggagaagtaatatatttggagacacattttaataggtacgagctgtgcttcagtggagagaagcctcggggtattggatcgagctctaatgcatctgatgcagaacctgagaaacaccagagcagtagtcaccattcgcaaaacggctctgtggagcatgaactccgggatgtgttccgatggtcccggtgtaagaaggccatgcctgaaagtgccatgcgctccactggtatcccactaccagcagatcagctcgaggtgttgcaggataacctagaatgggaggacgtgcagtggtcgcagaccggtgtttgggtggctgggaaggagtatcccctcgcccgagttcacttcctctccgggaactagcagcagctgatgttgcagccaacgaaggagctatcgtttcctgtggacaggagaggagcttgccaacattataaggtcgatccggccaccctctatgagtcccttgacggacttgtaccgaagaacatacaagtcatcagcaaccaggtccacaacctcctctccacttcacgaaagcaagcatcataggtcagcagagcttgaaaacgcgcaaagcaagaattgtgtgtgtgtgtgtgtagctacttacatgtcatctagctggaatgcacctacgtcgcccttggtcttacagaagacgaaggtgtcaagctgag

SEQ ID NO: 27274 - DNA, 3303 bp, Zea Mays
ggcgtctccactcgcgctcgcgcaccgcttggcctctcctccgccgcctcccacttccgtgctccccgctccggcgaattggtgcccacctgcgagctcgccccgttatagtgcactgcattaaaggcactgcgatccttccttttgtatctgggttattcttgaagaattaattttcactctggaggaaaaatgagtggtcctccaaagaggttgcatgaggagagtagccactctacacctgcaaagcggcctttggacgacaacagcttgtactcaagcccttctgggaaagctattcagtcaagcagcagtgatttccatggtttttttgaacatgatggtagatttgccaaaattcaacgtgttgaggctcgtgatgataagaggccaccccttgtccatcggatgcatggtagctccaactttgttgatcacaccgtcttgtctgacagcagattagaaccaaagcacaataaagatacaagggacaataaggcggatgatcgtgacacaaaagctgatgctcgggatgtctatagtgatcccagtattgagtttcagtttaataaaattgacagtgatgtaaaaatagacaatagagctgatggaaatgaaataagggctgacaggaggggtcaccacgattacaaaggtgatactaaatttgacaaggataatcatcctattgttgcatcgagcttaggctggaaagacaacaaagaacataggggcaaaaggtactttgagcagccatctgataatgcggattggcgtttcccccgtcccggtttgcaaggtactgatgaaactctcaaaggtctaacttccatggaagaccgtaattcaagagatgcacatgattctgcttttgacaacaaagctgaatcaaaaggtgaagataagtttagagacaaggataggaaaaagaaggatgagaaacatagagactttggttcaagagaaggtgagagaaatgatcgtcggaccggtatccagcttggaggtagtggagttgagcgaagagaaatgcaaagggaagagagggatgctgaaaaatgggacagggaaagaaaagattccttgagagacaaggaaggcaatgatagggaaaaggattctgctaagaaagatccatctatggtaatggaaaaggataacacaatagttgaaaaacttttatctgatggacctgttaaaaatgctgaacatgagaatacaacaacagaaactaaggtgcttaaggacgatgcatggaaaggtcatgacagggatcctaaagacaagaaaagagagaaggatttggatgcaggagacaggcatgagcaaagaagcaaatataatgacaaggaatcagatgataatggcaccgaaggtgatacagaaaaagataaagatgtttttggaagtgttcaacgcaggaggatggtgcgaccaaggggaggtggtagccaagcatctcaacgtgatccccgatttcgatcccgaacgcgtgatggcgaaggggctcaaggttagtcaaatatcaacttccttagcagaattcattaaatactggtgcttcgtttggaactggagtaaatctgaggtttctgccattctttataaagccggagagtgcatgcaggagcttctgaaatcatggaaagattttgaagcaactcaggaggctacaaatgttgaaagtctacaaaacggtcctactcttgaaattcggatacctgccgaatttgttacttccactaatcgtcaagtaaagggtgctcaactttggggaacagatatatatacaaatgattcagatcttgtggctgtgctaatgcatactggctattgctcgcctacgtcctcccctcccccatctgccatccaagagcttcatgcaactgttcaagttctaccaccacaagagagttatacttcaacattgaggaacaacgtacgctcacgtgcttggggtgctgggattggttgtagcttccgcatagaacgctgctgcatagttaagaaaggcggtggcaccattgatcttgaaccacgccttagtcacacatcagctgtggagcctacacttgctccagttgcggttgagcgcacaatgacgacaagagctgcagcttccaatgcattgcgacaacaaagatttgtccgtgaagtgacaatacagtacaacctctgcaacgagccatggttaaaatatagtataagcattgtggcagacaagggattgaaaaagtcactttatacttctgctagactgaagaaaggagaagtaatatatttggagacacattttaatagtctccacaggtacgagctgtgcttcagtggagagaagcctcggggtattggatcgagctctaatgcatctgatgcagaacctgagaaacaccagagcagtagtcaccattcgcaaaacggctctgtggagcatgaactccgggatgtgttccgatggtcccggtgtaagaaggccatgcctgaaagtgccatgcgctccactggtatcccactaccagcagatcagctcgaggtgttgcaggataacctagaatgggaggacgtgcagtggtcgcagaccggtgtttgggtggctgggaaggagtatcccctcgcccgagttcacttcctctccgggaactagcagcagctgatgttgcagccaacgaaggagctatcgtttcctgtggacaggagaggagcttgccaacattgtaggtttttttttttgctactgtataatgtatgatgcaccctgtcatgtgtacaaagaaagctcaactgttgtaggctgtttgtgttgtgtggcattctactagtagtagtcttcacattaaccatatttgttagggttgcttgctcctgcccatgcctgaaagatatattgttggttttaggtcctgataaaataattggcgatttgtaacttaagattagtattgacattaattcaaggtagtaaacaaaccataactctaattttgtatattgacatactgttctgtggatgtcttcagttgctatggagaggcaccgtttattttctttttttttctgtgagaatgaggcagttcacaatgctgcagaatgaggcagttcacgatgctggatgtcaaagcttacggaataaccccttttccggctgcaatttatgcgacgatctagctaagatcgactaaaaaggaaaccatatagccgaacacttgagatgctccagcccactgtctcttttaaataagctagttgttggaagcctgttgacacgattcacttgtctgacgagaaaaatagaacttggcagca

SEQ ID NO: 27275 - DNA, 3231 bp, Zea Mays
ggcgtctccactcgcgctcgcgcaccgcttggcctctcctccgccgcctcccacttccgtgctccccgctccggcgaattggtgcccacctgcgagctcgccccgttatagtgcactgcattaaaggcactgcgatccttccttttgtatctgggttattcttgaagaattaattttcactctggaggaaaaatgagtggtcctccaaagaggttgcatgaggagagtagccactctacacctgcaaagcggcctttggacgacaacagcttgtactcaagcccttctgggaaagctattcagtcaagcagcagtgatttccatggtttttttgaacatgatggtagatttgccaaaattcaacgtgttgaggctcgtgatgataagaggccaccccttgtccatcggatgcatggtagctccaactttgttgatcacaccgtcttgtctgacagcagattagaaccaaagcacaataaagatacaagggacaataaggcggatgatcgtgacacaaaagctgatgctcgggatgtctatagtgatcccagtattgagtttcagtttaataaaattgacagtgatgtaaaaatagacaatagagctgatggaaatgaaataagggctgacaggaggggtcaccacgattacaaaggtgatactaaatttgacaaggataatcatcctattgttgcatcgagcttaggctggaaagacaacaaagaacataggggcaaaaggtactttgagcagccatctgataatgcggattggcgtttcccccgtcccggtttgcaaggtactgatgaaactctcaaaggtctaacttccatggaagaccgtaattcaagagatgcacatgattctgcttttgacaacaaagctgaatcaaaaggtgaagataagtttagagacaaggataggaaaaagaaggatgagaaacatagagactttggttcaagagaaggtgagagaaatgatcgtcggaccggtatccagcttggaggtagtggagttgagcgaagagaaatgcaaagggaagagagggatgctgaaaaatgggacagggaaagaaaagattccttgagagacaaggaaggcaatgatagggaaaaggattctgctaagaaagatccatctatggtaatggaaaaggataacacaatagttgaaaaacttttatctgatggacctgttaaaaatgctgaacatgagaatacaacaacagaaactaaggtgcttaaggacgatgcatggaaaggtcatgacagggatcctaaagacaagaaaagagagaaggatttggatgcaggagacaggcatgagcaaagaagcaaatataatgacaaggaatcagatgataatggcaccgaaggtgatacagaaaaagataaagatgtttttggaagtgttcaacgcaggaggatggtgcgaccaaggggaggtggtagccaagcatctcaacgtgatccccgatttcgatcccgaacgcgtgatggcgaagggtaaatctgaggtttctgccattctttataaagccggagagtgcatgcaggagcttctgaaatcatggaaagattttgaagcaactcaggaggctacaaatgttgaaagtctacaaaacggtcctactcttgaaattcggatacctgccgaatttgttacttccactaatcgtcaagtaaagggtgctcaactttggggaacagatatatatacaaatgattcagatcttgtggctgtgctaatgcatactggctattgctcgcctacgtcctcccctcccccatctgccatccaagagcttcatgcaactgttcaagttctaccaccacaagagagttatacttcaacattgaggaacaacgtacgctcacgtgcttggggtgctgggattggttgtagcttccgcatagaacgctgctgcatagttaagaaaggcggtggcaccattgatcttgaaccacgccttagtcacacatcagctgtggagcctacacttgctccagttgcggttgagcgcacaatgacgacaagagctgcagcttccaatgcattgcgacaacaaagatttgtccgtgaagtgacaatacagtacaacctctgcaacgagccatggttaaaatatagtataagcattgtggcagacaagggattgaaaaagtcactttatacttctgctagactgaagaaaggagaagtaatatatttggagacacattttaatagtctccacaggtacgagctgtgcttcagtggagagaagcctcggggtattggatcgagctctaatgcatctgatgcagaacctgagaaacaccagagcagtagtcaccattcgcaaaacggctctgtggagcatgaactccgggatgtgttccgatggtcccggtgtaagaaggccatgcctgaaagtgccatgcgctccactggtatcccactaccagcagatcagctcgaggtgttgcaggataacctagaatgggaggacgtgcagtggtcgcagaccggtgtttgggtggctgggaaggagtatcccctcgcccgagttcacttcctctccgggaactagcagcagctgatgttgcagccaacgaaggagctatcgtttcctgtggacaggagaggagcttgccaacattgtaggtttttttttttgctactgtataatgtatgatgcaccctgtcatgtgtacaaagaaagctcaactgttgtaggctgtttgtgttgtgtggcattctactagtagtagtcttcacattaaccatatttgttagggttgcttgctcctgcccatgcctgaaagatatattgttggttttaggtcctgataaaataattggcgatttgtaacttaagattagtattgacattaattcaaggtagtaaacaaaccataactctaattttgtatattgacatactgttctgtggatgtcttcagttgctatggagaggcaccgtttattttctttttttttctgtgagaatgaggcagttcacaatgctgcagaatgaggcagttcacgatgctggatgtcaaagcttacggaataaccccttttccggctgcaatttatgcgacgatctagctaagatcgactaaaaaggaaaccatatagccgaacacttgagatgctccagcccactgtctcttttaaataagctagttgttggaagcctgttgacacgattcacttgtctgacgagaaaaatagaacttggcagca

SEQ ID NO: 27276 - DNA, 3295 bp, Zea Mays
gtcagctctgtagaaggcggcccgcacaccagagcgttcgaccccacccggtgccgggcgtctccactcgcgctcgcgcaccgcttggcctctcctccgccgcctcccacttccgtgctccccgctccggcgaattggtgcccacctgcgagctcgccccgttatagtgcactgcattaaaggcactgcgatccttccttttgtatctgggttattcttgaagaattaattttcactctggaggaaaaatgagtggtcctccaaagaggttgcatgaggagagtagccactctacacctgcaaagcggcctttggacgacaacagcttgtactcaagcccttctgggaaagctattcagtcaagcagcagtgatttccatggtttttttgaacatgatggtagatttgccaaaattcaacgtgttgaggctcgtgatgataagaggccaccccttgtccatcggatgcatggtagctccaactttgttgatcacaccgtcttgtctgacagcagattagaaccaaagcacaataaagatacaagggacaataaggcggatgatcgtgacacaaaagctgatgctcgggatgtctatagtgatcccagtattgagtttcagtttaataaaattgacagtgatgtaaaaatagacaatagagctgatggaaatgaaataagggctgacaggaggggtcaccacgattacaaaggtgatactaaatttgacaaggataatcatcctattgttgcatcgagcttaggctggaaagacaacaaagaacataggggcaaaaggtactttgagcagccatctgataatgcggattggcgtttcccccgtcccggtttgcaaggtactgatgaaactctcaaaggtctaacttccatggaagaccgtaattcaagagatgcacatgattctgcttttgacaacaaagctgaatcaaaaggtgaagataagtttagagacaaggataggaaaaagaaggatgagaaacatagagactttggttcaagagaaggtgagagaaatgatcgtcggaccggtatccagcttggaggtagtggagttgagcgaagagaaatgcaaagggaagagagggatgctgaaaaatgggacagggaaagaaaagattccttgagagacaaggaaggcaatgatagggaaaaggattctgctaagaaagatccatctatggtaatggaaaaggataacacaatagttgaaaaacttttatctgatggacctgttaaaaatgctgaacatgagaatacaacaacagaaactaaggtgcttaaggacgatgcatggaaaggtcatgacagggatcctaaagacaagaaaagagagaaggatttggatgcaggagacaggcatgagcaaagaagcaaatataatgacaaggaatcagatgataatggcaccgaaggtgatacagaaaaagataaagatgtttttggaagtgttcaacgcaggaggatggtgcgaccaaggggaggtggtagccaagcatctcaacgtgatccccgatttcgatcccgaacgcgtgatggcgaaggggctcaaggtaaatctgaggtttctgccattctttataaagccggagagtgcatgcaggagcttctgaaatcatggaaagattttgaagcaactcaggaggctacaaatgttgaaagtctacaaaacggtcctactcttgaaattcggatacctgccgaatttgttacttccactaatcgtcaagtaaagggtgctcaactttggggaacagatatatatacaaatgattcagatcttgtggctgtgctaatgcatactggctattgctcgcctacgtcctcccctcccccatctgccatccaagagcttcatgcaactgttcaagttctaccaccacaagagagttatacttcaacattgaggaacaacgtacgctcacgtgcttggggtgctgggattggttgtagcttccgcatagaacgctgctgcatagttaagaaaggcggtggcaccattgatcttgaaccacgccttagtcacacatcagctgtggagcctacacttgctccagttgcggttgagcgcacaatgacgacaagagctgcagcttccaatgcattgcgacaacaaagatttgtccgtgaagtgacaatacagtacaacctctgcaacgagccatggttaaaatatagtataagcattgtggcagacaagggattgaaaaagtcactttatacttctgctagactgaagaaaggagaagtaatatatttggagacacattttaatagtctccacaggtacgagctgtgcttcagtggagagaagcctcggggtattggatcgagctctaatgcatctgatgcagaacctgagaaacaccagagcagtagtcaccattcgcaaaacggctctgtggagcatgaactccgggatgtgttccgatggtcccggtgtaagaaggccatgcctgaaagtgccatgcgctccactggtatcccactaccagcagatcagctcgaggtgttgcaggataacctagaatgggaggacgtgcagtggtcgcagaccggtgtttgggtggctgggaaggagtatcccctcgcccgagttcacttcctctccgggaactagcagcagctgatgttgcagccaacgaaggagctatcgtttcctgtggacaggagaggagcttgccaacattgtaggtttttttttttgctactgtataatgtatgatgcaccctgtcatgtgtacaaagaaagctcaactgttgtaggctgtttgtgttgtgtggcattctactagtagtagtcttcacattaaccatatttgttagggttgcttgctcctgcccatgcctgaaagatatattgttggttttaggtcctgataaaataattggcgatttgtaacttaagattagtattgacattaattcaaggtagtaaacaaaccataactctaattttgtatattgacatactgttctgtggatgtcttcagttgctatggagaggcaccgtttattttctttttttttctgtgagaatgaggcagttcacaatgctgcagaatgaggcagttcacgatgctggatgtcaaagcttacggaataaccccttttccggctgcaatttatgcgacgatctagctaagatcgactaaaaaggaaaccatatagccgaacacttgagatgctccagcccactgtctcttttaaataagctagttgttggaagcctgttgacacgattcacttgtctgacgagaaaaatagaacttggcagca

SEQ ID NO: 27277 - DNA, 687 bp, Zea Mays
ccagggtccactgctcctctcgtactcaacaaccctcacaccccccatggatcccatgttcagtagcgagtggagtgtctccgagatcaagatggcaaaatcactcatcgctagccgcaacaccagcagcaacttagctagcgacgacgacgcaagcaacaagaagcacagcgacatcgtggacgagctccaagcaaggttcccatggaagggcaagcacgagtggaggaacaaccacagatgaaatacactgggaggttttggaccagggaggagcacaggaatttcctccgtggcctgaacatgtatggtcgtggtaactggatgtacatctctagggacttcgtccccactaagacgccaatgcagatctatagccatgcacagaagttcttccgtaggtaggagcgcacctgcagctggaagcaacgccatgatatcaaatgatattggcctctatgatatgctgagccctagacaaataacggctcttagtttatctcaagatattgtccattatactataaagatatccttcctcggcagtggacggacatcaataacatgtactagttgttatttgtcgtttagtttatcctaagatgcatagggacatatatcccattgaagacaatatatatatagttgctaagtgcctaagtggtagtactgtgttctatattgaga

SEQ ID NO: 27278 - DNA, 1133 bp, Zea Mays
ccgccttcaaaaccaccatggtggggttgtttgaatgttagaggtaccccagaaaaattattcatttgcacaaatatcttggtatggtctaaggtggattttgagtttccttcttatggaaggcatgacacactttttccactacaatgcctttgtagtaagccggctatggcagcagttatccccttttgaggttttcatcatcagttatggggtgttaaactttatgtggttgaaattctttcttatttggcgctacttccggttttggtcactggttggaggagtcgagactcctgaaaacatgccaaggtgtataaataattgccatgatctggagagtttctggaaaagctggcatgcttcttttaataaatggttggttaggtacttatacattcctcttggtggttctcaaagaaaactactgagtatctgggtgatattcacgtttgtagcagtgtggcatgatctagaatggaaacttatctcatgggcatggttgacttgcttatttttcattccagagatattggttaaatctctgtccagcaaatttcaggcaactagttcccttgggatgcttgttcaccgtgaatttaaagcaattgctggtgcagtgacaatcagctgtcttatggtggcaaatcttgttggttacgtcgtggggccatccgggattaaagttctgatatcaagaatggctgggaaggatgccctgccttcccttgccttcatatttactacgttctacgtgggcgttaagcttatgttccatatacgggatgctagcaagaaccaaggttgagggagctttaagatgatgtctccagttttgactcgcaagcaagcagatggcttcgccgtggctgaagatgatagcttcgtcttttttgtttgcatattttgtttttgttttctaaacagtgtcgagagaacatcagcgctataagcgttgacatgtgattttgcttttagaatatataaaggtaaaggctgactcattagcgtggtgaatgttgaagttgcacactgctatacgtccggttgtaaccatgatcgacgtgattcatctggctcaaatgcatatgcgaatttaatgtgttgctaaaccaactttgaaccttggtttc

SEQ ID NO: 27279 - DNA, 1515 bp, Zea Mays
caaaatggtgtaatacaggttattatggaaatatattacactttgctacaagttatatatactatcttcaacaggggtaaaaatgtaaaatcatcttttcttatgaaagttaacaccgttagaggtcagaattaacggtagtgtcatatagtgaaccaaatttacgtctaatgtcaaataggtaaaatttatattttgagggccaagaaaggaaccatgaactttactagtgtcaaataagaaattgtctccaaggaatcaggcctctcatgagaagatattggaagaagacttactaaggaatggaaagagggctcagtcttgacagatatacatttcttatgtatttatgctacttgacatatgctccagtgtatattgctggacctattgttggatacaatgcatttgctgctcagttagaggtaccccagaaaaattattcatttgcacaaatatcttggtatggtctaaggtggattttgagtttccttcttatggaaggcatgacacactttttccactacaatgcctttgtagtaagccggctatggcagcagttatccccttttgaggttttcatcatcagttatggggtgttaaactttatgtggttgaaattctttcttatttggcgctacttccggttttggtcactggttggaggagtcgagactcctgaaaacatgccaaggtgtataaataattgccatgatctggagagtttctggaaaagctggcatgcttcttttaataaatggttggttaggtacttatacattcctcttggtggttctcaaagaaaactactgagtatctgggtgatattcacgtttgtagcagtgtggcatgatctagaatggaaacttatctcatgggcatggttgacttgcttatttttcattccagagatattggttaaatctctgtccagcaaatttcaggcaactagttcccttgggatgcttgttcaccgtgaatttaaagcaattgctggtgcagtgacaatcagctgtcttatggtggcaaatcttgttggttacgtcgtggggccatccgggattaaagttctgatatcaagaatggctgggaaggatgccctgccttcccttgccttcatatttactacgttctacgtgggcgttaagcttatgttccatatacgggatgctagcaagaaccaaggttgagggagctttaagatgatgtctccagttttgactcgcaagcaagcagatggcttcgccgtggctgaagatgatagcttcgtcttttttgtttgcatattttgtttttgttttctaaacagtgtcgagagaacatcagcgctataagcgttgacatgtgattttgcttttagaatatataaaggtaaaggctgactcattagcgtggtgaatgttgaagttgcacactgctatacgtccggttgtaaccatgatcgacgtgattcatctggctcaaatgcatatgcgaatttaatgtgttgctaaaccaactttgaaccttggtttc

SEQ ID NO: 27280 - DNA, 2069 bp, Zea Mays
gccttctaggcttccactctcaccgcagtcgccggtgtcgcctccgcctggatcgtccgccactgccagctgccattccgcctcggatctgagtcgccttgctgcctctgcgcccggacacagccgcgcattccccaccggctcgccgagcaggggccctgctcccacgctgctcactctccccaatttcccacgcacgcctagcgaggtcgggggttgaggtctggcggagatgggcggcgtgccctggaaccgggtggaacttacgctgctcgtactctacgcgctgggcttctacctcgtcgtgatctggaggtcgcttcgcctctcgcacgaatattccgggaggctctacggactacgcgtgggatcacttgcgggtcatctgaatgacctgtcggatgcgcaatggagaaacttccgcgggaacttgccaattctgactgttgtaatgggagcatttctgattctggtcaatacgttgagatattgctatggcctgaaaggtcgaggtactgctttgttgtggctcatactgtctttgagctatttatgctatcttcacggtgcttgtgttgtttttgttcttttaattgcactgattaattactcaatagtgaagctatttgctcattataagtattgcacaagtctcatttggagcttcaacttatctgttcttattcttaaccgagtttatgaaggatattcattctcattgttcggtcaaaatatggcttttctagacaactatcggggtacattcaggtggcacatatgcttcaattttgttgtattacggatgattagctttggatgtgattactgctggacaattcattcttctcattttgacttcaagaaacatatgcaaagatgtcaggtttgttattctggaaagacatgctactttgctttgcaggaaagagggctcagtcttgacagatatacatttcttatgtatttatgctacttgacatatgctccagtgtatattgctggacctattgttggatacaatgcatttgctgctcagttagaggtaccccagaaaaattattcatttgcacaaatatcttggtatggtctaaggtggattttgagtttccttcttatggaaggcatgacacactttttccactacaatgcctttgtagtaagccggctatggcagcagttatccccttttgaggttttcatcatcagttatggggttggaggagtcgagactcctgaaaacatgccaaggtgtataaataattgccatgatctggagagtttctggaaaagctggcatgcttcttttaataaatggttggttaggtacttatacattcctcttggtggttctcaaagaaaactactgagtatctgggtgatattcacgtttgtagcagtgtggcatgatctagaatggaaacttatctcatgggcatggttgacttgcttatttttcattccagagatattggttaaatctctgtccagcaaatttcaggcaactagttcccttgggatgcttgttcaccgtgaatttaaagcaattgctggtgcagtgacaatcagctgtcttatggtggcaaatcttgttggttacgtcgtggggccatccgggattaaagttctgatatcaagaatggctgggaaggatgccctgccttcccttgccttcatatttactacgttctacgtgggcgttaagcttatgttccatatacgggatgctagcaagaaccaaggttgagggagctttaagatgatgtctccagttttgactcgcaagcaagcagatggcttcgccgtggctgaagatgatagcttcgtcttttttgtttgcatattttgtttttgttttctaaacagtgtcgagagaacatcagcgctataagcgttgacatgtgattttgcttttagaatatataaaggtaaaggctgactcattagcgtggtgaatgttgaagttgcacactgctatacgtccggttgtaaccatgatcgacgtgattcatctggctcaaatgcatatgcgaatttaatgtgttgctaaaccaactttgaaccttggtttc

SEQ ID NO: 27281 - DNA, 2137 bp, Zea Mays
gccttctaggcttccactctcaccgcagtcgccggtgtcgcctccgcctggatcgtccgccactgccagctgccattccgcctcggatctgagtcgccttgctgcctctgcgcccggacacagccgcgcattccccaccggctcgccgagcaggggccctgctcccacgctgctcactctccccaatttcccacgcacgcctagcgaggtcgggggttgaggtctggcggagatgggcggcgtgccctggaaccgggtggaacttacgctgctcgtactctacgcgctgggcttctacctcgtcgtgatctggaggtcgcttcgcctctcgcacgaatattccgggaggctctacggactacgcgtgggatcacttgcgggtcatctgaatgacctgtcggatgcgcaatggagaaacttccgcgggaacttgccaattctgactgttgtaatgggagcatttctgattctggtcaatacgttgagatattgctatggcctgaaaggtcgaggtactgctttgttgtggctcatactgtctttgagctatttatgctatcttcacggtgcttgtgttgtttttgttcttttaattgcactgattaattactcaatagtgaagctatttgctcattataagtattgcacaagtctcatttggagcttcaacttatctgttcttattcttaaccgagtttatgaaggatattcattctcattgttcggtcaaaatatggcttttctagacaactatcggggtacattcaggtggcacatatgcttcaattttgttgtattacggatgattagctttggatgtgattactgctggacaattcattcttctcattttgacttcaagaaacatatgcaaagatgtcaggtttgttattctggaaagacatgctactttgctttgcaggaaagagggctcagtcttgacagatatacatttcttatgtatttatgctacttgacatatgctccagtgtatattgctggacctattgttggatacaatgcatttgctgctcagttagaggtaccccagaaaaattattcatttgcacaaatatcttggtatggtctaaggtggattttgagtttccttcttatggaaggcatgacacactttttccactacaatgcctttgtagtaagccggctatggcagcagttatccccttttgaggttttcatcatcagttatgggtacaggtgttaaactttatgtggttgaaattctttcttatttggcgctacttccggttttggtcactggttggaggagtcgagactcctgaaaacatgccaaggtgtataaataattgccatgatctggagagtttctggaaaagctggcatgcttcttttaataaatggttggttaggtacttatacattcctcttggtggttctcaaagaaaactactgagtatctgggtgatattcacgtttgtagcagtgtggcatgatctagaatggaaacttatctcatgggcatggttgacttgcttatttttcattccagagatattggttaaatctctgtccagcaaatttcaggcaactagttcccttgggatgcttgttcaccgtgaatttaaagcaattgctggtgcagtgacaatcagctgtcttatggtggcaaatcttgttggttacgtcgtggggccatccgggattaaagttctgatatcaagaatggctgggaaggatgccctgccttcccttgccttcatatttactacgttctacgtgggcgttaagcttatgttccatatacgggatgctagcaagaaccaaggttgagggagctttaagatgatgtctccagttttgactcgcaagcaagcagatggcttcgccgtggctgaagatgatagcttcgtcttttttgtttgcatattttgtttttgttttctaaacagtgtcgagagaacatcagcgctataagcgttgacatgtgattttgcttttagaatatataaaggtaaaggctgactcattagcgtggtgaatgttgaagttgcacactgctatacgtccggttgtaaccatgatcgacgtgattcatctggctcaaatgcatatgcgaatttaatgtgttgctaaaccaactttgaaccttggtttc

SEQ ID NO: 27282 - DNA, 2679 bp, Zea Mays
ctcttctacctcgccttctaggcttccactctcaccgcagtcgccggtgtcgcctccgcctggatcgtccgccactgccagctgccattccgcctcggatctgagtcgccttgctgcctctgcgcccggacacagccgcgcattccccaccggctcgccgagcaggggccctgctcccacgctgctcactctccccaatttcccacgcacgcctagcgaggtcgggggttgaggtctggcggagatgggcggcgtgccctggaaccgggtggaacttacgctgctcgtactctacgcgctgggcttctacctcgtcgtgatctggaggtcgcttcgcctctcgcacgaatattccgggaggctctacggactacgcgtgggatcacttgcgggtcatctgaatgacctgtcggatgcgcaatggagaaacttccgcgggaacttgccaattctgactgttgtaatgggagcatttctgattctggtcaatacgttgagatattgctatggcctgaaaggtcgagctatttgctcattataagtattgcacaagtctcatttggagcttcaacttatctgttcttattcttaaccgagtttatgaaggatattcattctcattgttcggtcaaaatatggcttttctagacaactatcggggtacattcaggtggcacatatgcttcaattttgttgtattacggatgattagctttggatgtgattactgctggacaattcattcttctcattttgacttcaagaaacatatgcaaagatgtcaggtttgttattctggaaagacatgctactttgctttgcaggaaagagggctcagtcttgacagatatacatttcttatgtatttatgctacttgacatatgctccagtgtatattgctggacctattgttggatacaatgcatttgctgctcagttagaggtaccccagaaaaattattcatttgcacaaatatcttggtatggtctaaggtggattttgagtttccttcttatggaaggcatgacacactttttccactacaatgcctttgtagtaagccggctatggcagcagttatccccttttgaggttttcatcatcagttatggggtaagattatagattattcgtaaggtcctgttaatgtgctccaggccttctgggttgtcacttatggcactttatttgtgtcccctcctaagtcagtgtgcagcaattgacatttccgttgttctttatttgctttctttattctattcattgatttttgccactcacaatgttgtcttcttgacttcttgttataattaccactgtgtctatgaattgtgggtccagctgggtctatgaaatgtgagcctgatagcaattttacaaatctgtttcttgctgatggcaaatatcagaatctctcactgattacctgcatacattgttcttgaggtatcacctaggcgtccgggcagtggctgctcgccttggatatttgctgcctgggcatttcttagcctgcctaggtggctggaagttgtctgctcgccttggtcacgcatcacgtcttaaaacccatgcctgcatataagttttcttgcaccacctatgggagcatcacagcattatattttttgtttaataagtgtcttggttgctatggttccctactttaaataagtgttatgtatcttttcttgtctgacatagcgagtgctttattgatttatcaatcccattgacttctcaaactttccagtacaggtgttaaactttatgtggttgaaattctttcttatttggcgctacttccggttttggtcactggttggaggagtcgagactcctgaaaacatgccaaggtgtataaataattgccatgatctggagagtttctggaaaagctggcatgcttcttttaataaatggttggttaggtacttatacattcctcttggtggttctcaaagaaaactactgagtatctgggtgatattcacgtttgtagcagtgtggcatgatctagaatggaaacttatctcatgggcatggttgacttgcttatttttcattccagagatattggttaaatctctgtccagcaaatttcaggcaactagttcccttgggatgcttgttcaccgtgaatttaaagcaattgctggtgcagtgacaatcagctgtcttatggtggcaaatcttgttggttacgtcgtggggccatccgggattaaagttctgatatcaagaatggctgggaaggatgccctgccttcccttgccttcatatttactacgttctacgtgggcgttaagcttatgttccatatacgggatgctagcaagaaccaaggttgagggagctttaagatgatgtctccagttttgactcgcaagcaagcagatggcttcgccgtggctgaagatgatagcttcgtcttttttgtttgcatattttgtttttgttttctaaacagtgtcgagagaacatcagcgctataagcgttgacatgtgattttgcttttagaatatataaaggtaaaggctgactcattagcgtggtgaatgttgaagttgcacactgctatacgtccggttgtaaccatgatcgacgtgattcatctggctcaaatgcatatgcgaatttaatgtgttgctaaaccaactttgaaccttggtttc

SEQ ID NO: 27283 - DNA, 3070 bp, Zea Mays
ctcttctacctcgccttctaggcttccactctcaccgcagtcgccggtgtcgcctccgcctggatcgtccgccactgccagctgccattccgcctcggatctgagtcgccttgctgcctctgcgcccggacacagccgcgcattccccaccggctcgccgagcaggggccctgctcccacgctgctcactctccccaatttcccacgcacgcctagcgaggtcgggggttgaggtctggcggagatgggcggcgtgccctggaaccgggtggaacttacgctgctcgtactctacgcgctgggcttctacctcgtcgtgatctggaggtcgcttcgcctctcgcacgaatattccgggaggctctacggactacgcgtgggatcacttgcgggtcatctgaatgacctgtcggatgcgcaatggagaaacttccgcgggaacttgccaattctgactgttgtaatgggagcatttctgattctggtcaatacgttgagatattgctatggcctgaaaggtcgaggtactgctttgttgtggctcatactgtctttgagctatttatgctatcttcacggtgcttgtgttgtttttgttcttttaattgcactgattaattactcaatagtgaagctatttgctcattataagtattgcacaagtctcatttggagcttcaacttatctgttcttattcttaaccgagtttatgaaggatattcattctcattgttcggtcaaaatatggcttttctagacaactatcggggtacattcaggtggcacatatgcttcaattttgttgtattacggatgattagctttggatgtgattactgctggacaattcattcttctcattttgacttcaagaaacatatgcaaagatgtcaggtttgttattctggaaagacatgctactttgctttgcaggaaagagggctcagtcttgacagatatacatttcttatgtatttatgctacttgacatatgctccagtgtatattgctggacctattgttggatacaatgcatttgctgctcaggtcctggagcctacgagaggcattggggtctggctggagaactgctagattgagccaatgcatcttgacgctgcagccactggcctgacgagcaccgtgccgccgtttgcaagaggggggtgagcaccatcttctctttcactgtggtcctcgtgctcaccatgtccgacaatgcaggtggcagcatccatggagacaacgatgaacctggagccggagtatcttcctcgtggttcttgtagttgtggatgcagggcatgagcttgtagattttgtcatccactgtggccagcggaagggcaacaggcacagtggccatcggagatctgggttgtgcaggaaacagcagttgagcaaagttgataaggcataaatgatatatggggtcttaacgtaagagatggagatgagaaagatattatttgttgactcaaagttatgccaccatccttttaatatgccacatcagcataaccgccttcaaaaccaccatggtggggttgtttgaatggtatgggatactttaagtttacaatacctggtttcatagttgagggggttatgtagtcaaccatcgaaacatttgggggttatatagactttttgagtttgtaaggaataggcctgtctataactcggcagcagtttagtctggaatttctttcaaaataaggaaatatgaaagagactttgatttcaatctagatatagataattgtaatataccactaatcatcatgaataccttttgtactcttctttgtttaagttacctcaaatgtcacaaggtgacttaagaaactgtgaggccgagttttggagaggaatttcaactgtgcttcatgtagcagttgaatagtggcattatatggaaatgtcctagtagttacacatactaacctgtttttgatgtagcgatcttgcagttagaggtaccccagaaaaattattcatttgcacaaatatcttggtatggtctaaggtggattttgagtttccttcttatggaaggcatgacacactttttccactacaatgcctttgtagtaagccggctatggcagcagttatccccttttgaggttttcatcatcagttatggggtgttaaactttatgtggttgaaattctttcttatttggcgctacttccggttttggtcactggttggaggagtcgagactcctgaaaacatgccaaggtgtataaataattgccatgatctggagagtttctggaaaagctggcatgcttcttttaataaatggttggttaggtacttatacattcctcttggtggttctcaaagaaaactactgagtatctgggtgatattcacgtttgtagcagtgtggcatgatctagaatggaaacttatctcatgggcatggttgacttgcttatttttcattccagagatattggttaaatctctgtccagcaaatttcaggcaactagttcccttgggatgcttgttcaccgtgaatttaaagcaattgctggtgcagtgacaatcagctgtcttatggtggcaaatcttgttggttacgtcgtggggccatccgggattaaagttctgatatcaagaatggctgggaaggatgccctgccttcccttgccttcatatttactacgttctacgtgggcgttaagcttatgttccatatacgggatgctagcaagaaccaaggttgagggagctttaagatgatgtctccagttttgactcgcaagcaagcagatggcttcgccgtggctgaagatgatagcttcgtcttttttgtttgcatattttgtttttgttttctaaacagtgtcgagagaacatcagcgctataagcgttgacatgtgattttgcttttagaatatataaaggtaaaggctgactcattagcgtggtgaatgttgaagttgcacactgctatacgtccggttgtaaccatgatcgacgtgattcatctggctcaaatgcatatgcgaatttaatgtgttgctaaaccaactttgaaccttggtttc

SEQ ID NO: 27284 - DNA, 2181 bp, Zea Mays
aaataccaacatccaacggccagcagctcttctacctcgccttctaggcttccactctcaccgcagtcgccggtgtcgcctccgcctggatcgtccgccactgccagctgccattccgcctcggatctgagtcgccttgctgcctctgcgcccggacacagccgcgcattccccaccggctcgccgagcaggggccctgctcccacgctgctcactctccccaatttcccacgcacgcctagcgaggtcgggggttgaggtctggcggagatgggcggcgtgccctggaaccgggtggaacttacgctgctcgtactctacgcgctgggcttctacctcgtcgtgatctggaggtcgcttcgcctctcgcacgaatattccgggaggctctacggactacgcgtgggatcacttgcgggtcatctgaatgacctgtcggatgcgcaatggagaaacttccgcgggaacttgccaattctgactgttgtaatgggagcatttctgattctggtcaatacgttgagatattgctatggcctgaaaggtcgaggtactgctttgttgtggctcatactgtctttgagctatttatgctatcttcacggtgcttgtgttgtttttgttcttttaattgcactgattaattactcaatagtgaagctatttgctcattataagtattgcacaagtctcatttggagcttcaacttatctgttcttattcttaaccgagtttatgaaggatattcattctcattgttcggtcaaaatatggcttttctagacaactatcggggtacattcaggtggcacatatgcttcaattttgttgtattacggatgattagctttggatgtgattactgctggacaattcattcttctcattttgacttcaagaaacatatgcaaagatgtcaggtttgttattctggaaagacatgctactttgctttgcaggaaagagggctcagtcttgacagatatacatttcttatgtatttatgctacttgacatatgctccagtgtatattgctggacctattgttggatacaatgcatttgctgctcagcgatcttgcagttagaggtaccccagaaaaattattcatttgcacaaatatcttggtatggtctaaggtggattttgagtttccttcttatggaaggcatgacacactttttccactacaatgcctttgtagtaagccggctatggcagcagttatccccttttgaggttttcatcatcagttatggggtgttaaactttatgtggttgaaattctttcttatttggcgctacttccggttttggtcactggttggaggagtcgagactcctgaaaacatgccaaggtgtataaataattgccatgatctggagagtttctggaaaagctggcatgcttcttttaataaatggttggttaggtacttatacattcctcttggtggttctcaaagaaaactactgagtatctgggtgatattcacgtttgtagcagtgtggcatgatctagaatggaaacttatctcatgggcatggttgacttgcttatttttcattccagagatattggttaaatctctgtccagcaaatttcaggcaactagttcccttgggatgcttgttcaccgtgaatttaaagcaattgctggtgcagtgacaatcagctgtcttatggtggcaaatcttgttggttacgtcgtggggccatccgggattaaagttctgatatcaagaatggctgggaaggatgccctgccttcccttgccttcatatttactacgttctacgtgggcgttaagcttatgttccatatacgggatgctagcaagaaccaaggttgagggagctttaagatgatgtctccagttttgactcgcaagcaagcagatggcttcgccgtggctgaagatgatagcttcgtcttttttgtttgcatattttgtttttgttttctaaacagtgtcgagagaacatcagcgctataagcgttgacatgtgattttgcttttagaatatataaaggtaaaggctgactcattagcgtggtgaatgttgaagttgcacactgctatacgtccggttgtaaccatgatcgacgtgattcatctggctcaaatgcatatgcgaatttaatgtgttgctaaaccaactttgaaccttggtttc

SEQ ID NO: 27285 - DNA, 3989 bp, Zea Mays
atgtcggcgtccgtcgacgccgcgtcggcagtagcggtgccggcggtgccccccgcggtggaggaggccggcggcgcggtggagcaggccaggacgctcatcgcagcgctcaacctgctctctcgcaacctaccgctgccccctgatgtcatgcgcgccgtctcgtccatctaccacgacgggggtgccggcgacagggcgggggaggaggagaagggaggggacgaggagatgccggccgcggatggggcggccgaggggaactgctcggtgtacgccgctggcggcgcgaccgaggggaccaccttgattgaagagcttgaagatgcaatattgaagaatcaaagaacgcccataacctactcagaattggcagcaatacgagaagggcggttcaatgcatccattcagcatcgactagctgaacttgaaggattaccttctactaggggtgaagacttgcaaatgaaatgtttgcttgaattgtatgggctaaagttgttagacttacagaagaaagttcggtcagatatcagtgctgagtattggctacaaaagaaatgtgcatatcctgagaggcaactcttcgattgggggatgatgcggatacggcatcctttttccatgtatggaataggagatagcttttcagtggatgttgatgatgttcaccgcagaaagagattcacagagaggatgtcaagacttgaggaggaaggaaaaaatcaggcagatatcaggaagaggaagttctttgcagaaattctcaatgcttctagagaacaccaggtgcaattagggactactttcaaacaaagaaagcagcggaatgatggcgttatggcatggcatgttcgggcacgccaacgtattacacggcaagaaaaaagcagaattaatcttctgaaaactggtgatcaagaagcatatatgaggatggttgaagagagcaagaatgaacgcttgaaaatgctccttgataaaacaaatgagcttcttgaaggaattggaaaagctgtacagcgacaaaaagatgctgaacatgttagtaagccagaaggagggagtgaagtgccaaaagggtcagaatctgaggattgttctcaaatttcgggcatcaagagtgaatcagctgaggagtctccttcagatgacgatggagacctccctggccctgcagatgaaagtaaattcaatgcaggacgtagacttgattttactgttcattctattgaagaaaaggtaacagaacaaccatctgctctcgaaggtggtgaattgagaccatatcagctagaaggtctccaatggatgctttctctatttaacaacaatttgaatggcattctggctgatgaaatgggtttggggaagacaattcaaaccatagctttgatcgcttatctgttggaaaagaaggaggttgcaggaccacacttaataattgctccaaaagcagtattaccaaattggtctaatgaattcaaaacttgggctcccagcattgggacaattctttatgatggccgtccagaggaaaggaggctgttaagggataagaattttgacggagagcaatttaatgttttgctcacacattatgacctgatactgaaagataagaagttcctaaagaaggttcactggcattatttgattgttgatgaaggacatcgtctgaaaaatcatgaatgcgctcttgctcgaacactggtttctggatacatgatccgccggagactacttttaacaggcactcctatccaaaacagcctgcaagagctctggtctttgcttaacttcatcctgcccaatatttttaattcatcccagaattttgaggaatggtttaatgcaccatttgcatgtgatgtcagtcttaatgatgaggaacaactactaatcatacatcgtttgcatcaagttttgcgtccattcttgctgaggaggaagaaagatgaagtagagaaatatctccctgtgaaaacacaagtaattctcaagtgtgacatgtctgcttggcaaaaagcatactacgaacaagtcacaagcagggaaaaggttgcgctaggatatgggatcagaaagaaggctctgcaaaatctgtcaatgcaacttaggaagtgttgcaatcatccctacctattcgtagagcattataacatgtaccagcgggaggaaatagttagagcatccggaaagtttgaattgcttgatcgtctacttccgaaattgcagagagctggtcacagggttttacttttctctcagatgacaaaattgcttgacgttttagaaatatatttgcagatgtacaatttcaagtacatgaggcttgatggatccacaaagactgaagaacgtgggaggttactggcagattttaataagaagaattcagaatatttcatgtttcttctcagcacacgagccggaggtcttggattgaacttgcagactgcagacaccgtcattatctttgatagtgactggaaccctcagatggaccaacaagctgaggaccgtgcccatcgtatagggcaaaagaacgaagtacgtgtgtttgttcttgttagcgttggttcaattgaagaagagatattggatcgtgcgaaacagaagatgggtattgatgcaaaagtaatccaggctgggttgtttaacacgacctccacagcacaggacaggcgagcattgctgcaggagatactcaggagaggaacaagctcactgggaacggatatccccagtgaacgtgagataaaccgcttggctgctcgaaacgatgaagaattccggttgtttgagaagatggatgaagaaaggaggctaaaggagaactacaaatctagacttatggatggaaatgaggtcccagattgggtgtttgccaatgataatgaaaccttacgcaagaaaaccgtggcagatgaattccggaatataattgttggttcaaagagacgtagaaaggaggttgtctattcggactcttttggtgatcagtggatgaaatccgacgagggatttgaagagattgcaaagatgactccaagggtgaagcgaactgcttattcgcctgacattcaagttgagtacaatgaaaggaggaaaaggcccaagtctgtggaaaacagcgcagatggcgcaagcaacccaacacggacacccgacaaaggaagggctggagtttcatcatacagcaaggatgagaccgaagatgatggtgaagacgaagtcatcaccagtggcttacagaagggtaacagtttcacatggaagacccttggaagaaaaaggtcaagccacttaagttcgtcgtcggactcaaaagggcgaccatcattctaatgtcagttgccttgatgcttttgctcgatgaagcccttctaataatggagtacccctggaggctagcagcgctaccatttcgaaagtaccttgaacctataaacttcaggatggaggctgtagctagcaggactaccattttgaaagtacattgaagctataaacttcagaattagtagtatactctggacttgttgccatgaattcgtaactcaaacgaacttaaattgcgttacagttcaagcctattttgggggtaaaggttattggtaaatagctggtgatggcttgccctgaatttgggctgtcttgtctgcacattccgttgagcagtcttcggctaatgcctgtccagattttactggtttatatggcaagcaaaactgtactaggtgctatctgatgtgcttccaccgaggcaagtcctcaaacaagtgtcatcttttattgtgtatagctagtagagttggctctgtgaatctatatgcacttacatagcctgatagacacacgataactacgtaaaaatagctttgtgcaaagataatttctttttgagttttcccctttaattaatcgcgttgaaactacgcgttcaaatttgtgcttccaagtgccaaacggaattcgctgcgact

SEQ ID NO: 27286 - DNA, 644 bp, Zea Mays
tcttcttcgtgctatctccctcagccgcaagtgccgcgtctcctgctcgagtcaccgtagtttgtttggcctctagctcctgctcgcgtccttggacgctacacctccctgcccctcgttagcgttctaccaacggcacgttccttggtcttcttcctcgaagacgccccagccacggctccccggtgttcggccctggtcgctctcgcttgtcctgcggccgcgcctcccacttctgtgttctacgcccgcgtcctagctccctgacgtcgatttgcttgcatgtggcggtgagttcttcctcctactctcccgttgaagctactaccaggtcgtcgggctacatatctctggcctgggcactgctctcgcgctcgccgataccggtcgtcttcatcgttcgtgcgatgatcgagccgagttgattatgatacgataattaatcacgtgatgcggaagacgacccaagtcgaccccagaataatgagagagtggacatctccgcaagacgatgtcgtcagtcggacgaacctgaagatggataatctgacgaatgccaagacaaaggatggtcgccaagtggtcatcgtctaacaaacactaacgtagtgtttattccaggcaagccccggtgcatttacccc

SEQ ID NO: 27287 - DNA, 1633 bp, Zea Mays
ataaagcttatgagatgtttagtttgagaaatgagatagtccatcttcttactccttacttttggtttaaataatagaataggttgatccaccataattttattcctcataggttaataattagtcataatatgaggaataaatttattctaccaaatttgtggaatgaacttatgatacatcacctcatctaaaatagattgattattcaaaccaaacatctccttaaattgctgcggcgctaagggtcagactttgcaactccgtctttagatgggacggcaccatttttaacgttcttcaccttcagcgtaccagttccacccttccaaatatctgtcctgttcctctgatctcctgcgagatacaatcagaggttaatgagatccaaatatatatatatggacagttcaaccagctcaaaattataaaagatccaatggacgttgcttcaaactgagaaatggaaaccacctccggaagaatacctgaaaatcaattttgatggaacattcattggagaagaaagaagaggagtttgagggttcataatcagagaccactatgggcagcgaattgctgcagggactggaaaactagcacatatatacaatgctatgcaagctgaagcgaaaggatgcacagtgctgagaagagcaacaaagttggaaatttcacatattatcttggaatctgatcgcctgaatttgataaaagcttttaagtctgatgactttgatctggcaccggcgagcttactgttcaaggaagggcgctatctataaaatctttcttctcaatgttgggtttcgattattgtaagcgatcctgtaatgagtgtgctcatgagcttgctcacttagcgttaaatggggaaactgatcaggtgttgatgtgggtggatcctttcccaacttttgtaaatgctcagctgacagctgattcgcgattcagctggtacttaacgaagcttgtttgttgggtttcaaaaaaaaaatctcaggctgtgaggcaagcagggttgcatgcaaatcaacatagaatgttgctaaaccagtagagtatgcatgcgcacaattaaagttgcagaagaaatcatggaacaccatttacactagatctctaaaatccgctcacataaacaaataggaagttccacaccattcacattatgaatataataatccacacattcagttttcataactgctgacaaattggagcgagcgagaactcgctaacaatactaagcagcacgaatccagacgtataaggcatgcatagctagaggggcagcatatcgaaaattgctataagaactttctgtatttttttcccagttaaggactagtttgaaactccattttttcaagggatttctattttctcaagagaaaacgaactaatttcccttggtaaaatggaaatcccttggaaaatagggttcccaaactagccctaacagttttgcagcacaaatatatactccatccgttccataatattattcgtttcagctctcagtttttatgtctatattcaaacgaacaaagataaatctagacaaatacataaaacatgtacatcaagtgttgtacgaatctggtaataatctaaaacgaattttaatttg

SEQ ID NO: 27288 - DNA, 711 bp, Zea Mays
atgcatgccagcctccacctcctcctcttggagttccctctcccctgcaggctggccggccgcgtttccgtttcgtcttctggttcctggagcggcgaagacaacgcatacatcgcgctgccagacctgttcacctccggttcctttatctcgtcgctcacaggggggcgggtgtactcccaaggtcgattgcctcttcgcgtttcgtcttctgggagcggcggagacgggcagcaattaatgcaactatatgcaagcagcagcagcagccgccgcctgggctactacaaatagcaaaggcaacagctgctgcgccaagaccaagatgctgtggggagtattgttccaattcatgtgggctgtcgtctcccttgtcgtgacggccttggtggcctgctgggcgaagtgaatcctgatggccggcggcgtcgacagagctagaaataaataaaaaggcatagcgaacgcctgtggtcatggtgacggcctcgcatcgagatcttgctgtttcgtcgtcgttgctgtttccctgatagtactatatatgtattgattgcgtctcgatcctcctctatcttgttcctgtgcttaattagttgctaagaacgtcgtccggcccatgaactcggcgagagccgccggagtcacgccgcaggtcctcgtacgtacctgtgtccggggtcgtcgccgtagcacgccatttgttcggtg

SEQ ID NO: 27289 - DNA, 1465 bp, Zea Mays
cttcgctatccactctggcagtccccgtccagccaccgctgcccgcccgctccctagcaatggcgtccgccgcgcacgcgccgacgccggtgctcaaggacgagctggacatcgtcatcccgacgatccgcaacccgcccgctccctagcaatggcgtccgccgcgcacgcgccgacgccggtgctcaaggacgagctggacatcgtcatcccgacgatccgcaacctcgacttcctggagatgtggcggtccttcttccatccctaccacctcatcatcgtgcaggacggcgaccccagcaagaccatccgtgtccccgaaggcttcgactacgagctctacaaccgcaacgacatcaaccgcatcctggggcccaaggcgtactgcatctccttcaaggactccgcctgccgctgcttcggctacatggtctccaagaagaagtacatctacaccatcgatgacgactgcttcgttgccaaggatccatcagggaacgacatcaatgcacttgagcagcacatcaagaacctcccgagcccttctactccatttttcttcaatactttgtatgacccttaccgcgtaggcaccgattttgttcgtgggtaccccttcagccttcgtgaggatgttccaactgctgtttctcacgggctttggctcaacattccagactatgatgcccctacccagctcgttaagccccttgagagaaacaccaggtatgtggatgctatccttacaatcccaaagggcgccctcttccctatgtgtggaatgaaccttgcattcgaccgtgagctcattggtcctgcaatgtacttcggtcttatgggtgatggccagcctatcggtcgctacgatgatatgtgggcaggatggtgcacgaaggtgaccacggatcatctgggcttgggtgtgaagactggcctgccctaagtctggcacagcaaagcgagcaacccgtttgtgaacctgaagaaggaatacaacggcatcttctggcaagaagagctgatcccgttcttccagtcagtctcccttccgaaggatgccaccaccgtccaaaagtgctacctcgagttggccaagcaggtgagggcgaggctcggcaaggtggatggctacttcaataagcttgccgattccatggtcacgtggatcgaggcctgggacgagctgaaccccgcaaaaggtggagtccgagtccccacagcaaatggccctcacaagaagtaataaaaacacgatgtagtataaacttcacttgttcatgtggacagtcatactgaaaagaaatgatgtctttggttagtgctgatggactgagatttacacgtcccgggaaatcgtcctgccggttttagggcgtttacatgttttattgatcgtttttcgtgtgatggatgcaacaggtgtaatgtcggattggattacctttaaattataataaagtttacg

SEQ ID NO: 27290 - DNA, 1775 bp, Zea Mays
gactgcagaactgaacatcccaacccaagtcccgaaccctccctcaccactcccccgatctccgccactccaaaatgtggcgccgccaccacctcctccggctacttccgcctccggccaccgccgctaccgccgcggccccttcccacttcctgcgctacctctctacctcaagcaccccgaccccggccgcctccctggcctcgtccctcgcgtcggcgctcactgcgctctccacgaccccgccccccgccaccaccccggacgcttacttctccctccacttctccgacgtgcggcctaccaacgcgctcctcgccgaggcgctcgcgctctccccgcccgccacctcccgcgccgctgccgatctcttccgcttcctcgtccgccgccgctcgctccacccctccgacggcgcgctcgcgcccatcgttcgccacctcgcccgccgccgcgacttccccgccgtgcgcgcgctcatccaggagtttccaaccgctctcgggcccaccacgctcgacgcctatctccagcagctcaccagagccgggcgcccaacggacgctgtcaaggtgttcgacgaattgccggagcagctccgtaaccgcgaggctctcactttgctggtctcctcgctttcttccgagggattcccctcgcacgcagagcgagctgccaagaaggtcgccagtgagatcttcccagatgataatatctgcactttgcttgtatctggttatgccaatgctggtaagctcgaccatgcgctaaggttgattggtgagacacgtagaggtgggttccatccaggattggatgcgtataatgctgttcttgattgtgtctgccggctctgtcgcaagaaggatccactgaggatgccaatagaagcggagaagttcttagttgacatggaagcaaatgggattcctcgtgatgcaggcacatttcgggttctgatcacaaatttttgcaagatccgcaagacaggggatgccatgaatctgttccagcgtatgggtgagtggggctgctcaccggatgctgacacgtacttggtgctcattaggagcttgtaccaagctgcccgaacttcagagggggatgaaatgataacgtggatgcggtctgcaggatttggagataaacttgataggaaggcatattatggattcatcaagattttatgtgggattgagagggttgagcatgctgtcaaggtattccgtatgatgaaaggttatgggcatgctcctggagtaaaatcatataccttgctcattgagaagctggccagacacaatttaggggatcgttctaatgcacttttcagggaggcagttgcacgtggtgtacctgtggcacaaggagagtacaatgttgacaaaaggtatgtcaagacaaagaaggagaagacggtgaagaagaggctgactttgccagagaagatgagattgaagagcaagaggttatacaagctcagaatgagctttgtcaagaagcccaagcgtcgaatgctccgggtttaagcataattttggttcggtctgctgcagaataacttcatgggaacacagcagtttggttggagcggatgatcatgggagcggacaccaccagatccagttatatctcggaagatcagaaaattatagtcccttaactgtgcctgcccttctgagtgactatgcaacatcatttttcgaagtttctactttcacacgtcatcagcacttgcttttacaaaagagagcaaagaccaaaacaagaagacc

SEQ ID NO: 27291 - DNA, 2456 bp, Zea Mays
ccgaatcggagctagctcttgtttgccgcggaacggtttgtttccggtactagagctgcgtgccttttgtatcccaaaagcggcgatttagatatgagataattggatttttgccactcacaatgttgtcttcttgttataattatctgagtttcacaaaggggctaattagtctagaactgtggctgacgggcatatgacgtgacatgcccacaggcgtgcatagtgaattgctcgtcacgaccgatctatttgtgttactctgtcgtggaattctgtagatcgtgaagtatgcgcagatgtgtgcatgtgattgtgaagtgaagtcgtttcttgtaaaaggttcggaactgaaaaccaggagaaactattgcaacatccaactcttatttctttcttgcttattattgactgcacaatttagatgattggactttattactgaaagttgtcaaggacctccttacagaaagttgtcaaggacatccttacagaaagttgtcaatgaccttcttacagaaagttgtcaatgaccttacagaaagttgttagatactgtcgaaaatttatttaccgtgagaaacattatggtctacctggccttccttcaggatgatgcatcatgtcatggcgaggaaacacagagtctattggaagcaaatctagggtcacagctgaaaagtaaatgctctgattggagagcaccggcactcatcctgggattggaatgcttggagagcatggctttcaatggcattgccacaaacctagttgtgtatctccgttcagttctccatgggggtattgcttccagtgcagcaactgtatctctttggtatgggacaagcttctttgtgccaattcttggagccgccatagcagatacttgcttgggaaattataagaccatcttgatctcccttatcatgtacctatttaatgcaaatgctcattgcagggaatagtactaattacagttgcaacgttcatgccttctacttcagtcttgtgcgacgtcagttcatgcttgtcatcaaatggaactcaaaccgtgattttctttgctggtttgtatctcactgctgttggatgtggaggagtaagatctgcattgcttccgtttggtgctaaccagttcaacaacgagaacagtctagacataaaaaagagaagaaatttcttcagcttgttctatatatgtgtcatctttggtgtgattacttctgggacaatcatagtttgggttcaggaaaatgttagctgggctattggatatggagtcgccactacatgcataggtcttgctttgataggatttctggtgggaacaccaatattccaagaagatgagccttgtggttctccagtgaagagtattttccaggttattgttgcctcttttaggaacatgagcttggaagtacctgctgatagctgtcttctgtatgaggtcgggagcaaccacatacaaaggacaaaacttgctcactctgatgattttaggttcttagataaggcggcagttatttctgatccaagcctggtgtatggaggctgtcgaagctcatggagcatatgtacagttactgaagttgaggaactgaaagtacttatccgcttgctcccaatatgggtgactggaatattctttggtgctgcgatctcgcaaatgcacaccacttttattcagcagggaactgtgatggacaccaagatcggttccctgtccattccaccagcatccttatactcatttgaagtgatatgtgtcacgctttgggtacttgctgtcaacaaagtgcttgtgccggcaatccgaacgtattttgcaaatggggtagagctcacacagttacagaggattgggatcggtcgtttcctgatgatctttgccatggcaatggcagcacttctagaaaccaagaggctgcatattgttcaggagggggaactgctaagcattgtatggcagcttccacagtacttcgtcattgctggggctgagtgcttcggtatcatcactcagctggagttctttcgtggccaggcgccagactccatgaagagcattttaacggcatttgcattgctcaccactgcccttgggaattacttgagctcagctatcatcaccctcatcgcaggggtgaccagggtatggcatagccctggttggataccagatgatctgaacaaaggacaccttgactactactactgatatatgtttctttttgttaatgaagatggaattagacgtggacagatctagctgagtaaattaggtggcttatgtggttctggtaacactcctcaatcctcatatcctgatttatgatattagagttttgtctccatagggaatgaatgtgctacatcgacatctaattgattacaatactaaggggtatttgaatgtactagatctaatagttagtgactaaaattaactggag

SEQ ID NO: 27292 - DNA, 2707 bp, Zea Mays
ccgaatcggagctagctcttgtttgccgcggaacggtttgtttccggtactagagctgcgtgccttttgtatcccaaaagcggcgatttagatatgagataattggatttttgccactcacaatgttgtcttcttgttataattatctgagtttcacaaaggggctaattagtctagaactgtggctgacgggcatatgacgtgacatgcccacaggcgtgcatagtgaattgctcgtcacgaccgatctatttgtgttactctgtcgtggaattctgtagatcgtgaagtatgcgcagatgtgtgcatgtgattgtgaagtgaagtcgtttcttgtaaaaggttcggaactgaaaaccaggagaaactattgcaacatccaactcttatttctttcttgcttattattgactgcacaatttagatgattggactttattactgaaagttgtcaaggacctccttacagaaagttgtcaaggacatccttacagaaagttgtcaatgaccttcttacagaaagttgtcaatgaccttacagaaagttgttagatactgtcgaaaatttatttaccgtgagaaacattatggtctacctggccttccttcaggatgatgcatcatgtcatggcgaggaaacacagagtctattggaagcaaatctagggtcacagctgaaaagtaaatgctctgattggagagcaccggcactcatcctgggattggaatgcttggagagcatggctttcaatggcattgccacaaacctagttgtgtatctccgttcagttctccatgggggtattgcttccagtgcagcaactgtatctctttggtatgggacaagcttctttgtgccaattcttggagccgccatagcagatacttgcttgggaaattataagaccatcttgatctcccttatcatgtacctatttggaatagtactaattacagttgcaacgttcatgccttctacttcagtcttgtgcgacgtcagttcatgcttgtcatcaaatggaactcaaaccgtgattttctttgctggtttgtatctcactgctgttggatgtggaggagtaagatctgcattgcttccgtttggtgctaaccagttcaacaacgagaacagtctagacataaaaaagagaagaaatttcttcagcttgttctatatatgtgtcatctttggtgtgattacttctgggacaatcatagtttgggttcaggaaaatgttagctgggctattggatatggagtcgccactacatgcataggtcttgctttgataggatttctggtgggaacaccaatattccaagaagatgagccttgtggttctccagtgaagagtattttccaggttattgttgcctcttttaggaacatgagcttggaagtacctgctgatagctgtcttctgtatgaggtcgggagcaaccacatacaaaggacaaaacttgctcactctgatgattttagctatcatgccagtattggtcaattgttaactgcttaatggtttctggagaatacccatcacacacacgtgcgcacacacacgtacagtaattcaggattttcaattggcaaaatgtatatctctatctcatgtatccatgatttgaacctggtaataaaaactgttcctgaaacaggaaaaccaacaagaactacagttccatctaattgaagttcccttgctatcctgcacttgtttaactatctttctgattccatcattttgcctcaggttcttagataaggcggcagttatttctgatccaagcctggtgtatggaggctgtcgaagctcatggagcatatgtacagttactgaagttgaggaactgaaagtacttatccgcttgctcccaatatgggtgactggaatattctttggtgctgcgatctcgcaaatgcacaccacttttattcagcagggaactgtgatggacaccaagatcggttccctgtccattccaccagcatccttatactcatttgaagtgatatgtgtcacgctttgggtacttgctgtcaacaaagtgcttgtgccggcaatccgaacgtattttgcaaatggggtagagctcacacagttacagaggattgggatcggtcgtttcctgatgatctttgccatggcaatggcagcacttctagaaaccaagaggctgcatattgttcaggagggggaactgctaagcattgtatggcagcttccacagtacttcgtcattgctggggctgagtgcttcggtatcatcactcagctggagttctttcgtggccaggcgccagactccatgaagagcattttaacggcatttgcattgctcaccactgcccttgggaattacttgagctcagctatcatcaccctcatcgcaggggtgaccagggtatggcatagccctggttggataccagatgatctgaacaaaggacaccttgactactactactgatatatgtttctttttgttaatgaagatggaattagacgtggacagatctagctgagtaaattaggtggcttatgtggttctggtaacactcctcaatcctcatatcctgatttatgatattagagttttgtctccatagggaatgaatgtgctacatcgacatctaattgattacaatactaaggggtatttgaatgtactagatctaatagttagtgactaaaattaactggag

SEQ ID NO: 27293 - DNA, 2436 bp, Zea Mays
ccgaatcggagctagctcttgtttgccgcggaacggtttgtttccggtactagagctgcgtgccttttgtatcccaaaagcggcgatttagatatgagataattggatttttgccactcacaatgttgtcttcttgttataattatctgagtttcacaaaggggctaattagtctagaactgtggctgacgggcatatgacgtgacatgcccacaggcgtgcatagtgaattgctcgtcacgaccgatctatttgtgttactctgtcgtggaattctgtagatcgtgaagtatgcgcagatgtgtgcatgtgattgtgaagtgaagtcgtttcttgtaaaaggttcggaactgaaaaccaggagaaactattgcaacatccaactcttatttctttcttgcttattattgactgcacaatttagatgattggactttattactgaaagttgtcaaggacctccttacagaaagttgtcaaggacatccttacagaaagttgtcaatgaccttcttacagaaagttgtcaatgaccttacagaaagttgttagatactgtcgaaaatttatttaccgtgagaaacattatggtctacctggccttccttcaggatgatgcatcatgtcatggcgaggaaacacagagtctattggaagcaaatctagggtcacagctgaaaagtaaatgctctgattggagagcaccggcactcatcctgggattggaatgcttggagagcatggctttcaatggcattgccacaaacctagttgtgtatctccgttcagttctccatgggggtattgcttccagtgcagcaactgtatctctttggtatgggacaagcttctttgtgccaattcttggagccgccatagcagatacttgcttgggaaattataagaccatcttgatctcccttatcatgtacctatttggaatagtactaattacagttgcaacgttcatgccttctacttcagtcttgtgcgacgtcagttcatgcttgtcatcaaatggaactcaaaccgtgattttctttgctggtttgtatctcactgctgttggatgtggaggagtaagatctgcattgcttccgtttggtgctaaccagttcaacaacgagaacagtctagacataaaaaagagaagaaatttcttcagcttgttctatatatgtgtcatctttggtgtgattacttctgggacaatcatagtttgggttcaggaaaatgttagctgggctattggatatggagtcgccactacatgcataggtcttgctttgataggatttctggtgggaacaccaatattccaagaagatgagccttgtggttctccagtgaagagtattttccaggttattgttgcctcttttaggaacatgagcttggaagtacctgctgatagctgtcttctgtatgaggtcgggagcaaccacatacaaaggacaaaacttgctcactctgatgattttaggttcttagataaggcggcagttatttctgatccaagcctggtgtatggaggctgtcgaagctcatggagcatatgtacagttactgaagttgaggaactgaaagtacttatccgcttgctcccaatatgggtgactggaatattctttggtgctgcgatctcgcaaatgcacaccacttttattcagcagggaactgtgatggacaccaagatcggttccctgtccattccaccagcatccttatactcatttgaagtgatatgtgtcacgctttgggtacttgctgtcaacaaagtgcttgtgccggcaatccgaacgtattttgcaaatggggtagagctcacacagttacagaggattgggatcggtcgtttcctgatgatctttgccatggcaatggcagcacttctagaaaccaagaggctgcatattgttcaggagggggaactgctaagcattgtatggcagcttccacagtacttcgtcattgctggggctgagtgcttcggtatcatcactcagctggagttctttcgtggccaggcgccagactccatgaagagcattttaacggcatttgcattgctcaccactgcccttgggaattacttgagctcagctatcatcaccctcatcgcaggggtgaccagggtatggcatagccctggttggataccagatgatctgaacaaaggacaccttgactactactactgatatatgtttctttttgttaatgaagatggaattagacgtggacagatctagctgagtaaattaggtggcttatgtggttctggtaacactcctcaatcctcatatcctgatttatgatattagagttttgtctccatagggaatgaatgtgctacatcgacatctaattgattacaatactaaggggtatttgaatgtactagatctaatagttagtgactaaaattaactggag

SEQ ID NO: 27294 - DNA, 1623 bp, Zea Mays
agaaagttgttagatactgtcgaaaatttatttaccgtgagaaacattatggtctacctggccttccttcaggatgatgcatcatgtcatggcgaggaaacacagagtctattggaagcaaatctagggtcacagctgaaaagtaaatgctctgattggagagcaccggcactcatcctggggaatagtactaattacagttgcaacgttcatgccttctacttcagtcttgtgcgacgtcagttcatgcttgtcatcaaatggaactcaaaccgtgattttctttgctggtttgtatctcactgctgttggatgtggaggagtaagatctgcattgcttccgtttggtgctaaccagttcaacaacgagaacagtctagacataaaaaagagaagaaatttcttcagcttgttctatatatgtgtcatctttggtgtgattacttctgggacaatcatagtttgggttcaggaaaatgttagctgggctattggatatggagtcgccactacatgcataggtcttgctttgataggatttctggtgggaacaccaatattccaagaagatgagccttgtggttctccagtgaagagtattttccaggttattgttgcctcttttaggaacatgagcttggaagtacctgctgatagctgtcttctgtatgaggtcgggagcaaccacatacaaaggacaaaacttgctcactctgatgattttaggttcttagataaggcggcagttatttctgatccaagcctggtgtatggaggctgtcgaagctcatggagcatatgtacagttactgaagttgaggaactgaaagtacttatccgcttgctcccaatatgggtgactggaatattctttggtgctgcgatctcgcaaatgcacaccacttttattcagcagggaactgtgatggacaccaagatcggttccctgtccattccaccagcatccttatactcatttgaagtgatatgtgtcacgctttgggtacttgctgtcaacaaagtgcttgtgccggcaatccgaacgtattttgcaaatggggtagagctcacacagttacagaggattgggatcggtcgtttcctgatgatctttgccatggcaatggcagcacttctagaaaccaagaggctgcatattgttcaggagggggaactgctaagcattgtatggcagcttccacagtacttcgtcattgctggggctgagtgcttcggtatcatcactcagctggagttctttcgtggccaggcgccagactccatgaagagcattttaacggcatttgcattgctcaccactgcccttgggaattacttgagctcagctatcatcaccctcatcgcaggggtgaccagggtatggcatagccctggttggataccagatgatctgaacaaaggacaccttgactactactactggtgtcttactaccctctcattggtgaattttgttgtgtatctgtattttgctagtaaatacaaattgaagaaagttgtttgttaatactaccaaacactaatgaaatatctttacgtgtaacatgaaatataacgtttcaaatgtttatgtttattaatataaggtttcaaatgtttatg

SEQ ID NO: 27295 - DNA, 2043 bp, Zea Mays
ccgaatcggagctagctcttgtttgccgcggaacggtttgtttccggtactagagctgcgtgccttttgtatcccaaaagcggcgatttagatatgagataattggatttttgccactcacaatgttgtcttcttgttataattatctgagtttcacaaaggggctaattagtctagaactgtggctgacgggcatatgacgtgacatgcccacaggcgtgcatagtgaattgctcgtcacgaccgatctatttgtgttactctgtcgtggaattctgtagatcgtgaagtatgcgcagatgtgtgcatgtgattgtgaagtgaagtcgtttcttgtaaaaggttcggaactgaaaaccaggagaaactattgcaacatccaactcttatttctttcttgcttattattgactgcacaatttagatgattggactttattactgaaagttgtcaaggacctccttacagaaagttgtcaaggacatccttacagaaagttgtcaatgaccttcttacagaaagttgtcaatgaccttacagaaagttgttagatactgtcgaaaatttatttaccgtgagaaacattatggtctacctggccttccttcaggatgatgcatcatgtcatggcgaggaaacacagagtctattggaagcaaatctagggtcacagctgaaaagtaaatgctctgattggagagcaccggcactcatcctgggattggaatgcttggagagcatggctttcaatggcattgccacaaacctagttgtgtatctccgttcagttctccatgggggtattgcttccagtgcagcaactgtatctctttggtatgggacaagcttctttgtgccaattcttggagccgccatagcagatacttgcttgggaaattataagaccatcttgatctcccttatcatgtacctatttggaatagtactaattacagttgcaacgttcatgccttctacttcagtcttgtgcgacgtcagttcatgcttgtcatcaaatggaactcaaaccgtgattttctttgctggaacatgagcttggaagtacctgctgatagctgtcttctgtatgaggtcgggagcaaccacatacaaaggacaaaacttgctcactctgatgattttaggttcttagataaggcggcagttatttctgatccaagcctggtgtatggaggctgtcgaagctcatggagcatatgtacagttactgaagttgaggaactgaaagtacttatccgcttgctcccaatatgggtgactggaatattctttggtgctgcgatctcgcaaatgcacaccacttttattcagcagggaactgtgatggacaccaagatcggttccctgtccattccaccagcatccttatactcatttgaagtgatatgtgtcacgctttgggtacttgctgtcaacaaagtgcttgtgccggcaatccgaacgtattttgcaaatggggtagagctcacacagttacagaggattgggatcggtcgtttcctgatgatctttgccatggcaatggcagcacttctagaaaccaagaggctgcatattgttcaggagggggaactgctaagcattgtatggcagcttccacagtacttcgtcattgctggggctgagtgcttcggtatcatcactcagctggagttctttcgtggccaggcgccagactccatgaagagcattttaacggcatttgcattgctcaccactgcccttgggaattacttgagctcagctatcatcaccctcatcgcaggggtgaccagggtatggcatagccctggttggataccagatgatctgaacaaaggacaccttgactactactactggtgtcttactaccctctcattggtgaattttgttgtgtatctgtattttgctagtaaatacaaattgaagaaagttgtttgttaatactaccaaacactaatgaaatatctttacgtgtaacatgaaatataacgtttcaaatgtttatgtttattaatataaggtttcaaatgtttatg

SEQ ID NO: 27296 - DNA, 1204 bp, Zea Mays
atcaacttgtgcaatggtggcgatccccaggatttgaatactaaggatttggaaaccaacgtcattgttcttgttcatggtggtggattcggcgcttggtgttggtacaagactatatcacttctcgaagatagtgggttcaaagttaacgccattgacttaacaggctcagggattcaccattacgacacaaacaagattagcagtctttcagagtatgctgaaccacttacgtcttaccttaaaggcttaggcgatgctgaaaaggtaattttggtcgctcatgatcttggcggtgcctgtgtatcctacgcaatggagatgttcccatccagagttgccaaggcggttttcctttgtgcagcgatgctggcaaacgggaacagtgccctcgacatgttccaaaagcagatggacacgaacggtactctccaaaaggcgcaggaatttgtctactccaacggcaaggaccggcctcccaccgccatcaacatcgacagggcatcgcttagggacctgttgttcaaccagagcccttccaaggacgtgtcgctggcctcggtgtccatgaggcccatccccttcgcccctgtgctggagaagcttgtgctcacggccgagaactacggctcggtgcggcggttctacgtggagaccacggaggacaacacgattcctctgcccctccagcagagcatgtgtggtgccaacccaccggagaaggtgctgcggctgaagggggcagaccacgcgcccttcttctccaagccgcaggcgctgcacaagacgctggtcgagatcgccaccatgccgcatgtccgggcttcgtgagaacgtgtttgttcagcttcaggtttttgccggccggtgagcttacatggctgttgtacatgctgaggatgatggtatggcttgtggcggtgtggcagcgacagcgagtaggggatctagaatttcggcgtcgccttgacgaaggcatacccctccattatacactcacatctggcatcactttttttagaaaaaaaaaacaaaatcttattccagcctctatggctctagagttttagaatcaaccatttcattatatggttcagcttcgtgagctcataaaaggcaaataaaatcaaatgccaggaaagtaaacactaaacctatgcttgatgtaaaagcatctcgaagaggggctctaaacatgttatta

SEQ ID NO: 27297 - DNA, 1898 bp, Zea Mays
cgctgctcgctccccctgcttcctctttctccccctcctcgactcctcgtcaagctcccctgaatcgcggcagcagcaccggggcagcaaggcgaggattttcctgctccgaatctacccggctcggcccgatgggctcgctgatgtcctgcctctccgacccaatcccgtcggggaacaggtccccgccgccgcagccgaagcggcgctcgtccacctcttcccgcggccgtggcggcggcgggagggactccgctaaggcctccgtgtccatagacgaggaggcgcttactgcagcagcggcgctcgtgctggggcagaggggcgcgtccggtggcctgggcgcgttcgagcggtccgcgtcggtgcggtacgcggccaagcggcagagccagggcccgccgctgccccgaagttgcagcacgcggccgaggtcgctcgctgaccccgagctccagccacagcaactcctagccaagctctggtgggatcatatcggcttgtgtgttcgttcctctggagaaaggacaaggcagagccgaggaggccatcatcaacttgtgcaatggtggcgatccccaggtttatcctgatcatgaatgggatgggcagccggcgtggctcctaatctgtcttgagtacattatatactggcttttctgactgctaacagtggtgttgactagtaagattgacattttcaaagtcatctgtcagctagcggatgcagatgctggtatgctaaatttgttggaaattgtgaaggttttcaacagaaccagcacggatttgaatactaaggatttggaaaccaacgtcattgttcttgttcatggtggtggattcggcgcttggtgttggctcagggattcaccattacgacacaaacaagattagcagtctttcagagtatgctgaaccacttacgtcttaccttaaaggcttaggcgatgctgaaaaggtaattttggtcgctcatgatcttggcggtgcctgtgtatcctacgcaatggagatgttcccatccagagttgccaaggcggttttcctttgtgcagcgatgctggcaaacgggaacagtgccctcgacatgttccaaaagcagatggacacgaacggtactctccaaaaggcgcaggaatttgtctactccaacggcaaggaccggcctcccaccgccatcaacatcgacagggcatcgcttagggacctgttgttcaaccagagcccttccaaggacgtgtcgctggcctcggtgtccatgaggcccatccccttcgcccctgtgctggagaagcttgtgctcacggccgagaactacggctcggtgcggcggttctacgtggagaccacggaggacaacacgattcctctgcccctccagcagagcatgtgtggtgccaacccaccggagaaggtgctgcggctgaagggggcagaccacgcgcccttcttctccaagccgcaggcgctgcacaagacgctggtcgagatcgccaccatgccgcatgtccgggcttcgtgagaacgtgtttgttcagcttcaggtttttgccggccggtgagcttacatggctgttgtacatgctgaggatgatggtatggcttgtggcggtgtggcagcgacagcgagtaggggatctagaatttcggcgtcgccttgacgaaggcatacccctccattatacactcacatctggcatcactttttttagaaaaaaaaaacaaaatcttattccagcctctatggctctagagttttagaatcaaccatttcattatatggttcagcttcgtgagctcataaaaggcaaataaaatcaaatgccaggaaagtaaacactaaacctatgcttgatgtaaaagcatctcgaagaggggctctaaacatgttatta

SEQ ID NO: 27298 - DNA, 2593 bp, Zea Mays
gcccgccggcctccctccctccccacgacgacagcctgcatgcccatggcgccgcaatgataacattcctctgagagctcgcccccgactccaaaaccgagcacacatctgctccggcttctacttctaccagtacacatccgcagtaccagccgtgtgcgcgtgcaggcaggactgcttccccttctcctcgccactgcacgccgcctagctcggcctcagctctgaccgggtgactcactgaccgacgacgcctcggaagcttctctgccgccggcctggccacgtcggtcgccgtcgtcggaccccgaatgagagccggcgatcgtcccgcagagcgcacgccgtcccgtgcctggtgatcgggggccgacaacgacagcttggggagcgaggcagaggcacacgcccggaccggaagacgatgccgcccgcgagggtgcgcggcgccgccgccggcctggccgacgacgcgcgggacctccagcgccagatgggctgcatggccggcatactccagatcttcgaccgccagcgtctcatcgctggggccgccggccgccaagccgcccggcagcgccaggcgcacaagaggctgcctccgccttcggctcctccaccgggcaatactcattcaaatagcagcagcaatgtcccagttcaaagttcaagtacctcaaagatcgttctggagaaaacatttagcaaatgtatgaccgagaacagcagcctttcaatcgaatcatcaagagcttcttcttcctcctcttcctgctcatccttctcctcccttgatggcaacaaatcagtccagcaggagcttccttacatcaacgaggagctctttgtgcagaggtcactgaagacctcgccaagtttgaaggaatctgacatgaacaccaagtctgggcatcctaatgtcggtttcagagacatagtgaaggactccatcaaccgagaccctggaggcctgactgtaaaaacctcggtgcaggaggcaaggaggaacgggcagtacaaggactcaccgaggccactgctgctgtccaaatcaatggatggaacctgtatcattgggatcgataggaccacaaaggttcctgcaaatgtcactgaatctggaaggtgtttgcaggaacggtcacgcttctcatgcgatgaccgaagactcctgcggccagctgaaacccaggaatgcaagaggccttcctcgaggctaaaagagcttcctagactgtccttggacagtagaaaggagtctctgagtccaggctcacgtcagaagagcatcagttacaagagaactgatgatattcttctggatactttgaggcctcaagattcccccagcaacaggagagctaacagtgtcattgccaagctgatggggttggaagaagcaacaaatgctacaggggtgctaaccgctgatagctgtgaacccacaagatcaccaagaccagcccaagccactcaacatgagcgtccatcgcgatcccccaaaaacacttgccaggattcctgcagcatgcagccgaagaaccaactgaaagccaagccttcccaaagaattgccacagaagcggctccttggaggcagcaggacagaagtgccaacaataccaaggcggaacaatgtcgagaggctgaagggagggcaagaactgcatctgtctatgctgatatagagagaagcgggggttttaacttcttagagtgtaataacaaggacttcagggctctcagaatattgggtgcattgaacgcgaaagatgccaagagcaagaatgacagcagtggcggatctgtggctattcacaggacagggtatgatctaaccactagctctggaagttttcaggctcctattgtggtcatgaagcctgcaagaaccactgagaaacatggggtttcacttgcttcggttgctcccatagctggcctgagaagcctcagaaagttgccggcgggtagatattcatctttcactggcacaaatgacaagatgcagcttcggatgtcaagagatcaatcgaagtctgaggaaactgtcagcagtgccagctcaccaaggcctacaagctcatcaagccccagaaatgtgttaaagaagtcagaacctgaaaggaggtctcgtccacctgtctcaccaaaatctccaagcaagaagtccaatgaagccgtctccccaaaaggaagaacaagatcgaagccttctcaggtgaaatgccaccgtgatgaggtcttgcagatcacagggaacagaataagcttggcaaaacaggttgatgtcagcattatggattgcccaaagcctttgggtggtaactcaaccttcgttccagaaggcaatactgctgcaacagcaagccaaaaggctgcttcaattctgggttcagaccaaaacattcattcgctggacaacattccaagccctgtctctgtccttgatgcatccttctaccacaaaaggatctcggattcattcaaagaagcccattatgctactcaaaggacaagcatacctagctgtcagcgtgctgataaggctagtgacagataatccgcaataaaagctaccaggtagctcgtg

SEQ ID NO: 27299 - DNA, 1907 bp, Zea Mays
gtcttcgcaggtacggactactcctctgcgaactcgtccatccccttctcctcccactgccgcgtttccttcaccgtttcctgtttcgctatggttgccgcagtgacaccggcgcccttgtccgtcgtgctggttcctccggtccccgaccatcgcgttggcatcttcgcaggtacggaattcgtcgcctccatcccgagccaccccgctccctcctttactgttgctagggttgggcctcaatcccgacccacgccgccccctcctctccagttaaatcaattcatcttcaagggtatggaacgtcgtactaacagagagatttttgtgcattgtcgcctacagatttgcgtatcgagttgttcgtcttcggttccaagatcaagtgcatccaaggtactttcatacacaatttcttgcgcaatttactgtccacatgggcacaaccaatttatatatgtgctgtcatttgtgcatattacttggagatacgagagctgggatggtcatatgtttattgttacctagggataccattgttcttttgtataagtatgatatgtgcagtgattacttctacgtttgtttgtcacaacctgtatgttcacggttcagttcattctctgtttgttacaacctgtatgttaatagcttcaaccaaactttgtcattgttagcactcaaataatgtcagtacatggaacttagattgtccccttctgtagtaaactgaccacctaaatccacatcagatggattcagcagactccatagccaacaaggcaattggaaggatgcaagagatttcggacaagatattttccgtagcgagggaaacaatccgtcctggacgtgggttgacctcatttgatgctaccaaacttcgtgtagctttggaggagatagcttgcatgctggagcaagactctctggtgttgcaagagcatttggacatcgtgaacaacgtaaacatcccggttgacagcagctatgaaccttctaccttgtcgtctccacccccatctgatgacgaccttactccacactgggactttgcggagcatttccaaaacttctggggtgttgaatatgactccgatcacatgccttcgtttagtgacaatgatgtttaaggtagaagggagtgaaccttggagttaggtgtttgaataacagggatgaattcactgtgcttttctgtagtaaggtcttagggaaacagggaatgagtttgttcttttggttaatgggctgttgtaaatgtgttccctgtccttttgtgtgcactaccagtttatttaaggttgtcgttgtgtaattaaggaaattggaatcttagtacttatggtattacctgaagttaatatggccagtatagtgttcatgtttttgttgtttttaatccgagagcactactacgtatgttgaatactatatacttgttatgcactagatggacaagtccggcaaagtgattgcaaagtgggatagtagagcaacaaaaatttacacagaaatttgtgtagaagaggtcaatgctcggaacaggccacaacaatttctaaatgcagaagggtatgctaacctcataaggaagtttaaggaacgcactggtcgcacttacaccagggatcaaatgaagaataggtgggattcgttgaagagaatgttcacccagtggaaaactcttaatgaaagggctacaggtcttggtcgagaccctcatactggttcaatcagtgcgccagatgagtggtgggccaagcaaaatgaagcaatgccaggttgtattatgttcaaaacagccccccacagtcatttaggcagttaaggaataagtttggtcactcgttggaaacaattagtcgcaagtatactgaagtccttgatgcactgtttaagatgtc

SEQ ID NO: 27300 - DNA, 1098 bp, Zea Mays
aattttagagagagatcgtcattgattcctttatattaggtgttacaaaggctccttgtgaaactcattctttctgcttccttatttgtgaattgattatttttcaaagcaacagaaatggtccatccccagcaaaatgatacaacgaacactccgggtatgttacctgtggaacctgcagaagaaccaatatatgttaatgcaaaacaataccatgcaatccttaggaggaggcaaacacgtgctaaattggaggcccagaacaagatggtgaaaaatcggaagccatatcttcatgagtcccgacatcgtcatgccatgaaacgggctcgtggatcaggaggacggttcctcaacacaaagcagctccaggagcagaaccagcagtatcaggcatcgagtggttcattgtgctcaaagatcattgccaacagcataatctcccaaagtggccccacctgcacgccctcttctggcactgcaggtgcttcaacagccggccaggaccgcagctgcttgccctcagttggcttccgccccacgacaaacttcagtgaccaaggtcgaggaggcttgaagctggccgtgatcggcatgcagcagcgtgtttccaccataaggtgaagagaagtgggcacaacaccattcccaggcacactgcctgtggcaactcatccttggctcttggaactttgaatatgcaatcgacatgtagcttgagatcctcagaataaaccaaaccttcagttatatgcaagccttttttgaggttgctgttgctgtacctgagaactgtggttaggttatgagtttgttcctcaaaactgacccatacatgacatgctaccttgtgctgagtttctgagacaaagccatcgaaacatgatcttgtggttcagtactttgctgccattagtgtctgataaactagctccccagtttgcagtttctctgaattccagcatgtctagcctcagccaacgttttgcatttgatgtgacgatgacataccatacacatttgtgcattcatctatgttctcaaagcagcactgcagagatgttaggagtgaacagaaataatgatgctcacgccgag

SEQ ID NO: 27301 - DNA, 1856 bp, Zea Mays
cttttctattctagctaggattagatggcttgaatctaaattgtgcagactctggtgattataactgtctgataaagggtcatcttgagggtgcggatatgcatgttagaacttcaggggagtgtcgagtcaggcttatcagtgcctaaacttgttgatacgagctaaaagtttgctgaagcatctttcctgtgaggacctgacaactgacatgcacaaaattagtgggataaaatgctgatccactcttggtaaaaacaaaggttctctatagtgttttccagtgtccaaacatctgagatgggaaaaaataacttgccattgatgataatgagataatccactgaaagcagataccacttggcactctgcctggaatagatgtcaatctgtaactgatagagttaatttttaggtaccagatcatctgatttctcagaagcaaaatgttgtttggagctcagtgacaccatcttgtaatgcctgtgattttacgggaaatggaggatcattctgtccatcccatgtctaagtctaaccatggctccttgtcaggaaatggttatgagatgaaacattcaggccataaagtttgcgatagggattcatcatcggagtctgatcggtctcaccaagaagcatcagcagcaagtgaaagcagtccaaatgaacacacatcaactcaatcagacaatgatgaagatcatgggaaagataatcaggacacaatgaagccagtattgtccttggggaaggaaggctctgcctttttggccccaaaattacattacagcccatcttttgcttgtattccttatacttctgatgcttattatagtgcggttggggtcttgacaggatatcctccacatgccattgtccatccccagcaaaatgatacaacgaacactccgggtatgttacctgtggaacctgcagaagaaccaatatatgttaatgcaaaacaataccatgcaatccttaggaggaggcaaacacgtgctaaattggaggcccagaacaagatggtgaaaaatcggaagccatatcttcatgagtcccgacatcgtcatgccatgaaacgggctcgtggatcaggaggacggttcctcaacacaaagcagctccaggagcagaaccagcagtatcaggcatcgagtggttcattgtgctcaaagatcattgccaacagcataatctcccaaagtggccccacctgcacgccctcttctggcactgcaggtgcttcaacagccggccaggaccgcagctgcttgccctcagttggcttccgccccacgacaaacttcagtgaccaaggtcgaggaggcttgaagctggccgtgatcggcatgcagcagcgtgtttccaccataaggtgaagagaagtgggcacaacaccattcccaggcacactgcctgtggcaactcatccttggctcttggaactttgaatatgcaatcgacatgtagcttgagatcctcagaataaaccaaaccttcagttatatgcaagccttttttgaggttgctgttgctgtacctgagaactgtggttaggttatgagtttgttcctcaaaactgacccatacatgacatgctaccttgtgctgagtttctgagacaaagccatcgaaacatgatcttgtggttcagtactttgctgccattagtgtctgataaactagctccccagtttgcagtttctctgaattccagcatgtctagcctcagccaacgttttgcatttgatgtgacgatgacataccatacacatttgtgcattcatctatgttctcaaagcagcactgcagagatgttaggagtgaacagaaataatgatgctcacgccgag

SEQ ID NO: 27302 - DNA, 1266 bp, Zea Mays
gtttgcgatagggattcatcatcggagtctgatcggtctcaccaagaagcatcagcagcaagtgaaagcagtccaaatgaacacacatcaactcaatcagacaatgatgaagatcatgggaaagataatcaggacacaatgaagccagtattgtccttggggaaggaaggctctgcctttttggccccaaaattacattacagcccatcttttgcttgtattccttatacttctgatgcttattatagtgcggttggggtcttgacaggatatcctccacatgccattgtccatccccagcaaaatgatacaacgaacactccgggtatgttacctgtggaacctgcagaagaaccaatatatgttaatgcaaaacaataccatgcaatccttaggaggaggcaaacacgtgctaaattggaggcccagaacaagatggtgaaaaatcggaagccatatcttcatgagtcccgacatcgtcatgccatgaaacgggctcgtggatcaggaggacggttcctcaacacaaagcagctccaggagcagaaccagcagtatcaggcatcgagtggttcattgtgctcaaagatcattgccaacagcataatctcccaaagtggccccacctgcacgccctcttctggcactgcaggtgcttcaacagccggccaggaccgcagctgcttgccctcagttggcttccgccccacgacaaacttcagtgaccaaggtcgaggaggcttgaagctggccgtgatcggcatgcagcagcgtgtttccaccataaggtgaagagaagtgggcacaacaccattcccaggcacactgcctgtggcaactcatccttggctcttggaactttgaatatgcaatcgacatgtagcttgagatcctcagaataaaccaaaccttcagttatatgcaagccttttttgaggttgctgttgctgtacctgagaactgtggttaggttatgagtttgttcctcaaaactgacccatacatgacatgctaccttgtgctgagtttctgagacaaagccatcgaaacatgatcttgtggttcagtactttgctgccattagtgtctgataaactagctccccagtttgcagtttctctgaattccagcatgtctagcctcagccaacgttttgcatttgatgtgacgatgacataccatacacatttgtgcattcatctatgttctcaaagcagcactgcagagatgttaggagtgaacagaaataatgatgctcacgccgag

SEQ ID NO: 27303 - DNA, 1264 bp, Zea Mays
gatacagagggattcatcatcggagtctgatcggtctcaccaagaagcatcagcagcaagtgaaagcagtccaaatgaacacacatcaactcaatcagacaatgatgaagatcatgggaaagataatcaggacacaatgaagccagtattgtccttggggaaggaaggctctgcctttttggccccaaaattacattacagcccatcttttgcttgtattccttatacttctgatgcttattatagtgcggttggggtcttgacaggatatcctccacatgccattgtccatccccagcaaaatgatacaacgaacactccgggtatgttacctgtggaacctgcagaagaaccaatatatgttaatgcaaaacaataccatgcaatccttaggaggaggcaaacacgtgctaaattggaggcccagaacaagatggtgaaaaatcggaagccatatcttcatgagtcccgacatcgtcatgccatgaaacgggctcgtggatcaggaggacggttcctcaacacaaagcagctccaggagcagaaccagcagtatcaggcatcgagtggttcattgtgctcaaagatcattgccaacagcataatctcccaaagtggccccacctgcacgccctcttctggcactgcaggtgcttcaacagccggccaggaccgcagctgcttgccctcagttggcttccgccccacgacaaacttcagtgaccaaggtcgaggaggcttgaagctggccgtgatcggcatgcagcagcgtgtttccaccataaggtgaagagaagtgggcacaacaccattcccaggcacactgcctgtggcaactcatccttggctcttggaactttgaatatgcaatcgacatgtagcttgagatcctcagaataaaccaaaccttcagttatatgcaagccttttttgaggttgctgttgctgtacctgagaactgtggttaggttatgagtttgttcctcaaaactgacccatacatgacatgctaccttgtgctgagtttctgagacaaagccatcgaaacatgatcttgtggttcagtactttgctgccattagtgtctgataaactagctccccagtttgcagtttctctgaattccagcatgtctagcctcagccaacgttttgcatttgatgtgacgatgacataccatacacatttgtgcattcatctatgttctcaaagcagcactgcagagatgttaggagtgaacagaaataatgatgctcacgccgag

SEQ ID NO: 27304 - DNA, 1844 bp, Zea Mays
ccgagcagcggagggggcggcaaaacatttcttgtttgtttattgcgccgaaaaaactaacagacccagaaaaggacagaaagaggctgcacagtaggcgcgtatatttggcagcaggagcggcctcgtcgtgccccgtatcactcctcagttgcttcgacgtatttctctctctatctatacgattccgaagaaggtagagagagaaactcgaaggggagaggacagaagagggagatacaggttaatttttaggtaccagatcatctgatttctcagaagcaaaatgttgtttggagctcagtgacaccatcttgtaatgcctgtgattttacgggaaatggaggatcattctgtccatcccatgtctaagtctaaccatgtaagtgttggtatttatgctgtcaagaccttaaaccctaaacctgtgtctgtttgccataccacagatagttagctcattagctagcctatatatgtagggctccttgtcaggaaatggttatgagatgaaacattcaggccataaagtttgcgatagggattcatcatcggagtctgatcggtctcaccaagaagcatcagcagcaagtgaaagcagtccaaatgaacacacatcaactcaatcagacaatgatgaagatcatgggaaagataatcaggacacaatgaagccagtattgtccttggggaaggaaggctctgcctttttggccccaaaattacattacagcccatcttttgcttgtattccttatacttctgatgcttattatagtgcggttggggtcttgacaggatatcctccacatgccattgtatgttcactcttaatttttcagtttctgtcttcctggccacattctgtccatccccagcaaaatgatacaacgaacactccgggtatgttacctgtggaacctgcagaagaaccaatatatgttaatgcaaaacaataccatgcaatccttaggaggaggcaaacacgtgctaaattggaggcccagaacaagatggtgaaaaatcggaagccatatcttcatgagtcccgacatcgtcatgccatgaaacgggctcgtggatcaggaggacggttcctcaacacaaagcagctccaggagcagaaccagcagtatcaggcatcgagtggttcattgtgctcaaagatcattgccaacagcataatctcccaaagtggccccacctgcacgccctcttctggcactgcaggtgcttcaacagccggccaggaccgcagctgcttgccctcagttggcttccgccccacgacaaacttcagtgaccaaggtcgaggaggcttgaagctggccgtgatcggcatgcagcagcgtgtttccaccataaggtgaagagaagtgggcacaacaccattcccaggcacactgcctgtggcaactcatccttggctcttggaactttgaatatgcaatcgacatgtagcttgagatcctcagaataaaccaaaccttcagttatatgcaagccttttttgaggttgctgttgctgtacctgagaactgtggttaggttatgagtttgttcctcaaaactgacccatacatgacatgctaccttgtgctgagtttctgagacaaagccatcgaaacatgatcttgtggttcagtactttgctgccattagtgtctgataaactagctccccagtttgcagtttctctgaattccagcatgtctagcctcagccaacgttttgcatttgatgtgacgatgacataccatacacatttgtgcattcatctatgttctcaaagcagcactgcagagatgttaggagtgaacagaaataatgatgctcacgccgag

SEQ ID NO: 27305 - DNA, 1557 bp, Zea Mays
ccgagcagcggagggggcggcaaaacatttcttgtttgtttattgcgccgaaaaaactaacagacccagaaaaggacagaaagaggctgcacagtaggcgcgtatatttggcagcaggagcggcctcgtcgtgccccgtatcactcctcagttgcttcgacgtatttctctctctatctatacgattccgaagaaggtagagagagaaactcgaaggggagaggacagaagagggagatacagggctccttgtcaggaaatggttatgagatgaaacattcaggccataaagtttgcgatagggattcatcatcggagtctgatcggtctcaccaagaagcatcagcagcaagtgaaagcagtccaaatgaacacacatcaactcaatcagacaatgatgaagatcatgggaaagataatcaggacacaatgaagccagtattgtccttggggaaggaaggctctgcctttttggccccaaaattacattacagcccatcttttgcttgtattccttatacttctgatgcttattatagtgcggttggggtcttgacaggatatcctccacatgccattgtccatccccagcaaaatgatacaacgaacactccgggtatgttacctgtggaacctgcagaagaaccaatatatgttaatgcaaaacaataccatgcaatccttaggaggaggcaaacacgtgctaaattggaggcccagaacaagatggtgaaaaatcggaagccatatcttcatgagtcccgacatcgtcatgccatgaaacgggctcgtggatcaggaggacggttcctcaacacaaagcagctccaggagcagaaccagcagtatcaggcatcgagtggttcattgtgctcaaagatcattgccaacagcataatctcccaaagtggccccacctgcacgccctcttctggcactgcaggtgcttcaacagccggccaggaccgcagctgcttgccctcagttggcttccgccccacgacaaacttcagtgaccaaggtcgaggaggcttgaagctggccgtgatcggcatgcagcagcgtgtttccaccataaggtgaagagaagtgggcacaacaccattcccaggcacactgcctgtggcaactcatccttggctcttggaactttgaatatgcaatcgacatgtagcttgagatcctcagaataaaccaaaccttcagttatatgcaagccttttttgaggttgctgttgctgtacctgagaactgtggttaggttatgagtttgttcctcaaaactgacccatacatgacatgctaccttgtgctgagtttctgagacaaagccatcgaaacatgatcttgtggttcagtactttgctgccattagtgtctgataaactagctccccagtttgcagtttctctgaattccagcatgtctagcctcagccaacgttttgcatttgatgtgacgatgacataccatacacatttgtgcattcatctatgttctcaaagcagcactgcagagatgttaggagtgaacagaaataatgatgctcacgccgag

SEQ ID NO: 27306 - DNA, 2137 bp, Zea Mays
ccgagcagcggagggggcggcaaaacatttcttgtttgtttattgcgccgaaaaaactaacagacccagaaaaggacagaaagaggctgcacagtaggcgcgtatatttggcagcaggagcggcctcgtcgtgccccgtatcactcctcagttgcttcgacgtatttctctctctatctatacgattccgaagaaggtagagagagaaactcgaaggggagaggacagaagagggagatacaggtacactgcccctgacccctcctcgattggtcagttctgttcttgagcgcactgccaccacagattggacggcttgtctgctctccgttcccggagtggcgtcgtgctcactctgctgggttgctttgccttatagtcttgctctgcggtttgatttgcttcatctttttttttcttcaatcttgtcactcctaaggtttcccccctctggttttcttgattccccgcttgggaatttgtgaagtttaacaggatttttttggctgagttcgcatgtttctgttcttggccatgcccatgctatgcttgcttggataagctttggcttcagcctagctcgcattgcacgatgcgttgttcctacttcctagaatccgatcgcaagtcctatgagctgaccactatttcgtggattgcccggggcgtgggctgctgatggtttcggcaatttgggtaccagatcatctgatttctcagaagcaaaatgttgtttggagctcagtgacaccatcttgtaatgcctgtgattttacgggaaatggaggatcattctgtccatcccatgtctaagtctaaccatggctccttgtcaggaaatggttatgagatgaaacattcaggccataaagtttgcgatagggattcatcatcggagtctgatcggtctcaccaagaagcatcagcagcaagtgaaagcagtccaaatgaacacacatcaactcaatcagacaatgatgaagatcatgggaaagataatcaggacacaatgaagccagtattgtccttggggaaggaaggctctgcctttttggccccaaaattacattacagcccatcttttgcttgtattccttatacttctgatgcttattatagtgcggttggggtcttgacaggatatcctccacatgccattgtccatccccagcaaaatgatacaacgaacactccgggtatgttacctgtggaacctgcagaagaaccaatatatgttaatgcaaaacaataccatgcaatccttaggaggaggcaaacacgtgctaaattggaggcccagaacaagatggtgaaaaatcggaagccatatcttcatgagtcccgacatcgtcatgccatgaaacgggctcgtggatcaggaggacggttcctcaacacaaagcagctccaggagcagaaccagcagtatcaggcatcgagtggttcattgtgctcaaagatcattgccaacagcataatctcccaaagtggccccacctgcacgccctcttctggcactgcaggtgcttcaacagccggccaggaccgcagctgcttgccctcagttggcttccgccccacgacaaacttcagtgaccaaggtcgaggaggcttgaagctggccgtgatcggcatgcagcagcgtgtttccaccataaggtgaagagaagtgggcacaacaccattcccaggcacactgcctgtggcaactcatccttggctcttggaactttgaatatgcaatcgacatgtagcttgagatcctcagaataaaccaaaccttcagttatatgcaagccttttttgaggttgctgttgctgtacctgagaactgtggttaggttatgagtttgttcctcaaaactgacccatacatgacatgctaccttgtgctgagtttctgagacaaagccatcgaaacatgatcttgtggttcagtactttgctgccattagtgtctgataaactagctccccagtttgcagtttctctgaattccagcatgtctagcctcagccaacgttttgcatttgatgtgacgatgacataccatacacatttgtgcattcatctatgttctcaaagcagcactgcagagatgttaggagtgaacagaaataatgatgctcacgccgag

SEQ ID NO: 27307 - DNA, 1590 bp, Zea Mays
ccgagcagcggagggggcggcaaaacatttcttgtttgtttattgcgccgaaaaaactaacagacccagaaaaggacagaaagaggctgcacagtaggcgcgtatatttggcagcaggagcggcctcgtcgtgccccgtatcactcctcagttgcttcgacgtatttctctctctatctatacgattccgaagaaggtagagagagaaactcgaaggggagaggacagaagagggagatacagatagttagctcattagctagcctatatatgtagggctccttgtcaggaaatggttatgagatgaaacattcaggccataaagtttgcgatagggattcatcatcggagtctgatcggtctcaccaagaagcatcagcagcaagtgaaagcagtccaaatgaacacacatcaactcaatcagacaatgatgaagatcatgggaaagataatcaggacacaatgaagccagtattgtccttggggaaggaaggctctgcctttttggccccaaaattacattacagcccatcttttgcttgtattccttatacttctgatgcttattatagtgcggttggggtcttgacaggatatcctccacatgccattgtccatccccagcaaaatgatacaacgaacactccgggtatgttacctgtggaacctgcagaagaaccaatatatgttaatgcaaaacaataccatgcaatccttaggaggaggcaaacacgtgctaaattggaggcccagaacaagatggtgaaaaatcggaagccatatcttcatgagtcccgacatcgtcatgccatgaaacgggctcgtggatcaggaggacggttcctcaacacaaagcagctccaggagcagaaccagcagtatcaggcatcgagtggttcattgtgctcaaagatcattgccaacagcataatctcccaaagtggccccacctgcacgccctcttctggcactgcaggtgcttcaacagccggccaggaccgcagctgcttgccctcagttggcttccgccccacgacaaacttcagtgaccaaggtcgaggaggcttgaagctggccgtgatcggcatgcagcagcgtgtttccaccataaggtgaagagaagtgggcacaacaccattcccaggcacactgcctgtggcaactcatccttggctcttggaactttgaatatgcaatcgacatgtagcttgagatcctcagaataaaccaaaccttcagttatatgcaagccttttttgaggttgctgttgctgtacctgagaactgtggttaggttatgagtttgttcctcaaaactgacccatacatgacatgctaccttgtgctgagtttctgagacaaagccatcgaaacatgatcttgtggttcagtactttgctgccattagtgtctgataaactagctccccagtttgcagtttctctgaattccagcatgtctagcctcagccaacgttttgcatttgatgtgacgatgacataccatacacatttgtgcattcatctatgttctcaaagcagcactgcagagatgttaggagtgaacagaaataatgatgctcacgccgag

SEQ ID NO: 27308 - DNA, 1734 bp, Zea Mays
ctgggttcttggtgcacctaccaatattcaaggcgggtgacgtgtgagcaccgagcagcggagggggcggcaaaacatttcttgtttgtttattgcgccgaaaaaactaacagacccagaaaaggacagaaagaggctgcacagtaggcgcgtatatttggcagcaggagcggcctcgtcgtgccccgtatcactcctcagttgcttcgacgtatttctctctctatctatacgattccgaagaaggtagagagagaaactcgaaggggagaggacagaagagggagatacaggtaccagatcatctgatttctcagaagcaaaatgttgtttggagctcagtgacaccatcttgtaatgcctgtgattttacgggaaatggaggatcattctgtccatcccatgtctaagtctaaccatggctccttgtcaggaaatggttatgagatgaaacattcaggccataaagtttgcgatagggattcatcatcggagtctgatcggtctcaccaagaagcatcagcagcaagtgaaagcagtccaaatgaacacacatcaactcaatcagacaatgatgaagatcatgggaaagataatcaggacacaatgaagccagtattgtccttggggaaggaaggctctgcctttttggccccaaaattacattacagcccatcttttgcttgtattccttatacttctgatgcttattatagtgcggttggggtcttgacaggatatcctccacatgccattgtccatccccagcaaaatgatacaacgaacactccgggtatgttacctgtggaacctgcagaagaaccaatatatgttaatgcaaaacaataccatgcaatccttaggaggaggcaaacacgtgctaaattggaggcccagaacaagatggtgaaaaatcggaagccatatcttcatgagtcccgacatcgtcatgccatgaaacgggctcgtggatcaggaggacggttcctcaacacaaagcagctccaggagcagaaccagcagtatcaggcatcgagtggttcattgtgctcaaagatcattgccaacagcataatctcccaaagtggccccacctgcacgccctcttctggcactgcaggtgcttcaacagccggccaggaccgcagctgcttgccctcagttggcttccgccccacgacaaacttcagtgaccaaggtcgaggaggcttgaagctggccgtgatcggcatgcagcagcgtgtttccaccataaggtgaagagaagtgggcacaacaccattcccaggcacactgcctgtggcaactcatccttggctcttggaactttgaatatgcaatcgacatgtagcttgagatcctcagaataaaccaaaccttcagttatatgcaagccttttttgaggttgctgttgctgtacctgagaactgtggttaggttatgagtttgttcctcaaaactgacccatacatgacatgctaccttgtgctgagtttctgagacaaagccatcgaaacatgatcttgtggttcagtactttgctgccattagtgtctgataaactagctccccagtttgcagtttctctgaattccagcatgtctagcctcagccaacgttttgcatttgatgtgacgatgacataccatacacatttgtgcattcatctatgttctcaaagcagcactgcagagatgttaggagtgaacagaaataatgatgctcacgccgag

SEQ ID NO: 27309 - DNA, 1029 bp, Zea Mays
gcgacccattttgccaaatccctcgggaagagaaatttgtcaaaatgggtcgccctcctcgcgacgcagtgcgaccacgccgccaccttcgcctgggaaccgcgaccgctccatgaagaggggatcagatttgctcatcgcgacctaccttgggggttcattttgtgttgttgggttggatggggagaagtgtcgagcacatggtgcttgcagtttggtttgttcgtgttgacaatttctctgtggggcgttgcagggaagatgggggtcgaggagaggcaggcgcagaagagctcctaggaggagcatcccaagaacctcatcgtcgatgccatgatgctggactcccgcgctgtcaatctcgacaaggggccacctgtcgctctggacaagggggctgccctaagaatgaaagcattaaggtatgcagttggatattgcattcagagaggctcaagcgatagctgcaagtagttctaccttgtgcccagttttcttgttcttttagctgagcgagaagatagtgttgcatcaagttcagttttttttgtcatcaagttgtaggctgtgtggtacatccagctgagtgagaagacaatactgcaccaagcgagaagatagtcctgcaacaactcgtgccatcggcttcctcgacggcgaacgctcgtgaccgtaggaaccatattgtagaaacatttgcgtggttgaacaatagatttcaaagtgttttatgaaaattatagagagctattggagcattgtcttttttggatttattatttttaaagagatcccaatacccttgttttggaagctataactttgtgagttgatggagatgcttttactaattctgaattccgatgctgtaacaacatatctgaagagaattgttttggttagaactaggatctctattattcattgttgtgttgttgtaataagacttgccttgcctagctatatgcttgaatggaaggttttgttgggacaacatgtaagtttgttctctatccattacataaggaa

SEQ ID NO: 27310 - DNA, 1068 bp, Zea Mays
gcgacccattttgccaaatccctcgggaagagaaatttgtcaaaatgggtcgccctcctcgcgacgcagtgcgaccacgccgccaccttcgcctgggaaccgcgaccgctccatgaagaggggatcagatttgctcatcgcgacctaccttgggggttcattttgtgttgttgggttggatggggagaagtgtcgagcacatggtgcttgcagtttggtttgttcgtgttgacaatttctctgtggggcgttgcagggaagatgggggtcgaggagaggcaggcgcagaagagctcctaggaggagcatcccaagaacctcatcgtcgatgccatgatgctggactcccgcgctgtcaatctcgacaaggggccacctgtcgctctggacaagggggctgccctaagaatgaaagcattaaggtatgcagttggatattgcattcagagaggctcaagcgatagctgcaagtagttctaccttgtgcccagttttcttgttcttttagcttacactaatggaagtcaaaatatcgtgggacatccagctgagcgagaagatagtgttgcatcaagttcagttttttttgtcatcaagttgtaggctgtgtggtacatccagctgagtgagaagacaatactgcaccaagcgagaagatagtcctgcaacaactcgtgccatcggcttcctcgacggcgaacgctcgtgaccgtaggaaccatattgtagaaacatttgcgtggttgaacaatagatttcaaagtgttttatgaaaattatagagagctattggagcattgtcttttttggatttattatttttaaagagatcccaatacccttgttttggaagctataactttgtgagttgatggagatgcttttactaattctgaattccgatgctgtaacaacatatctgaagagaattgttttggttagaactaggatctctattattcattgttgtgttgttgtaataagacttgccttgcctagctatatgcttgaatggaaggttttgttgggacaacatgtaagtttgttctctatccattacataaggaa

SEQ ID NO: 27311 - DNA, 1063 bp, Zea Mays
gcgacccattttgccaaatccctcgggaagagaaatttgtcaaaatgggtcgccctcctcgcgacgcagtgcgaccacgccgccaccttcgcctgggaaccgcgaccgctccatgaagaggggatcagatttgctcatcgcgacctaccttgggggttcattttgtgttgttgggttggatggggagaagtgtcgagcacatggtgcttgcagtttggtttgttcgtgttgacaatttctctgtggggcgttgcagggaagatgggggtcgaggagaggcaggcgcagaagagctcctaggaggagcatcccaagaacctcatcgtcgatgccatgatgctggactcccgcgctgtcaatctcgacaaggggccacctgtcgctctggacaagggggctgccctaagaatgaaagcattaaggtatgcagttggatattgcattcagagaggctcaagcgatagctgcaagtagttctaccttgtgcccagttttcttgttcttttagaaaattcttctgctacctatacctgaatgttactgatagcttacactaatggaagtcaaaatatcgtgggacatccagctgagcgagaagatagtgttgcatcaagttcagttttttttgtcatcaagttgtaggctgtgtggtacatccagctgagtgagaagacaatactgcaccaagcgagaagatagtcctgcaacaagaaccatattgtagaaacatttgcgtggttgaacaatagatttcaaagtgttttatgaaaattatagagagctattggagcattgtcttttttggatttattatttttaaagagatcccaatacccttgttttggaagctataactttgtgagttgatggagatgcttttactaattctgaattccgatgctgtaacaacatatctgaagagaattgttttggttagaactaggatctctattattcattgttgtgttgttgtaataagacttgccttgcctagctatatgcttgaatggaaggttttgttgggacaacatgtaagtttgttctctatccattacataaggaa

SEQ ID NO: 27312 - DNA, 970 bp, Zea Mays
gaacgacgaccacggtcgactgaaagagttcagagatgaagaaaatgaattggagggagaagacagcgttttgagcggccgtaagggcaaaatcggcagattgcaaagagggcccacctgccagagcagcaacttagagcgacccattttgccaaatccctcgggaagagaaatttgtcaaaatgggtcgccctcctcgcgacgcagtgcgaccacgccgccaccttcgcctgggaaccgcgaccgctccatgaagaggggatcagatttgctcatcgcgacctaccttggggggaagatgggggtcgaggagaggcaggcgcagaagagctcctaggaggagcatcccaagaacctcatcgtcgatgccatgatgctggactcccgcgctgtcaatctcgacaaggggccacctgtcgctctggacaagggggctgccctaagaatgaaagcattaaggtatgcagttggatattgcattcagagaggctcaagcgatagctgcaagtagttctaccttgtgcccagttttcttgttcttttaggtccatgaaagttcccatttttgtggtgttgcttagatggttggccctgttgactaccaaaatgacttggacttttggtgcatggataaatggactgcaagctttcttataacgtggcacatcataagaaacatacataactccaatttccgaaatatcttagtgcagaacaatgaatataagcctgtaacctctagcagagatacacaagagaagctctctttggcatttcactgaatttcctttagttggaagaatgtcgtatcactgtttatggttggcttctttaattaaaggagaacatctttctagtttctactcagttctttggttctatatagaccttaaatattgattccacatataatgggccatgtaaatctgaggtactaccttactagcaagttgtgtttctttgaatgaag

SEQ ID NO: 27313 - DNA, 450 bp, Zea Mays
gcgacccattttgccaaatccctcgggaagagaaatttgtcaaaatgggtcgccctcctcgcgacgcagtgcgaccacgccgccaccttcgcctgggaaccgcgaccgctccatgaagaggggatcagatttgctcatcgcgacctaccttgggggttcattttgtgttgttgggttggatggggagaagtgtcgagcacatggtgcttgcagtttggtttgttcgtgttgacaatttctctgtggggcgttgcagggaagatgggggtcgaggagaggcaggcgcagaagagctcctaggaggagcatcccaagaacctcatcgtcgatgccatgatgctggactcccgcgctgtcaatctcgacaaggggccacctgtcgctctggacaagggggctgccctaagatcctgtttttgcttccttcagatgaaggaacatctatcctag

SEQ ID NO: 27314 - DNA, 987 bp, Zea Mays
gatcctcctaccgtgccgccgccggcctctccaccgttcattctcctatggcatctactcacgcaagcagtcctattcctgattccttgctcggcttgcgtggcccatggattcgatgtcatatcatgtgttgtttgctcacccgcctggtcgcagttcgtgtcggatggcgtgttcttcgcggagctgaatgagatgctcgcggaggacggctactccggcgtcgaggtccgcgtcacccccatgtgcatcgagatcatcatccgtgccacccgcgcccagaacatactcgcgagaagggccggaggatcagagagctggcttctgtgattcagaagcgctttaacttatcagagggtggcgttgagctctacgcagagaagctgaacaaccgcgggctctgcgacattgcccaggccgagtcgctccgctacaagcttctcggtgaactcgccgtgagaagggcatgttatggtgttctcttatttgtcatcgagagtggtactaagggctgcgaggtatcagtttcaattggaacatgccaagctgaagcgatactcacctgcaaggagcgtcttctctgtgtactgcgtcgaagctttacctttttatgtaaattacgctgtaaatgtacagttcctctggacactgaatttctaagggctttttttatctttctgacgcaccattcactgatagctttatcgttgcatagtattttcttgaaattatatgccattctaacgaacaataatattgtagtatcattctttacaattttgattgatgacaatacaaccaaatcaatcaaataattaaataccaaaatgtaaatagaatctacttgttaggatgcaaatgtatgatataaaaagataccacttggtatttaaataaaaactttttggtcacgttaaaagcccttatctctactacttattaatatactgcaatggatagcatgtctctcacaattctacaccgtca

SEQ ID NO: 27315 - DNA, 1586 bp, Zea Mays
ctaaccttctatcgcggtacactatatatttgcactcgcacttcatcttgatcgatcctcctaccgtgccgccgccggcctctccaccgttcattctcctatggcatctactcacgcaagcagtcctattcctgattccttgctcggcttgcgtggcccatggattcgatgtcatatcatgtgttgtttgctcacccgcctggtcgcagttcgtgtcggatggcgtgttcttcgcggagctgaatgagatgctcgcggaggacggctactccggcgtcgaggtccgcgtcacccccatgtgcatcgagatcatcatccgtgccacccgcgcccagaacatactcgcgagaagggccggaggatcagagagctggcttctgtgattcagaagcgctttaacttatcagagggtggcgttgagctctacgcagagaagctgaacaaccgcgggctctgcgacattgcccaggccgagtcgctccgctacaagcttctcggtgaactcgccgtgagaaggttatgctcttgaccgtgcatctttactgttgtagtcactctcacagcaggctcggctttttgctgtgccagaccctgtgttctaactctaaggtgacgaaattgatcaccccctccattgcattttatagttagtgggagggacttattactcttccattgctcaagtgttggagggttatgtacttctgaactaggtaaattttggagatagttattttagttgtgttttgtgcatgtcatctataaagcaaataggttaccgtgtaccaactttgtgtcggaagatgactatatcacctgtgccaactggtagtgtacctctgagaagctttggtcataggcttctgagatatttatggttggccacattacttgtctgtttgtttgtttttgtatgttttgagcttgttttattattgattattactgattactgatatgtgaatctttaattgctaaaatattcttgttagtatgcttggcacggcaccttttgtttacctctagtatttaatctttactaaattggtttgtttgattttcagggcatgttatggtgttctcttatttgtcatcgagagtggtactaagggctgcgagatcagtttcaattggaacatgccaagctgaagcgatactcacctgcaaggagcgtcttctctgtgtactgcgtcgaagctttacctttttatgtaaattacgctgtaaatgtacagttcctctggacactgaatttctaagggctttttttatctttctgacgcaccattcactgatagctttatcgttgcatagtattttcttgaaattatatgccattctaacgaacaataatattgtagtatcattctttacaattttgattgatgacaatacaaccaaatcaatcaaataattaaataccaaaatgtaaatagaatctacttgttaggatgcaaatgtatgatataaaaagataccacttggtatttaaataaaaactttttggtcacgttaaaagcccttatctctactacttattaatatactgcaatggatagcatgtctctcacaattctacaccgtca

SEQ ID NO: 27316 - DNA, 2387 bp, Zea Mays
ccactcagccactaggcaccgcacaaaccctaaccttctatcgcggtacactatatatttgcactcgcacttcatcttgatcgatcctcctaccgtgccgccgccggcctctccaccgttcattctcctatggcatctactcacgcaagcagtcctattcctgattccttgctcggcttgcgtggcccatggattcgatgtcatatcatgtgttgtttgctcacccgcctggtcgcagttcgtgtcggatggcgtgttcttcgcggagctgaatgagatgctcgcggaggacggctactccggcgtcgaggtccgcgtcacccccatgtgcatcgagatcatcatccgtgccacccgcgcccagaacatactcgcgagaagggccggaggatcagagagctggcttctgtgattcagaagcgctttaacttatcagagggtggcgttgagctctacgcagagaagctgaacaaccgcgggctctgcgacattgcccaggccgagtcgctccgctacaagcttctcggtgaactcgccgtgagaagttagtgggagggacttattactcttccattgctcaagtgttggagggttatgtacttctgaactaggtaaattttggagatagttattttagttgtgttttgtgcatgtcatctataaagcaaataggttaccgtgtaccaactttgtgtcggaagatgactatatcacctgtgccaactggtagtgtacctctgagaagctttggtcataggcttctgagatatttatggttggccacattacttgtctgtttgtttgtttttgtatgttttgagcttgttttattattgattattactgattactgatatgtgaatctttaattgctaaaatattcttgttagtatgcttggcacggcaccttttgtttacctctagtatttaatctttactaaattggtttgtttgattttcagggcatgttatggtgttctcttatttgtcatcgagagtggtactaagggctgcgaggtgtgagttccacaaataaaaaccattccagtttttgtttctatctcgctgcaccatgttatcctgacaatttttgctagtgtgctatttaaactgatggaacaattacagaacactttcctttgtcgaaattcatgagtgaattgttaacctagtatggtcctgcaggatagtgtgcatcagctttgccctgttttgatgcgtcttttgctgaaagtgtttcctgctatatcaatccgagttaaatgggcagttgggttaagcatatctgctttctccgacaatcattttcctcacatgtactcaggaagttatttttttgcgttctatatgctgctgttatctgttttgttggttagctttgtcagatatatttgtttcaacgacaagttagtgtaggctagagttgaaacccaacaaaaaccatatgtcaaggttaaagcgataggctaaatctttggtatatttcatcctttcaaatctcttactgctttatgtcaacttcgaccttcctctatctctctttttattgctattgtgacttgaaagatgttagaacaggtattctacatttatgttcttctcatccggattgccatatgttttcttcagttctgcacaactagttgctctgcaggatagtgtgtatcggctttgtgctaacttatatgcattttgtgccgtaagtgtttcctgctatatagactgaaggaaagtgggcagttgggttagacttgtatcctgtcttttccaacaatcattttcctctcatgtgacataatacatttattcttggaaactagtttttgaattgctgtcttagcatttacatgtttagctgctttattatactgtatgcatccaggggtatggaatatggtctgttgcatgtgctttttcctgatcagtttcaattggaacatgccaagctgaagcgatactcacctgcaaggagcgtcttctctgtgtactgcgtcgaagctttacctttttatgtaaattacgctgtaaatgtacagttcctctggacactgaatttctaagggctttttttatctttctgacgcaccattcactgatagctttatcgttgcatagtattttcttgaaattatatgccattctaacgaacaataatattgtagtatcattctttacaattttgattgatgacaatacaaccaaatcaatcaaataattaaataccaaaatgtaaatagaatctacttgttaggatgcaaatgtatgatataaaaagataccacttggtatttaaataaaaactttttggtcacgttaaaagcccttatctctactacttattaatatactgcaatggatagcatgtctctcacaattctacaccgtca

SEQ ID NO: 27317 - DNA, 2237 bp, Zea Mays
ctgttctctaccgtttaggcttgctccggcgttgattttttctgcgttgttcttatcctgcgccgcccaactcaagcataaaactcagccgcgcccatcttctgctcgcacggaccgcgcctccttccccctgctgtagctcgcgccctgctcttctgctcgtttcttctcgcgcgaagctccctcccatggcgtcaatctcgctgttcggcagttctctggaagccgtaccctgctcgcccagctcgcgaaaccctctgcgcgcggacctctctcatccccatggcgtcttcccctgctggttcgccggcgcccgagctccctctgcccgtcaattgcctcagcccgggagttcgtctgctttccccgctcgtccttccctcaaaatcgcctgaccgcgcgacctccatggagctcccttcagttcttcgcaattcgtggccgcgtccctcagctcgctctcccatgccgcacccagcccctgctctgctcgccgtggagctcgcctccgacccctgcttgccgcgttcctgcgcgccgtcgccttgctgcgtgcgtcgtggttttcttcctctgcgcgccaggctgttccggagcttcctttgctccattccttggttgcgtgtcgagcccctcgcgcaggccgcgagctgtctgttcgccgtagtcggagccgttctcagttgctcgccgtcgaagctcccctgttggctgcgtcctgcatgtcctgcatgcgctcactcctcatccatcggtttctggcgggtttacctttagcgtcgagtcgtcaaacccgtcatcctctgctcaaacccacctcgtcagctcgctccagacataatcctgtcgtcgttctgtgcgtcgggtgaatacgaagctagccgagtaatattcatcgagtgcgtgaccaaaaagctcgaaccagtcgtcaatcgtctcaacaacaaccgtatccacgactcccaccgttccaataattttgccgcatcgcccttcaaatccgagacctcgtccgtaggatcgtcgttgacctcgcaacttcagctcgagttaattatggtaagttgatttattattcccggcaactaaataaatggtaggattaaatagaaaaatttattgcgatgattctcttgtttattactcgatgtagagattaagttaaattttagggttatgcgataaatatattggtaaatatatataatacacaggttaaccggtaaattagtttagcaagttgatgaaagttcttctatcaaattttataagtgttaggtgcccgagaattttgaagttaaaagttataagtcgtttagtgtgttctctagactaggtatgataatttatgtgttggtcgatctcatgcttggaatggatgttgattgctaccttgactgtttagctaggttgtaagaacatgattgtcgcaagtaacaatacatcgataattagtgttcgtaatgtctcgtcattaaataggttatttctcttttgcgtagcatcgtaatatctagtgttattgttccttatatgcattcatatgcataatgcatttcattcaggacgataaataatcgcgtgatgcggaaaagatgacccaagtcgaccccaagcgcgggctaatctgcaagctgaagctgatgaatcaatctgaagatggttaaatcaaacaagtgctcggtcgaagaatactcgtcaagcggacatcacctaacaacactaacctagtgttactcaggcaagccccggtgcatgcaacccctttccttgtgtttttaaataattttcgcccactttaagtctagtgaaatgtgcattaggttcataggagttgcttgaaaccctttgatgcattgctttccttgatattcatacctttatagatacttctgtgaagtatcaaactatgatttacaaaaatgcttagccttgcttagatcttgtggatagaggttgtcctcagtctaacccgggagaggatggcttctacctgcaagaatattttcattcggagcaatagtgggatcttactgcaaagttccctgtgatgctctttcaatcctaaggaacagacacaatcctaaggatggaaataattaaattgagacttgggttaggaacaggtgatgttctacccaggttggttaaggattaatgcgtatgtaggcgtgctgaccgaggaccctttaactggtcacatgcctcgtcatgggtaagccttgcctcgggcagac

SEQ ID NO: 27318 - DNA, 1731 bp, Zea Mays
ctgttctctaccgtttaggcttgctccggcgttgattttttctgcgttgttcttatcctgcgccgcccaactcaagcataaaactcagccgcgcccatcttctgctcgcacggaccgcgcctccttccccctgctgtagctcgcgccctgctcttctgctcgtttcttctcgcgcgaagctccctcccatggcgtcaatctcgctgttcggcagttctctggaagccgtaccctgctcgcccagctcgcgaaaccctctgcgcgcggacctctctcatccccatggcgtcttcccctgctggttcgccggcgcccgagctccctctgcccgtcaattgcctcagcccgggagttcgtctgctttccccgctcgtccttccctcaaaatcgcctgaccgcgcgacctccatggagctcccttcagttcttcgcaattcgtggccgcgtccctcagctcgctctcccatgccgcacccagcccctgctctgctcgccgtggagctcgcctccgacccctgcttgccgcgttcctgcgcgccgtcgccttgctgcgtgcgtcgtggttttcttcctctgcgcgccaggctgttccggagcttcctttgctccattccttggttgcgtgtcgagcccctcgcgcaggccgcgagctgtctgttcgccgtagtcggagccgttctcagttgctcgccgtcgaagctcccctgttggctgcgtcctgcatgtcctgcatgcgctcactcctcatccatcggtttctggcgggtttacctttagcgtcgagtcgtcaaacccgtcatcctctgctcaaacccacctcgtcagctcgctccagacataatcctgtcgtcgttctgtgcgtcgggtgaatacgaagctagccgagtaatattcatcgagtgcgtgaccaaaaagctcgaaccagtcgtcaatcgtctcaacaacaaccgtatccacgactcccaccgttccaataattttgccgcatcgcccttcaaatccgagacctcgtccgtaggatcgtcgttgacctcgcaacttcagctcgagttaattatggacgataaataatcgcgtgatgcggaaaagatgacccaagtcgaccccaagcgcgggctaatctgcaagctgaagctgatgaatcaatctgaagatggttaaatcaaacaagtgctcggtcgaagaatactcgtcaagcggacatcacctaacaacactaacctagtgttactcaggcaagccccggtgcatgcaacccctttccttgtgtttttaaataattttcgcccactttaagtctagtgaaatgtgcattaggttcataggagttgcttgaaaccctttgatgcattgctttccttgatattcatacctttatagatacttctgtgaagtatcaaactatgatttacaaaaatgcttagccttgcttagatcttgtggatagaggttgtcctcagtctaacccgggagaggatggcttctacctgcaagaatattttcattcggagcaatagtgggatcttactgcaaagttccctgtgatgctctttcaatcctaaggaacagacacaatcctaaggatggaaataattaaattgagacttgggttaggaacaggtgatgttctacccaggttggttaaggattaatgcgtatgtaggcgtgctgaccgaggaccctttaactggtcacatgcctcgtcatgggtaagccttgcctcgggcagac

SEQ ID NO: 27319 - DNA, 2637 bp, Zea Mays
cgccattcccagctcctagagtttcctcctccactccctcccccccgcctccactaccccactcccaggcgccgcacaggtacgtcgccggcggcgatgacgacgcgcttcaagaagaaccgcaagaagcgcggccacgtgtccgccgggcacggccgcatcggcaagcaccggaagcatcccggaggtcgcggtaacgccggtggcatgcaccaccaccgcatcctcttcgacaagtaccatcccggctacttcggtaaggtcggcatgcgctacttccacaagctccgcaacaagttctactgccccgcggtcaacatcgagcgcctctggtcgatggtgcccgccgaaaaggcggcggaagccgtcggcgacaaggccccgcagatcgacgtcacgcagttcggctacttcaaggtgctcgggaagggggtgctgccgcccaagcccatcgtcgtcaaggccaagctcatctccaaggtcgccgagaagaagatcaaagccgccggcggcgccgtcgtgctcaccgcctagttttcagtccttattcgcctcttggttttgagatctatatctggactagcagtgctttcttgtctcacctatttgtgttaagaagacgtagtttttaaatccattgctccttcctgtttggacagtgctttcatatcagatatttcaggtatattagagctaactgcgctatcaactgtgctattctcatccgttcaactgattttgtgatgcatattgcgatatctttcgtgttgtgaaactcgtatgtctcttttcttgcgctataaggttggtagaaacaatgtgaaatacgggtattgctagcttgttctctttgtattgtagagtgtagactaataaactcgactcaattctctgtgctgcgcctgctgcttgtcatgaacttggtagcgcctgctacttgtcatgaatttggtagtcttagccttaggctttgtaaatttgtagtgtgtcttgaataatttcattagtcatatgctcttgcatggaatttctatattatgaaagcagaatgaaaacggcatcggttacgccatccacgtcgtctgaaattcaggtggccgtcggatttttcgtggacgctccctagcggctcggcgtctccatgtgccgtgaaggttccagaacccacggggggtcgtcttcctccacaagattctgccaaaagatcctctcggatgcccccgcccacccatttcgccagtcgccatcgagctctcgcttccgccgcccgctgccgttgtatcaccccagtgctgagccctaggatgtgactggcggacgtctctatggccgagccgtaggtggaggcggcacctcggcaccgtgggagatggaggacgatgacaccgagggtgtaggcgagagcacctgtccccccgccgccgaccgaggaggctcctcctcggccggcggcggcggcggcgactcacacggttacactgacatcgagaaggaggtattcgaccgtctcatggagaagagaatcccggaggtcgtcgcggacccggtggccttccgcgaagagctccaccgccacttcgagcgcctgccgctgagctacgccatcgatgtgaacgtcgacaaggcggaggacgtgctgctgcaccggagcattctcaacgagtgcactgaccctgaaaatcgccccatcttccatgtgggcttcctgaactgcatcccgccctcgttggatccacagtataacactcaatccatctctataacactcaatccatctctacgagcgaaaacggtaattgtgggggttctcaggattccactttgaggtacaggctatgacccacgcactttgcaacaccatggtgaagaattttacctttggtgcaactttaaatcaacctcttgtcatctgtagtttcgattagcctttttgaaaaaaaagctgtgccttgtatgagtatttttgtggtgttatgtcttgcttgctaaaaacatatgcttatatatatgctgcacagaaaatttgagccatgtgaagggatcgaggacctcagtttaactggacaaaaggttgtgggtgactatgtggccggttcttcgaggggagatgtagaaatcctccatgttcatgaaattattttttctaccattgacaaaccaaagctcctcgctcagctatctgctttgttgtctgaagttggactgaacatccgtgaagctcatgtcttctcaacgactgatggcttttgtttggatgtatttgttgttgatggctgggatacaaagccgttgctcttgaaggttgaagccgtgttgatgacaatgatttttttttcttctcattttctgggtgccattccaacctttctatttcacattttctgggtgccagtccaacctttctatgcatgcgtgaaaaagtggaaaacatatatgaattttgtagaataggtatttggatgaaccatggggaaaacaaaggagatgatagagtgaatggtgttttatctatgttttttttgtgctgctgttctctacctagataacccattgccctagtaatctctctaatctttgtggaaatatgtacttccactattcctagtatccatgtattctaattgaactacatcgacg

SEQ ID NO: 27320 - DNA, 2041 bp, Zea Mays
gatgaaagccctgatggagatcactgacccacgggcctaccttacgcacagtttgcccgcaaagagaggagcggaggtgtatgaagccctgatggagatcactagcccacgtgcctaccttattcactgtttgcccgcagagagaggattggaggtgacagacggtgccatcgaggctcccaaatcaatcgtgttcccccaggccgagaacagaatgcacgctcagaaatagcataccatcttcaaacagcccggggaaattaccaattaacaggtagtatttgttcattgttgcgctcatattttagtgcctaatagatgcctaaggaaatgcctagatgctatgattttctcccagattctgagtttctgaatatttgtgctgcatttctaaatatttgagtttgcatacgtgctatgatttactcacagatgctagcaaagtatgtacatcagccatgcattctaattctcctactatgcgctcgaactcgctcctctaatctactgcaggggtgatattgttgaagtagatacatggattagtgctaatggtaaaaatggaatgcgtagacattggcatgtacatgattctataacaagccatacaatactaaaggtgacaaggttcaaatctacgtcgtgctcatatgtctatatctttaatcaattttattagcaatttaattctaccagctgccatgttacgtttgacacaacacttatagtttctctgctaaaaaacaacaaatcttctaggtgcaccaccggcaccctggatcattattgttattttttggtcatttattcgatatttggtgtcctcttgctcctattatcctataattcatctgcttgataatctctttttgtataatgatgttttattggcattgcaaggtttaccactgtctacaacacacaagtttggattatatcttgtgtctcataagcaatttggaaataaaaggaagtatacatttttgttatttaggtgactgatactatctatcactacaaagtagaaatcttggagttatacattttattagggagatgaagactatttatattagttttagatgcattcggtacccccttgtttttcggtgtcatgaatcatggccacatgagagagaaatacatgcacatccgcacatggaaaaaatgatacatgtgtgagtggatagttcatctatgagcataactaaattgaaccctgatgatcttaaccttagatggttatcgaaggatgacattggggatttggaccatcttcgcattggtgttgttattacatttttcatcatgttagaatttagtgtttaggaggatttatgggtggcgttttattaacaaaactgcaaatcttgtgttgcaaggatgaactcttgatttcagcgctctccagtatttactgattaggttatgaccagtagtattatttattgtgtagtgcagtacttctgacttttggtaatgtgagggtgtcggagagggaattcttcgaccgggtggcggagtgcacccgccctaaatcctaagatgaggagggggcttaagcgttttgcctgttggtagatgaacgatgaactcaggaacacgcgaggatttagagtggttcgggccgccggagcttaataccctactccactgtatgttggattgctgtgaaagcttgagagctgagagtctaagtctaagttcggtctaactgtgtctgagtctgtccctttgtaatgttgcatgcctccccttttatagctaaagaggggcgtacaagggtgctgagccccgacatgtgggcccaggaatataatggatgtaatatttggagttggtggagcaatcttcttgcaccctgacatccgcgatctgcgtggtattggcgtgcagggaaagcttccctggcaacgcataagtgatgatggacacagtgcatcttgcagcacgggcgtactgtttggcaatggactggacaggcacgccgcctgcaggatggcctggatgccgcctgccagctgagtggacaggtcacaat

SEQ ID NO: 27321 - DNA, 1802 bp, Zea Mays
gatgaaagccctgatggagatcactgacccacgggcctaccttacgcacagtttgcccgcaaagagaggagcggaggtgtatgaagccctgatggagatcactagcccacgtgcctaccttattcactgtttgcccgcagagagaggattggaggtgacagacggtgccatcgaggctcccaaatcaatcgtgttcccccaggccgagaacagaatgcacgctcagaaatagcataccatcttcaaacagcccggggaaattaccaattaacaggggtgatattgttgaagtagatacatggattagtgctaatggtaaaaatggaatgcgtagacattggcatgtacatgattctataacaagccatacaatactaaaggtgacaaggttcaaatctacgtcgtgctcatatgtctatatctttaatcaattttattagcaatttaattctaccagctgccatgttacgtttgacacaacacttatagtttctctgctaaaaaacaacaaatcttctaggtgcaccaccggcaccctggatcattattgttattttttggtcatttattcgatatttggtgtcctcttgctcctattatcctataattcatctgcttgataatctctttttgtataatgatgttttattggcattgcaaggtttaccactgtctacaacacacaagtttggattatatcttgtgtctcataagcaatttggaaataaaaggaagtatacatttttgttatttaggtgactgatactatctatcactacaaagtagaaatcttggagttatacattttattagggagatgaagactatttatattagttttagatgcattcggtacccccttgtttttcggtgtcatgaatcatggccacatgagagagaaatacatgcacatccgcacatggaaaaaatgatacatgtgtgagtggatagttcatctatgagcataactaaattgaaccctgatgatcttaaccttagatggttatcgaaggatgacattggggatttggaccatcttcgcattggtgttgttattacatttttcatcatgttagaatttagtgtttaggaggatttatgggtggcgttttattaacaaaactgcaaatcttgtgttgcaaggatgaactcttgatttcagcgctctccagtatttactgattaggttatgaccagtagtattatttattgtgtagtgcagtacttctgacttttggtaatgtgagggtgtcggagagggaattcttcgaccgggtggcggagtgcacccgccctaaatcctaagatgaggagggggcttaagcgttttgcctgttggtagatgaacgatgaactcaggaacacgcgaggatttagagtggttcgggccgccggagcttaataccctactccactgtatgttggattgctgtgaaagcttgagagctgagagtctaagtctaagttcggtctaactgtgtctgagtctgtccctttgtaatgttgcatgcctccccttttatagctaaagaggggcgtacaagggtgctgagccccgacatgtgggcccaggaatataatggatgtaatatttggagttggtggagcaatcttcttgcaccctgacatccgcgatctgcgtggtattggcgtgcagggaaagcttccctggcaacgcataagtgatgatggacacagtgcatcttgcagcacgggcgtactgtttggcaatggactggacaggcacgccgcctgcaggatggcctggatgccgcctgccagctgagtggacaggtcacaat

SEQ ID NO: 27322 - DNA, 1535 bp, Zea Mays
gatgaaagccctgatggagatcactgacccacgggcctaccttacgcacagtttgcccgcaaagagaggagcggaggtgacagactgtgccatcgaggctcccaattcaattgtgttcccccaggccgagaatagaatgcacgctcaaaaatagcataccatcttcaaatagcccgaggaaattaccaattaataggtgtatgaagccctgatggagatcactagcccacgtgcctaccttattcactgtttgcccgcagagagaggattggaggtgacagacggtgccatcgaggctcccaaatcaatcgtgttcccccaggccgagaacagaatgcacgctcagaaatagcataccatcttcaaacagcccggggaaattaccaattaacaggtttaccactgtctacaacacacaagtttggattatatcttgtgtctcataagcaatttggaaataaaaggaagtatacatttttgttatttaggtgactgatactatctatcactacaaagtagaaatcttggagttatacattttattagggagatgaagactatttatattagttttagatgcattcggtacccccttgtttttcggtgtcatgaatcatggccacatgagagagaaatacatgcacatccgcacatggaaaaaatgatacatgtgtgagtggatagttcatctatgagcataactaaattgaaccctgatgatcttaaccttagatggttatcgaaggatgacattggggatttggaccatcttcgcattggtgttgttattacatttttcatcatgttagaatttagtgtttaggaggatttatgggtggcgttttattaacaaaactgcaaatcttgtgttgcaaggatgaactcttgatttcagcgctctccagtatttactgattaggttatgaccagtagtattatttattgtgtagtgcagtacttctgacttttggtaatgtgagggtgtcggagagggaattcttcgaccgggtggcggagtgcacccgccctaaatcctaagatgaggagggggcttaagcgttttgcctgttggtagatgaacgatgaactcaggaacacgcgaggatttagagtggttcgggccgccggagcttaataccctactccactgtatgttggattgctgtgaaagcttgagagctgagagtctaagtctaagttcggtctaactgtgtctgagtctgtccctttgtaatgttgcatgcctccccttttatagctaaagaggggcgtacaagggtgctgagccccgacatgtgggcccaggaatataatggatgtaatatttggagttggtggagcaatcttcttgcaccctgacatccgcgatctgcgtggtattggcgtgcagggaaagcttccctggcaacgcataagtgatgatggacacagtgcatcttgcagcacgggcgtactgtttggcaatggactggacaggcacgccgcctgcaggatggcctggatgccgcctgccagctgagtggacaggtcacaat

SEQ ID NO: 27323 - DNA, 1415 bp, Zea Mays
gatgaaagccctgatggagatcactgacccacgggcctaccttacgcacagtttgcccgcaaagagaggagcggaggtgtatgaagccctgatggagatcactagcccacgtgcctaccttattcactgtttgcccgcagagagaggattggaggtgacagacggtgccatcgaggctcccaaatcaatcgtgttcccccaggccgagaacagaatgcacgctcagaaatagcataccatcttcaaacagcccggggaaattaccaattaacaggtttaccactgtctacaacacacaagtttggattatatcttgtgtctcataagcaatttggaaataaaaggaagtatacatttttgttatttaggtgactgatactatctatcactacaaagtagaaatcttggagttatacattttattagggagatgaagactatttatattagttttagatgcattcggtacccccttgtttttcggtgtcatgaatcatggccacatgagagagaaatacatgcacatccgcacatggaaaaaatgatacatgtgtgagtggatagttcatctatgagcataactaaattgaaccctgatgatcttaaccttagatggttatcgaaggatgacattggggatttggaccatcttcgcattggtgttgttattacatttttcatcatgttagaatttagtgtttaggaggatttatgggtggcgttttattaacaaaactgcaaatcttgtgttgcaaggatgaactcttgatttcagcgctctccagtatttactgattaggttatgaccagtagtattatttattgtgtagtgcagtacttctgacttttggtaatgtgagggtgtcggagagggaattcttcgaccgggtggcggagtgcacccgccctaaatcctaagatgaggagggggcttaagcgttttgcctgttggtagatgaacgatgaactcaggaacacgcgaggatttagagtggttcgggccgccggagcttaataccctactccactgtatgttggattgctgtgaaagcttgagagctgagagtctaagtctaagttcggtctaactgtgtctgagtctgtccctttgtaatgttgcatgcctccccttttatagctaaagaggggcgtacaagggtgctgagccccgacatgtgggcccaggaatataatggatgtaatatttggagttggtggagcaatcttcttgcaccctgacatccgcgatctgcgtggtattggcgtgcagggaaagcttccctggcaacgcataagtgatgatggacacagtgcatcttgcagcacgggcgtactgtttggcaatggactggacaggcacgccgcctgcaggatggcctggatgccgcctgccagctgagtggacaggtcacaat

SEQ ID NO: 27324 - DNA, 2233 bp, Zea Mays
ccttccccgcccgcccgcgactccggcgagaaggctccagatcccgccgccattgctcgaacagtcccggtggatgaaagccctgatggagatcactgacccacgggcctaccttacgcacagtttgcccgcaaagagaggagcggaggtgacagactgtgccatcgaggctcccaattcaattgtgttcccccaggccgagaatagaatgcacgctcaaaaatagcataccatcttcaaatagcccgaggaaattaccaattaataggtgtatgaagccctgatggagatcactagcccacgtgcctaccttattcactgtttgcccgcagagagaggattggaggtgacagacggtgccatcgaggctcccaaatcaatcgtgttcccccaggccgagaacagaatgcacgctcagaaatagcataccatcttcaaacagcccggggaaattaccaattaacaggtagtatttgttcattgttgcgctcatattttagtgcctaatagatgcctaaggaaatgcctagatgctatgattttctcccagattctgagtttctgaatatttgtgctgcatttctaaatatttgagtttgcatacgtgctatgatttactcacagatgctagcaaagtatgtacatcagccatgcattctaattctcctactatgcgctcgaactcgctcctctaatctactgcaggggtgatattgttgaagtagatacatggattagtgctaatggtaaaaatggaatgcgtagacattggcatgtacatgattctataacaagccatacaatactaaaggtgacaaggttcaaatctacgtcgtgctcatatgtctatatctttaatcaattttattagcaatttaattctaccagctgccatgttacgtttgacacaacacttatagtttctctgctaaaaaacaacaaatcttctaggtgcaccaccggcaccctggatcattattgttattttttggtcatttattcgatatttggtgtcctcttgctcctattatcctataattcatctgcttgataatctctttttgtataatgatgttttattggcattgcaaggtttaccactgtctacaacacacaagtttggattatatcttgtgtctcataagcaatttggaaataaaaggaagtatacatttttgttatttaggtgactgatactatctatcactacaaagtagaaatcttggagttatacattttattagggagatgaagactatttatattagttttagatgcattcggtacccccttgtttttcggtgtcatgaatcatggccacatgagagagaaatacatgcacatccgcacatggaaaaaatgatacatgtgtgagtggatagttcatctatgagcataactaaattgaaccctgatgatcttaaccttagatggttatcgaaggatgacattggggatttggaccatcttcgcattggtgttgttattacatttttcatcatgttagaatttagtgtttaggaggatttatgggtggcgttttattaacaaaactgcaaatcttgtgttgcaaggatgaactcttgatttcagcgctctccagtatttactgattaggttatgaccagtagtattatttattgtgtagtgcagtacttctgacttttggtaatgtgagggtgtcggagagggaattcttcgaccgggtggcggagtgcacccgccctaaatcctaagatgaggagggggcttaagcgttttgcctgttggtagatgaacgatgaactcaggaacacgcgaggatttagagtggttcgggccgccggagcttaataccctactccactgtatgttggattgctgtgaaagcttgagagctgagagtctaagtctaagttcggtctaactgtgtctgagtctgtccctttgtaatgttgcatgcctccccttttatagctaaagaggggcgtacaagggtgctgagccccgacatgtgggcccaggaatataatggatgtaatatttggagttggtggagcaatcttcttgcaccctgacatccgcgatctgcgtggtattggcgtgcagggaaagcttccctggcaacgcataagtgatgatggacacagtgcatcttgcagcacgggcgtactgtttggcaatggactggacaggcacgccgcctgcaggatggcctggatgccgcctgccagctgagtggacaggtcacaat

SEQ ID NO: 27325 - DNA, 1230 bp, Zea Mays
ccacccttcctcgctcgtccgcgactgcggcgacaagcctccagatcccgccgcctctccccgtacccacccttccccgcccgcccgcgactccggcgagaaggctccagatcccgccgccattgctcgaacagtcccggtggatgaaagccctgatggagatcactgacccacgggcctaccttacgcacagtttgcccgcaaagagaggagcggaggtgacagactgtgccatcgaggctcccaattcaattgtgttcccccaggccgagaatagaatgcacgctcaaaaatagcataccatcttcaaatagcccgaggaaattaccaattaataggtgtatgaagccctgatggagatcactagcccacgtgcctaccttattcactgtttgcccgcagagagaggattggaggtgacagacggtgccatcgaggctcccaaatcaatcgtgttcccccaggccgagaacagaatgcacgctcagaaatagcataccatcttcaaacagcccggggaaattaccaattaacaggggtgatattgttgaagtagatacatggattagtgctaatggtaaaaatggaatgcgtagacattggcatgtacatgattctataacaagccatacaatactaaaggtgacaagtacttctgacttttggtaatgtgagggtgtcggagagggaattcttcgaccgggtggcggagtgcacccgccctaaatcctaagatgaggagggggcttaagcgttttgcctgttggtagatgaacgatgaactcaggaacacgcgaggatttagagtggttcgggccgccggagcttaataccctactccactgtatgttggattgctgtgaaagcttgagagctgagagtctaagtctaagttcggtctaactgtgtctgagtctgtccctttgtaatgttgcatgcctccccttttatagctaaagaggggcgtacaagggtgctgagccccgacatgtgggcccaggaatataatggatgtaatatttggagttggtggagcaatcttcttgcaccctgacatccgcgatctgcgtggtattggcgtgcagggaaagcttccctggcaacgcataagtgatgatggacacagtgcatcttgcagcacgggcgtactgtttggcaatggactggacaggcacgccgcctgcaggatggcctggatgccgcctgccagctgagtggacaggtcacaat

SEQ ID NO: 27326 - DNA, 408 bp, Zea Mays
ccaatcaactgtacgtttagacattttttgataaggaagttgtgtttcttttaatgtgtctttgaacctgacgatttgtaagtgtcaaagaaaataccttcatcttgtcatgtaagtggatctgcataatcgaatttgtttgagcctgtgacaatatttctttcatgaggaagttgtgttccagagatttgcttgagcctgtgacaatatttctttcatgaggaatgtattaaggaacaatatttgtcatggtaattggtaaagtaaatgtttaaagttaaaaagagaaaaaaaggagttgtaagaaccttttcgttggcgtttctaatgcgatgggggaattttcaggagtattagatggtaaaacatttgtgctctgtggtgtgtgtgtgtgtgtcagtgtgaggc

SEQ ID NO: 27327 - DNA, 2499 bp, Zea Mays
attcctttttactgtgatccatttccatttctgtgatgtgctcaactttacgtttggataaaagttagtaaggtaaagtaaacacattcacaaattcaagtactgagaagaaaaattgtacgtttcaaagtagttgtccaagttatgccaacttgcttttatgtaacgacagcaagaaaactgatctaagacctgcattgtggtgaattttgcagctgtccggccgcgtgtaccgcgtcaccttcaccaaccggctcaacggggccgcaggcgcggtgccgtgaagcagatacggaccgccgggaaactgtacctccacaattacagaacaagcagagaactcactgtacacggtctcttcttgtactgaactggtattcaacttcattcaaagagttctggtaaagtataaattgtgctagaacttttgagctccttaattttcatgtagtatttttgttacttgatttttcgcctatcttgcaatagcaactttaacactgaaaaagattgcttatggccactggcaagtatgaattgatcaaattctcaaaacatatcatttgctgatttgatgaagcacgattcttaccttatttgtatctaatttgttacattcactgtttacagcttctcttgtaacattggatataatgacgctgctacatgactattattttgacatcataacctacatataaagattagagactaatctgttttttttctgaactaaggtgttaacacatttccaaatatcgaacatctatcttttagtatgcaagcattttagtttctcagaggtatactgttccccatctctgtattttatttcatccactgcccttgctaatttgtaggaaatgaacttccatcagacttgatagacacactactaaagtggatcccaagcaatgatgaggagcttaggcttcgactgtcctcccgtagcaccgccacaccgcacgcgtccgtggcggtgtatgtgtcctgtttgagcttcgcgagcttgtagaaggcacatttctgtccctacgttttacttgtttaatttgttttttttcagcgaacatgcattttggagagaccaacttgaatgtgcggagcagtcgatcacacaatattttcataatgttgaatggaagcgataactaaatcaaggatgttctatttatatcggtctcagttgcatggaagcaataactgaatcaagaatgctctatttatttcgatctcagccattttggaggacgaacgagcaccggggagagtccaggaggaggcagatactgctgggacatgtccaagccagtggagatgcagtggagatggagatcaacattggcatggagaagctgtgaaacccaccgcagcagaaccccacccagaggaagtggcctcgcgtctcgtaagagtggcagacagtgatcggcgggttctttgcgacacgggctgctcttcgaccatgagcttcttgttactattcccccgcgacatttgtttggcatttctgttaacgattttctttgtttatattacactaaagtcaaagcctgaagccacgtcggcaactggatctaccattatgacataagcagaaatctaaataacacaaaaaaatcaggattactatatatttgtgcacaaagccacgaagaattgcatgaattgtggacaaagctgaaattcaaggatgctgaaagcctgcagcagacttctgacatggagagtgtgaatcttctccaaagtggggggccatgagatcaatgttgcctcggatcaatcacaaacaaggttgtctggatacacttcagttccatatacaagcttccctgcccaggcagagctaactgttgtaggttgcagcaaaggattggatgcaaaagggcgctggacacgtgctcgtgtggcccaagtgagcatgctaatcagccccttttggttccttgcacagcttacgttcaatctgtctctaagatacaccactgtcacggtaagtgttactaagaactgaatgatacttccatattttaaagccaaacctggcccaggcaccacccaggcaccagaggcctccaaacggtcaaggatacaccactgtcacggtcaagtcctgcagaagctgaaactgatcatggataagactttgccttgtgtcacaatgggtgcatttgctggtggtccttggatcaggttgctcatgggtggtgaatgatctgacgacttcagaagaggatagatctgagattacctttcatgcatgtcaaggaagttaagtagctgatgccatcaaagaaatggagaaacgtcaggtgaaccgcgagcagaattccgtggcgcatttgttagcgcagttagttaggactctgttcatacagctgttcgattaagccaaatacctgatttagttttatattggttgttgtcaaagaatttgtgaaatattgaggttgataatatatgtggcgttcgtttttatgtaatcattgttcactaata

SEQ ID NO: 27328 - DNA, 3795 bp, Zea Mays
atgccccccgcctccatagtccctgtcatcggcgacctcagatccaacaggttggtctgcttgcgccgtgatcgcggaagctaccgcgccttcgtctccgtggatgaggtcctggatttgtgtgtcactggcgcggaatatgagggatcgagggcggcgcaggcggcgagctcgtgggcggaacagactggtgagagcaagaggatggatcaggagcttgagccccaggtacaaagactaacatcagcttctactgtactaaggagggtgttggataatccagcactccaggactatcaagagaataatggatttggagacttgaactgtccggccgcgtgtaccgcgtcaccttcaccaaccggctcaacggggccgcaggcgcggtgccgtgaagcagatacggaccgccgggaaactgtacctccacaagtaaaatatttatttagccctctgtctttgtttttttccatattctaagtttatacctaataacacatttgcacatacttgatgcatttgtctatggtattttctttttataaagtgaatcatcttgacaatgaaatagtgcatttatcagttttgtaatgggacatcactcctcaagtatccagaaggtaaactagatgtatttctcatacatcaattgggcaagtctgagagatagctgtcccaatttgtccagaaatttatttacctgtacctccacaagtaaaatatgtatttagccctctatctttgtttttttccatattctaagtttatacccgatgtataaatctacagatactttcttacctttgtttagttacgataaactttatccatcaattattttgtatacttttctaacctatgtaaatttagaggttaatttggactgtttaatatttaaatgttgtgggtggattaaggggttatttagtgttttaagtacaaacagaggaggacaattcatgcacatactttagctttttattgcaatgatagataatttatatgaagtttaggacttattttggatataatatgtcagaatgacagagattcacctgataggcgagcatgagttctcgctaaaatgtagcattgagtattgactgcagttcagtaagtaaattaaagcatgatagtattgttgatccagtgaacccttcatcctatattctctttgagctaatcttcttgcaccttgatgtaaaccttgacatatctgatggttctgctcagtgcttgtgtcttagattattgcactgacgtaattggaaaatgagtaatctgccaggaagcaacatattgtgttttactgaagtacagttagtcctgctgtcgcacaactttgctctgatgtttgaaagcataaagtatgttttcctaccatgggagaggtccaactgatattgcatctggatcttttgtgaaacatgatagcacttagcaacgctaggcagaagatgcacttttgaaatgtagtgttgcaccgttgctgtcgcaatcgttagttacacatatgttctctatatgctgtcagatatccatatctcttaatggtcgtacctaccaatttgattctgataaaaatcaatcaatctattagttacagaacaagcagagaactcactgtacacggtctcttcttgtactgaactggtattcaacttcattcaaagagttctggtaaagtataaattgtgctagaacttttgagctccttaattttcatgtagtatttttgttacttgatttttcgcctatcttgcaatagcaactttaacactgaaaaagattgcttatggccactggcaagtatgaattgatcaaattctcaaaacatatcatttgctgatttgatgaagcacgattcttaccttatttgtatctaatttgttacattcactgtttacagcttctcttgtaacattggatataatgacgctgctacatgactattattttgacatcataacctacatataaagattagagactaatctgttttttttctgaactaaggtgttaacacatttccaaatatcgaacatctatcttttagtatgcaagcattttagtttctcagaggtatactgttccccatctctgtattttatttcatccactgcccttgctaatttgtaggaaatgaacttccatcagacttgatagacacactactaaagtggatcccaagcaatgatgaggagcttaggcttcgactgtcctcccgtagcaccgccacaccgcacgcgtccgtggcggtgtatgtgtcctgtttgagcttcgcgagcttgtagaaggcacatttctgtccctacgttttacttgtttaatttgttttttttcagcgaacatgcattttggagagaccaacttgaatgtgcggagcagtcgatcacacaatattttcataatggtaattgtgagcagcagtagagactaagcagttctgtaattgcatttgttctaagatcattttctgtagttgcatggaagcaataactgaatcaagaatgctctatttatttcgatctcagccattttggaggacgaacgagcaccggggagagtccaggaggaggcagatactgctgggacatgtccaagccagtggagatgcagtggagatggagatcaacattggcatggagaagctgtgaaacccaccgcagcagaaccccacccagaggaagtggcctcgcgtctcgtaagagtggcagacagtgatcggcgggttctttgcgacacgggctgctcttcgaccatgagcttcttgttactattcccccgcgacatttgtttggcatttctgttaacgattttctttgtttatattacactaaagtcaaagcctgaagccacgtcggcaactggatctaccattatgacataagcagaaatctaaataacacaaaaaaatcaggattactatatatttgtgcacaaagccacgaagaattgcatgaattgtggacaaagctgaaattcaaggatgctgaaagcctgcagcagacttctgacatggagagtgtgaatcttctccaaagtggggggccatgagatcaatgttgcctcggatcaatcacaaacaaggttgtctggatacacttcagttccatatacaagcttccctgcccaggcagagctaactgttgtaggttgcagcaaaggattggatgcaaaagggcgctggacacgtgctcgtgtggcccaagtgagcatgctaatcagccccttttggttccttgcacagcttacgttcaatctgtctctaagatacaccactgtcacggtaagtgttactaagaactgaatgatacttccatattttaaagccaaacctggcccaggcaccacccaggcaccagaggcctccaaacggtcaaggatacaccactgtcacggtcaagtcctgcagaagctgaaactgatcatggataagactttgccttgtgtcacaatgggtgcatttgctggtggtccttggatcaggttgctcatgggtggtgaatgatctgacgacttcagaagaggatagatctgagattacctttcatgcatgtcaaggaagttaagtagctgatgccatcaaagaaatggagaaacgtcaggtgaaccgcgagcagaattccgtggcgcatttgttagcgcagttagttaggactctgttcatacagctgttcgattaagccaaatacctgatttagttttatattggttgttgtcaaagaatttgtgaaatattgaggttgataatatatgtggcgttcgtttttatgtaatcattgttcactaata

SEQ ID NO: 27329 - DNA, 3031 bp, Zea Mays
atgccccccgcctccatagtccctgtcatcggcgacctcagatccaacaggttggtctgcttgcgccgtgatcgcggaagctaccgcgccttcgtctccgtggatgaggtcctggatttgtgtgtcactggcgcggaatatgagggatcgagggcggcgcaggcggcgagctcgtgggcggaacagactggtgagagcaagaggatggatcaggagcttgagccccaggtacaaagactaacatcagcttctactgtactaaggagggtgttggataatccagcactccaggactatcaagagaataatggatttggagacttgaactgtccggccgcgtgtaccgcgtcaccttcaccaaccggctcaacggggccgcaggcgcggtgccgtgaagcagatacggaccgccgggaaactgtacctccacaattttgtaatgggacatcactcctcaagtatccagaaggtaaactagatgtatttctcatacatcaattgggcaagtctgagagatagctgtcccaatttgtccagaaatttatttacctgtacctccacaagtaaaatatgtatttagccctctatctttgtttttttccatattctaagtttatacccgatgtataaatctacagatactttcttacctttgtttagttacgataaactttatccatcaattattttgtatacttttctaacctatgtaaatttagaggttaatttggactgtttaatatttaaatgttgtgggtggattaaggggttatttagtgttttaagtacaaacagaggaggacaattcatgcacatactttagctttttattgcaatgatagataatttatatgaagtttaggacttattttggatataatatgtcagaatgacagagattcacctgataggcgagcatgagttctcgctaaaatgtagcattgagtattgactgcagttcagtaagtaaattaaagcatgatagtattgttgatccagtgaacccttcatcctatattctctttgagctaatcttcttgcaccttgatgtaaaccttgacatatctgatggttctgctcagtgcttgtgtcttagattattgcactgacgtaattggaaaatgagtaatctgccaggaagcaacatattgtgttttactgaagtacagttagtcctgctgtcgcacaactttgctctgatgtttgaaagcataaagtatgttttcctaccatgggagaggtccaactgatattgcatctggatcttttgtgaaacatgatagcacttagcaacgctaggcagaagatgcacttttgaaatgtagtgttgcaccgttgctgtcgcaatcgttagttacacatatgttctctatatgctgtcagatatccatatctcttaatggtcgtacctaccaatttgattctgataaaaatcaatcaatctattagttacagaacaagcagagaactcactgtacacggtctcttcttgtactgaactggtattcaacttcattcaaagagttctggaaatgaacttccatcagacttgatagacacactactaaagtggatcccaagcaatgatgaggagcttaggcttcgactgtcctcccgtagcaccgccacaccgcacgcgtccgtggcggtcgaacatgcattttggagagaccaacttgaatgtgcggagcagtcgatcacacaatattttcataatgttgaatggaagcgataactaaatcaaggatgttctatttatatcggtctcagccattttggaggacgaacgagcaccggggagagtccaggaggaggcagatactgctgggacatgtccaagccagtggagatgcagtggagatggagatcaacattggcatggagaagctgtgaaacccaccgcagcagaaccccacccagaggaagtggcctcgcgtctcgtaagagtggcagacagtgatcggcgggttctttgcgacacgggctgctcttcgaccatgagcttcttgttactattcccccgcgacatttgtttggcatttctgttaacgattttctttgtttatattacactaaagtcaaagcctgaagccacgtcggcaactggatctaccattatgacataagcagaaatctaaataacacaaaaaaatcaggattactatatatttgtgcacaaagccacgaagaattgcatgaattgtggacaaagctgaaattcaaggatgctgaaagcctgcagcagacttctgacatggagagtgtgaatcttctccaaagtggggggccatgagatcaatgttgcctcggatcaatcacaaacaaggttgtctggatacacttcagttccatatacaagcttccctgcccaggcagagctaactgttgtaggttgcagcaaaggattggatgcaaaagggcgctggacacgtgctcgtgtggcccaagtgagcatgctaatcagccccttttggttccttgcacagcttacgttcaatctgtctctaagatacaccactgtcacggtaagtgttactaagaactgaatgatacttccatattttaaagccaaacctggcccaggcaccacccaggcaccagaggcctccaaacggtcaaggatacaccactgtcacggtcaagtcctgcagaagctgaaactgatcatggataagactttgccttgtgtcacaatgggtgcatttgctggtggtccttggatcaggttgctcatgggtggtgaatgatctgacgacttcagaagaggatagatctgagattacctttcatgcatgtcaaggaagttaagtagctgatgccatcaaagaaatggagaaacgtcaggtgaaccgcgagcagaattccgtggcgcatttgttagcgcagttagttaggactctgttcatacagctgttcgattaagccaaatacctgatttagttttatattggttgttgtcaaagaatttgtgaaatattgaggttgataatatatgtggcgttcgtttttatgtaatcattgttcactaata

SEQ ID NO: 27330 - DNA, 1865 bp, Zea Mays
atgccccccgcctccatagtccctgtcatcggcgacctcagatccaacaggttggtctgcttgcgccgtgatcgcggaagctaccgcgccttcgtctccgtggatgaggtcctggatttgtgtgtcactggcgcggaatatgagggatcgagggcggcgcaggcggcgagctcgtgggcggaacagactggtgagagcaagaggatggatcaggagcttgagccccaggtacaaagactaacatcagcttctactgtactaaggagggtgttggataatccagcactccaggactatcaagagaataatggatttggagacttgaactgtccggccgcgtgtaccgcgtcaccttcaccaaccggctcaacggggccgcaggcgcggtgccgtgaagcagatacggaccgccgggaaactgtacctccacaagaaatgaacttccatcagacttgatagacacactactaaagtggatcccaagcaatgatgaggagcttaggcttcgactgtcctcccgtagcaccgccacaccgcacgcgtccgtggcggtcgaacatgcattttggagagaccaacttgaatgtgcggagcagtcgatcacacaatattttcataatgttgaatggaagcgataactaaatcaaggatgttctatttatatcggtctcagttgcatggaagcaataactgaatcaagaatgctctatttatttcgatctcagccattttggaggacgaacgagcaccggggagagtccaggaggaggcagatactgctgggacatgtccaagccagtggagatgcagtggagatggagatcaacattggcatggagaagctgtgaaacccaccgcagcagaaccccacccagaggaagtggcctcgcgtctcgtaagagtggcagacagtgatcggcgggttctttgcgacacgggctgctcttcgaccatgagcttcttgttactattcccccgcgacatttgtttggcatttctgttaacgattttctttgtttatattacactaaagtcaaagcctgaagccacgtcggcaactggatctaccattatgacataagcagaaatctaaataacacaaaaaaatcaggattactatatatttgtgcacaaagccacgaagaattgcatgaattgtggacaaagctgaaattcaaggatgctgaaagcctgcagcagacttctgacatggagagtgtgaatcttctccaaagtggggggccatgagatcaatgttgcctcggatcaatcacaaacaaggttgtctggatacacttcagttccatatacaagcttccctgcccaggcagagctaactgttgtaggttgcagcaaaggattggatgcaaaagggcgctggacacgtgctcgtgtggcccaaccaaacctggcccaggcaccacccaggcaccagaggcctccaaacggtcaaggatacaccactgtcacggtcaagtcctgcagaagctgaaactgatcatggataagactttgccttgtgtcacaatgggtgcatttgctggtggtccttggatcaggttgctcatgggtggtgaatgatctgacgacttcagaagaggatagatctgagattacctttcatgcatgtcaaggaagttaagtagctgatgccatcaaagaaatggagaaacgtcaggtgaaccgcgagcagaattccgtggcgcatttgttagcgcagttagttaggactctgttcatacagctgttcgattaagccaaatacctgatttagttttatattggttgttgtcaaagaatttgtgaaatattgaggttgataatatatgtggcgttcgtttttatgtaatcattgttcactaata

SEQ ID NO: 27331 - DNA, 4730 bp, Zea Mays
atgccccccgcctccatagtccctgtcatcggcgacctcagatccaacaggttggtctgcttgcgccgtgatcgcggaagctaccgcgccttcgtctccgtggatgaggtcctggatttgtgtgtcactggcgcggaatatgagggatcgagggcggcgcaggcggcgagctcgtgggcggaacagactggtgagagcaagaggatggatcaggagcttgagccccaggtaagccattctgaaaatctgtatcgcgctgatttacccgctttaggatttgtagttgtcgttcgtttctcaatgcgcttggttatcgatactgctatctcatggtctcagttcagctgagttcacttaactaggaccagcatgtgcagtagaaaatctctggttaattatgggtccttataacctccgttcgttgcttgaatttctcgttatatgtggcatgttcattcaagttgtttacttacaatcacataatgcttgcggtgttacatgggacatgctaatttctttggatgttagcatgtgaacttgtgagtcagttcattgctcatttcattgaacctatgctgccatgctggtgaagagacaatgaagcagccagttggtgttataaacacaatacacctcgctcccagctccgcattcgcctccgcctcagatccctacagcgtgatgcgagggaacagcaaccgtgcggcctccccatcctgagcacctcaaatccgatgcccctccccaagccattccctcggccacgacagcgacggcaacgagcatggcccccctctaccacctatgcctttccatttgtggcctccgcatcgccccaacgttgacccctccgtcctccccctctactcccagcgcagcgccggttttagctttggaaattgctgatcgattaattatggggggaagcgtctctacttccttctcggttggtcaaggtatccccttcctgtgtcctctctcctctgtgtagatggcgaatttgtggagtccgaataatctgaatgttctcgcattctttacataatcccttgccaatttatggcaagttttatttgctccatttgttttatggtatgatgatctagatctgatgagcccattcaaattcttttgccgagccgccgtccctctttttctactgtttgtttgtgcatcggaattgctggatctataccaaaatctgaaaagtgtaggccatacagagaattaagaagttgtcttgacctcactggacccagagactactcatcaccagaggaaatggtacaaagactaacatcagcttctactgtactaaggagggtgttggataatccagcactccaggactatcaagagaataatggatttggagacttgaactgtccggccgcgtgtaccgcgtcaccttcaccaaccggctcaacggggccgcaggcgcggtgccgtgaagcagatacggaccgccgggaaactgtacctccacaagtaaaatatttatttagccctctgtctttgtttttttccatattctaagtttatacctaataacacatttgcacatacttgatgcatttgtctatggtattttctttttataaagtgaatcatcttgacaatgaaatagtgcatttatcagttttgtaatgggacatcactcctcaagtatccagaaggtaaactagatgtatttctcatacatcaattgggcaagtctgagagatagctgtcccaatttgtccagaaatttatttacctgtacctccacaagtaaaatatgtatttagccctctatctttgtttttttccatattctaagtttatacccgatgtataaatctacagatactttcttacctttgtttagttacgataaactttatccatcaattattttgtatacttttctaacctatgtaaatttagaggttaatttggactgtttaatatttaaatgttgtgggtggattaaggggttatttagtgttttaagtacaaacagaggaggacaattcatgcacatactttagctttttattgcaatgatagataatttatatgaagtttaggacttattttggatataatatgtcagaatgacagagattcacctgataggcgagcatgagttctcgctaaaatgtagcattgagtattgactgcagttcagtaagtaaattaaagcatgatagtattgttgatccagtgaacccttcatcctatattctctttgagctaatcttcttgcaccttgatgtaaaccttgacatatctgatggttctgctcagtgcttgtgtcttagattattgcactgacgtaattggaaaatgagtaatctgccaggaagcaacatattgtgttttactgaagtacagttagtcctgctgtcgcacaactttgctctgatgtttgaaagcataaagtatgttttcctaccatgggagaggtccaactgatattgcatctggatcttttgtgaaacatgatagcacttagcaacgctaggcagaagatgcacttttgaaatgtagtgttgcaccgttgctgtcgcaatcgttagttacacatatgttctctatatgctgtcagatatccatatctcttaatggtcgtacctaccaatttgattctgataaaaatcaatcaatctattagttacagaacaagcagagaactcactgtacacggtctcttcttgtactgaactggtattcaacttcattcaaagagttctggtaaagtataaattgtgctagaacttttgagctccttaattttcatgtagtatttttgttacttgatttttcgcctatcttgcaatagcaactttaacactgaaaaagattgcttatggccactggcaagtatgaattgatcaaattctcaaaacatatcatttgctgatttgatgaagcacgattcttaccttatttgtatctaatttgttacattcactgtttacagcttctcttgtaacattggatataatgacgctgctacatgactattattttgacatcataacctacatataaagattagagactaatctgttttttttctgaactaaggtgttaacacatttccaaatatcgaacatctatcttttagtatgcaagcattttagtttctcagaggtatactgttccccatctctgtattttatttcatccactgcccttgctaatttgtaggaaatgaacttccatcagacttgatagacacactactaaagtggatcccaagcaatgatgaggagcttaggcttcgactgtcctcccgtagcaccgccacaccgcacgcgtccgtggcggtgtatgtgtcctgtttgagcttcgcgagcttgtagaaggcacatttctgtccctacgttttacttgtttaatttgttttttttcagcgaacatgcattttggagagaccaacttgaatgtgcggagcagtcgatcacacaatattttcataatgccattttggaggacgaacgagcaccggggagagtccaggaggaggcagatactgctgggacatgtccaagccagtggagatgcagtggagatggagatcaacattggcatggagaagctgtgaaacccaccgcagcagaaccccacccagaggaagtggcctcgcgtctcgtaagagtggcagacagtgatcggcgggttctttgcgacacgggctgctcttcgaccatgagcttcttgttactattcccccgcgacatttgtttggcatttctgttaacgattttctttgtttatattacactaaagtcaaagcctgaagccacgtcggcaactggatctaccattatgacataagcagaaatctaaataacacaaaaaaatcaggattactatatatttgtgcacaaagccacgaagaattgcatgaattgtggacaaagctgaaattcaaggatgctgaaagcctgcagcagacttctgacatggagagtgtgaatcttctccaaagtggggggccatgagatcaatgttgcctcggatcaatcacaaacaaggttgtctggatacacttcagttccatatacaagcttccctgcccaggcagagctaactgttgtaggttgcagcaaaggattggatgcaaaagggcgctggacacgtgctcgtgtggcccaagtgagcatgctaatcagccccttttggttccttgcacagcttacgttcaatctgtctctaagatacaccactgtcacggtaagtgttactaagaactgaatgatacttccatattttaaagccaaacctggcccaggcaccacccaggcaccagaggcctccaaacggtcaaggatacaccactgtcacggtcaagtcctgcagaagctgaaactgatcatggataagactttgccttgtgtcacaatgggtgcatttgctggtggtccttggatcaggttgctcatgggtggtgaatgatctgacgacttcagaagaggatagatctgagattacctttcatgcatgtcaaggaagttaagtagctgatgccatcaaagaaatggagaaacgtcaggtgaaccgcgagcagaattccgtggcgcatttgttagcgcagttagttaggactctgttcatacagctgttcgattaagccaaatacctgatttagttttatattggttgttgtcaaagaatttgtgaaatattgaggttgataatatatgtggcgttcgtttttatgtaatcattgttcactaata

SEQ ID NO: 27332 - DNA, 4782 bp, Zea Mays
atgccccccgcctccatagtccctgtcatcggcgacctcagatccaacaggttggtctgcttgcgccgtgatcgcggaagctaccgcgccttcgtctccgtggatgaggtcctggatttgtgtgtcactggcgcggaatatgagggatcgagggcggcgcaggcggcgagctcgtgggcggaacagactggtgagagcaagaggatggatcaggagcttgagccccaggtaagccattctgaaaatctgtatcgcgctgatttacccgctttaggatttgtagttgtcgttcgtttctcaatgcgcttggttatcgatactgctatctcatggtctcagttcagctgagttcacttaactaggaccagcatgtgcagtagaaaatctctggttaattatgggtccttataacctccgttcgttgcttgaatttctcgttatatgtggcatgttcattcaagttgtttacttacaatcacataatgcttgcggtgttacatgggacatgctaatttctttggatgttagcatgtgaacttgtgagtcagttcattgctcatttcattgaacctatgctgccatgctggtgaagagacaatgaagcagccagttggtgttataaacacaatacacctcgctcccagctccgcattcgcctccgcctcagatccctacagcgtgatgcgagggaacagcaaccgtgcggcctccccatcctgagcacctcaaatccgatgcccctccccaagccattccctcggccacgacagcgacggcaacgagcatggcccccctctaccacctatgcctttccatttgtggcctccgcatcgccccaacgttgacccctccgtcctccccctctactcccagcgcagcgccggttttagctttggaaattgctgatcgattaattatggggggaagcgtctctacttccttctcggttggtcaaggtatccccttcctgtgtcctctctcctctgtgtagatggcgaatttgtggagtccgaataatctgaatgttctcgcattctttacataatcccttgccaatttatggcaagttttatttgctccatttgttttatggtatgatgatctagatctgatgagcccattcaaattcttttgccgagccgccgtccctctttttctactgtttgtttgtgcatcggaattgctggatctataccaaaatctgaaaagtgtaggccatacagagaattaagaagttgtcttgacctcactggacccagagactactcatcaccagaggaaatggtacaaagactaacatcagcttctactgtactaaggagggtgttggataatccagcactccaggactatcaagagaataatggatttggagacttgaactgtccggccgcgtgtaccgcgtcaccttcaccaaccggctcaacggggccgcaggcgcggtgccgtgaagcagatacggaccgccgggaaactgtacctccacaagtaaaatatttatttagccctctgtctttgtttttttccatattctaagtttatacctaataacacatttgcacatacttgatgcatttgtctatggtattttctttttataaagtgaatcatcttgacaatgaaatagtgcatttatcagttttgtaatgggacatcactcctcaagtatccagaaggtaaactagatgtatttctcatacatcaattgggcaagtctgagagatagctgtcccaatttgtccagaaatttatttacctgtacctccacaagtaaaatatgtatttagccctctatctttgtttttttccatattctaagtttatacccgatgtataaatctacagatactttcttacctttgtttagttacgataaactttatccatcaattattttgtatacttttctaacctatgtaaatttagaggttaatttggactgtttaatatttaaatgttgtgggtggattaaggggttatttagtgttttaagtacaaacagaggaggacaattcatgcacatactttagctttttattgcaatgatagataatttatatgaagtttaggacttattttggatataatatgtcagaatgacagagattcacctgataggcgagcatgagttctcgctaaaatgtagcattgagtattgactgcagttcagtaagtaaattaaagcatgatagtattgttgatccagtgaacccttcatcctatattctctttgagctaatcttcttgcaccttgatgtaaaccttgacatatctgatggttctgctcagtgcttgtgtcttagattattgcactgacgtaattggaaaatgagtaatctgccaggaagcaacatattgtgttttactgaagtacagttagtcctgctgtcgcacaactttgctctgatgtttgaaagcataaagtatgttttcctaccatgggagaggtccaactgatattgcatctggatcttttgtgaaacatgatagcacttagcaacgctaggcagaagatgcacttttgaaatgtagtgttgcaccgttgctgtcgcaatcgttagttacacatatgttctctatatgctgtcagatatccatatctcttaatggtcgtacctaccaatttgattctgataaaaatcaatcaatctattagttacagaacaagcagagaactcactgtacacggtctcttcttgtactgaactggtattcaacttcattcaaagagttctggtaaagtataaattgtgctagaacttttgagctccttaattttcatgtagtatttttgttacttgatttttcgcctatcttgcaatagcaactttaacactgaaaaagattgcttatggccactggcaagtatgaattgatcaaattctcaaaacatatcatttgctgatttgatgaagcacgattcttaccttatttgtatctaatttgttacattcactgtttacagcttctcttgtaacattggatataatgacgctgctacatgactattattttgacatcataacctacatataaagattagagactaatctgttttttttctgaactaaggtgttaacacatttccaaatatcgaacatctatcttttagtatgcaagcattttagtttctcagaggtatactgttccccatctctgtattttatttcatccactgcccttgctaatttgtaggaaatgaacttccatcagacttgatagacacactactaaagtggatcccaagcaatgatgaggagcttaggcttcgactgtcctcccgtagcaccgccacaccgcacgcgtccgtggcggtgtatgtgtcctgtttgagcttcgcgagcttgtagaaggcacatttctgtccctacgttttacttgtttaatttgttttttttcagcgaacatgcattttggagagaccaacttgaatgtgcggagcagtcgatcacacaatattttcataatgttgaatggaagcgataactaaatcaaggatgttctatttatatcggtctcagccattttggaggacgaacgagcaccggggagagtccaggaggaggcagatactgctgggacatgtccaagccagtggagatgcagtggagatggagatcaacattggcatggagaagctgtgaaacccaccgcagcagaaccccacccagaggaagtggcctcgcgtctcgtaagagtggcagacagtgatcggcgggttctttgcgacacgggctgctcttcgaccatgagcttcttgttactattcccccgcgacatttgtttggcatttctgttaacgattttctttgtttatattacactaaagtcaaagcctgaagccacgtcggcaactggatctaccattatgacataagcagaaatctaaataacacaaaaaaatcaggattactatatatttgtgcacaaagccacgaagaattgcatgaattgtggacaaagctgaaattcaaggatgctgaaagcctgcagcagacttctgacatggagagtgtgaatcttctccaaagtggggggccatgagatcaatgttgcctcggatcaatcacaaacaaggttgtctggatacacttcagttccatatacaagcttccctgcccaggcagagctaactgttgtaggttgcagcaaaggattggatgcaaaagggcgctggacacgtgctcgtgtggcccaagtgagcatgctaatcagccccttttggttccttgcacagcttacgttcaatctgtctctaagatacaccactgtcacggtaagtgttactaagaactgaatgatacttccatattttaaagccaaacctggcccaggcaccacccaggcaccagaggcctccaaacggtcaaggatacaccactgtcacggtcaagtcctgcagaagctgaaactgatcatggataagactttgccttgtgtcacaatgggtgcatttgctggtggtccttggatcaggttgctcatgggtggtgaatgatctgacgacttcagaagaggatagatctgagattacctttcatgcatgtcaaggaagttaagtagctgatgccatcaaagaaatggagaaacgtcaggtgaaccgcgagcagaattccgtggcgcatttgttagcgcagttagttaggactctgttcatacagctgttcgattaagccaaatacctgatttagttttatattggttgttgtcaaagaatttgtgaaatattgaggttgataatatatgtggcgttcgtttttatgtaatcattgttcactaata

SEQ ID NO: 27333 - DNA, 1898 bp, Zea Mays
atgccccccgcctccatagtccctgtcatcggcgacctcagatccaacaggttggtctgcttgcgccgtgatcgcggaagctaccgcgccttcgtctccgtggatgaggtcctggatttgtgtgtcactggcgcggaatatgagggatcgagggcggcgcaggcggcgagctcgtgggcggaacagactggtgagagcaagaggatggatcaggagcttgagccccaggtacaaagactaacatcagcttctactgtactaaggagggtgttggataatccagcactccaggactatcaagagaataatggatttggagacttgaactgtccggccgcgtgtaccgcgtcaccttcaccaaccggctcaacggggccgcaggcgcggtgccgtgaagcagatacggaccgccgggaaactgtacctccacaagaaatgaacttccatcagacttgatagacacactactaaagtggatcccaagcaatgatgaggagcttaggcttcgactgtcctcccgtagcaccgccacaccgcacgcgtccgtggcggtgtatgtgtcctgtttgagcttcgcgagcttgtagaaggcacatttctgtccctacgttttacttgtttaatttgttttttttcagcgaacatgcattttggagagaccaacttgaatgtgcggagcagtcgatcacacaatattttcataatgttgcatggaagcaataactgaatcaagaatgctctatttatttcgatctcagccattttggaggacgaacgagcaccggggagagtccaggaggaggcagatactgctgggacatgtccaagccagtggagatgcagtggagatggagatcaacattggcatggagaagctgtgaaacccaccgcagcagaaccccacccagaggaagtggcctcgcgtctcgtaagagtggcagacagtgatcggcgggttctttgcgacacgggctgctcttcgaccatgagcttcttgttactattcccccgcgacatttgtttggcatttctgttaacgattttctttgtttatattacactaaagtcaaagcctgaagccacgtcggcaactggatctaccattatgacataagcagaaatctaaataacacaaaaaaatcaggattactatatatttgtgcacaaagccacgaagaattgcatgaattgtggacaaagctgaaattcaaggatgctgaaagcctgcagcagacttctgacatggagagtgtgaatcttctccaaagtggggggccatgagatcaatgttgcctcggatcaatcacaaacaaggttgtctggatacacttcagttccatatacaagcttccctgcccaggcagagctaactgttgtaggttgcagcaaaggattggatgcaaaagggcgctggacacgtgctcgtgtggcccaaccaaacctggcccaggcaccacccaggcaccagaggcctccaaacggtcaaggatacaccactgtcacggtcaagtcctgcagaagctgaaactgatcatggataagactttgccttgtgtcacaatgggtgcatttgctggtggtccttggatcaggttgctcatgggtggtgaatgatctgacgacttcagaagaggatagatctgagattacctttcatgcatgtcaaggaagttaagtagctgatgccatcaaagaaatggagaaacgtcaggtgaaccgcgagcagaattccgtggcgcatttgttagcgcagttagttaggactctgttcatacagctgttcgattaagccaaatacctgatttagttttatattggttgttgtcaaagaatttgtgaaatattgaggttgataatatatgtggcgttcgtttttatgtaatcattgttcactaata

SEQ ID NO: 27334 - DNA, 2157 bp, Zea Mays
atgccccccgcctccatagtccctgtcatcggcgacctcagatccaacaggttggtctgcttgcgccgtgatcgcggaagctaccgcgccttcgtctccgtggatgaggtcctggatttgtgtgtcactggcgcggaatatgagggatcgagggcggcgcaggcggcgagctcgtgggcggaacagactggtgagagcaagaggatggatcaggagcttgagccccaggtacaaagactaacatcagcttctactgtactaaggagggtgttggataatccagcactccaggactatcaagagaataatggatttggagacttgaagttaagccttactgtttaggacttcactctcccagtgacacctactttacctgctgtttttgctgtatcctggcaatattcctttttactgtgatccatttccatttctgtgatgtgctcaactttacgtttggataaaagttagtaaggtaaagtaaacacattcacaaattcaagtactgagaagaaaaattgtacgtttcaaagtagttgtccaagttatgccaacttgcttttatgtaacgacagcaagaaaactgatctaagacctgcattgtggtgaattttgcagctgtccggccgcgtgtaccgcgtcaccttcaccaaccggctcaacggggccgcaggcgcggtgccgtgaagcagatacggaccgccgggaaactgtacctccacaagaaatgaacttccatcagacttgatagacacactactaaagtggatcccaagcaatgatgaggagcttaggcttcgactgtcctcccgtagcaccgccacaccgcacgcgtccgtggcggtcgaacatgcattttggagagaccaacttgaatgtgcggagcagtcgatcacacaatattttcataatgttgaatggaagcgataactaaatcaaggatgttctatttatatcggtctcagttgcatggaagcaataactgaatcaagaatgctctatttatttcgatctcagccattttggaggacgaacgagcaccggggagagtccaggaggaggcagatactgctgggacatgtccaagccagtggagatgcagtggagatggagatcaacattggcatggagaagctgtgaaacccaccgcagcagaaccccacccagaggaagtggcctcgcgtctcgtaagagtggcagacagtgatcggcgggttctttgcgacacgggctgctcttcgaccatgagcttcttgttactattcccccgcgacatttgtttggcatttctgttaacgattttctttgtttatattacactaaagtcaaagcctgaagccacgtcggcaactggatctaccattatgacataagcagaaatctaaataacacaaaaaaatcaggattactatatatttgtgcacaaagccacgaagaattgcatgaattgtggacaaagctgaaattcaaggatgctgaaagcctgcagcagacttctgacatggagagtgtgaatcttctccaaagtggggggccatgagatcaatgttgcctcggatcaatcacaaacaaggttgtctggatacacttcagttccatatacaagcttccctgcccaggcagagctaactgttgtaggttgcagcaaaggattggatgcaaaagggcgctggacacgtgctcgtgtggcccaaccaaacctggcccaggcaccacccaggcaccagaggcctccaaacggtcaaggatacaccactgtcacggtcaagtcctgcagaagctgaaactgatcatggataagactttgccttgtgtcacaatgggtgcatttgctggtggtccttggatcaggttgctcatgggtggtgaatgatctgacgacttcagaagaggatagatctgagattacctttcatgcatgtcaaggaagttaagtagctgatgccatcaaagaaatggagaaacgtcaggtgaaccgcgagcagaattccgtggcgcatttgttagcgcagttagttaggactctgttcatacagctgttcgattaagccaaatacctgatttagttttatattggttgttgtcaaagaatttgtgaaatattgaggttgataatatatgtggcgttcgtttttatgtaatcattgttcactaata

SEQ ID NO: 27335 - DNA, 3234 bp, Zea Mays
atgccccccgcctccatagtccctgtcatcggcgacctcagatccaacaggttggtctgcttgcgccgtgatcgcggaagctaccgcgccttcgtctccgtggatgaggtcctggatttgtgtgtcactggcgcggaatatgagggatcgagggcggcgcaggcggcgagctcgtgggcggaacagactggtgagagcaagaggatggatcaggagcttgagccccaggtacaaagactaacatcagcttctactgtactaaggagggtgttggataatccagcactccaggactatcaagagaataatggatttggagacttgaactgtccggccgcgtgtaccgcgtcaccttcaccaaccggctcaacggggccgcaggcgcggtgccgtgaagcagatacggaccgccgggaaactgtacctccacaagtaaaatatttatttagccctctgtctttgtttttttccatattctaagtttatacctaataacacatttgcacatacttgatgcatttgtctatggtattttctttttataaagtgaatcatcttgacaatgaaatagtgcatttatcagttttgtaatgggacatcactcctcaagtatccagaaggtaaactagatgtatttctcatacatcaattgggcaagtctgagagatagctgtcccaatttgtccagaaatttatttacctgtacctccacaagtaaaatatgtatttagccctctatctttgtttttttccatattctaagtttatacccgatgtataaatctacagatactttcttacctttgtttagttacgataaactttatccatcaattattttgtatacttttctaacctatgtaaatttagaggttaatttggactgtttaatatttaaatgttgtgggtggattaaggggttatttagtgttttaagtacaaacagaggaggacaattcatgcacatactttagctttttattgcaatgatagataatttatatgaagtttaggacttattttggatataatatgtcagaatgacagagattcacctgataggcgagcatgagttctcgctaaaatgtagcattgagtattgactgcagttcagtaagtaaattaaagcatgatagtattgttgatccagtgaacccttcatcctatattctctttgagctaatcttcttgcaccttgatgtaaaccttgacatatctgatggttctgctcagtgcttgtgtcttagattattgcactgacgtaattggaaaatgagtaatctgccaggaagcaacatattgtgttttactgaagtacagttagtcctgctgtcgcacaactttgctctgatgtttgaaagcataaagtatgttttcctaccatgggagaggtccaactgatattgcatctggatcttttgtgaaacatgatagcacttagcaacgctaggcagaagatgcacttttgaaatgtagtgttgcaccgttgctgtcgcaatcgttagttacacatatgttctctatatgctgtcagatatccatatctcttaatggtcgtacctaccaatttgattctgataaaaatcaatcaatctattagttacagaacaagcagagaactcactgtacacggtctcttcttgtactgaactggtattcaacttcattcaaagagttctggaaatgaacttccatcagacttgatagacacactactaaagtggatcccaagcaatgatgaggagcttaggcttcgactgtcctcccgtagcaccgccacaccgcacgcgtccgtggcggtcgaacatgcattttggagagaccaacttgaatgtgcggagcagtcgatcacacaatattttcataatgttgaatggaagcgataactaaatcaaggatgttctatttatatcggtctcagttgcatggaagcaataactgaatcaagaatgctctatttatttcgatctcagccattttggaggacgaacgagcaccggggagagtccaggaggaggcagatactgctgggacatgtccaagccagtggagatgcagtggagatggagatcaacattggcatggagaagctgtgaaacccaccgcagcagaaccccacccagaggaagtggcctcgcgtctcgtaagagtggcagacagtgatcggcgggttctttgcgacacgggctgctcttcgaccatgagcttcttgttactattcccccgcgacatttgtttggcatttctgttaacgattttctttgtttatattacactaaagtcaaagcctgaagccacgtcggcaactggatctaccattatgacataagcagaaatctaaataacacaaaaaaatcaggattactatatatttgtgcacaaagccacgaagaattgcatgaattgtggacaaagctgaaattcaaggatgctgaaagcctgcagcagacttctgacatggagagtgtgaatcttctccaaagtggggggccatgagatcaatgttgcctcggatcaatcacaaacaaggttgtctggatacacttcagttccatatacaagcttccctgcccaggcagagctaactgttgtaggttgcagcaaaggattggatgcaaaagggcgctggacacgtgctcgtgtggcccaagtgagcatgctaatcagccccttttggttccttgcacagcttacgttcaatctgtctctaagatacaccactgtcacggtaagtgttactaagaactgaatgatacttccatattttaaagccaaacctggcccaggcaccacccaggcaccagaggcctccaaacggtcaaggatacaccactgtcacggtcaagtcctgcagaagctgaaactgatcatggataagactttgccttgtgtcacaatgggtgcatttgctggtggtccttggatcaggttgctcatgggtggtgaatgatctgacgacttcagaagaggatagatctgagattacctttcatgcatgtcaaggaagttaagtagctgatgccatcaaagaaatggagaaacgtcaggtgaaccgcgagcagaattccgtggcgcatttgttagcgcagttagttaggactctgttcatacagctgttcgattaagccaaatacctgatttagttttatattggttgttgtcaaagaatttgtgaaatattgaggttgataatatatgtggcgttcgtttttatgtaatcattgttcactaata

SEQ ID NO: 27336 - DNA, 2105 bp, Zea Mays
atgccccccgcctccatagtccctgtcatcggcgacctcagatccaacaggttggtctgcttgcgccgtgatcgcggaagctaccgcgccttcgtctccgtggatgaggtcctggatttgtgtgtcactggcgcggaatatgagggatcgagggcggcgcaggcggcgagctcgtgggcggaacagactggtgagagcaagaggatggatcaggagcttgagccccaggtacaaagactaacatcagcttctactgtactaaggagggtgttggataatccagcactccaggactatcaagagaataatggatttggagacttgaagttaagccttactgtttaggacttcactctcccagtgacacctactttacctgctgtttttgctgtatcctggcaatattcctttttactgtgatccatttccatttctgtgatgtgctcaactttacgtttggataaaagttagtaaggtaaagtaaacacattcacaaattcaagtactgagaagaaaaattgtacgtttcaaagtagttgtccaagttatgccaacttgcttttatgtaacgacagcaagaaaactgatctaagacctgcattgtggtgaattttgcagctgtccggccgcgtgtaccgcgtcaccttcaccaaccggctcaacggggccgcaggcgcggtgccgtgaagcagatacggaccgccgggaaactgtacctccacaagaaatgaacttccatcagacttgatagacacactactaaagtggatcccaagcaatgatgaggagcttaggcttcgactgtcctcccgtagcaccgccacaccgcacgcgtccgtggcggtcgaacatgcattttggagagaccaacttgaatgtgcggagcagtcgatcacacaatattttcataatgttgcatggaagcaataactgaatcaagaatgctctatttatttcgatctcagccattttggaggacgaacgagcaccggggagagtccaggaggaggcagatactgctgggacatgtccaagccagtggagatgcagtggagatggagatcaacattggcatggagaagctgtgaaacccaccgcagcagaaccccacccagaggaagtggcctcgcgtctcgtaagagtggcagacagtgatcggcgggttctttgcgacacgggctgctcttcgaccatgagcttcttgttactattcccccgcgacatttgtttggcatttctgttaacgattttctttgtttatattacactaaagtcaaagcctgaagccacgtcggcaactggatctaccattatgacataagcagaaatctaaataacacaaaaaaatcaggattactatatatttgtgcacaaagccacgaagaattgcatgaattgtggacaaagctgaaattcaaggatgctgaaagcctgcagcagacttctgacatggagagtgtgaatcttctccaaagtggggggccatgagatcaatgttgcctcggatcaatcacaaacaaggttgtctggatacacttcagttccatatacaagcttccctgcccaggcagagctaactgttgtaggttgcagcaaaggattggatgcaaaagggcgctggacacgtgctcgtgtggcccaaccaaacctggcccaggcaccacccaggcaccagaggcctccaaacggtcaaggatacaccactgtcacggtcaagtcctgcagaagctgaaactgatcatggataagactttgccttgtgtcacaatgggtgcatttgctggtggtccttggatcaggttgctcatgggtggtgaatgatctgacgacttcagaagaggatagatctgagattacctttcatgcatgtcaaggaagttaagtagctgatgccatcaaagaaatggagaaacgtcaggtgaaccgcgagcagaattccgtggcgcatttgttagcgcagttagttaggactctgttcatacagctgttcgattaagccaaatacctgatttagttttatattggttgttgtcaaagaatttgtgaaatattgaggttgataatatatgtggcgttcgtttttatgtaatcattgttcactaata

SEQ ID NO: 27337 - DNA, 3443 bp, Zea Mays
atgccccccgcctccatagtccctgtcatcggcgacctcagatccaacaggttggtctgcttgcgccgtgatcgcggaagctaccgcgccttcgtctccgtggatgaggtcctggatttgtgtgtcactggcgcggaatatgagggatcgagggcggcgcaggcggcgagctcgtgggcggaacagactggtgagagcaagaggatggatcaggagcttgagccccaggtacaaagactaacatcagcttctactgtactaaggagggtgttggataatccagcactccaggactatcaagagaataatggatttggagacttgaagttaagccttactgtttaggacttcactctcccagtgacacctactttacctgctgtttttgctgtatcctggcaatattcctttttactgtgatccatttccatttctgtgatgtgctcaactttacgtttggataaaagttagtaaggtaaagtaaacacattcacaaattcaagtactgagaagaaaaattgtacgtttcaaagtagttgtccaagttatgccaacttgcttttatgtaacgacagcaagaaaactgatctaagacctgcattgtggtgaattttgcagctgtccggccgcgtgtaccgcgtcaccttcaccaaccggctcaacggggccgcaggcgcggtgccgtgaagcagatacggaccgccgggaaactgtacctccacaagtaaaatatttatttagccctctgtctttgtttttttccatattctaagtttatacctaataacacatttgcacatacttgatgcatttgtctatggtattttctttttataaagtgaatcatcttgacaatgaaatagtgcatttatcagttttgtaatgggacatcactcctcaagtatccagaaggtaaactagatgtatttctcatacatcaattgggcaagtctgagagatagctgtcccaatttgtccagaaatttatttacctgtacctccacaagtaaaatatgtatttagccctctatctttgtttttttccatattctaagtttatacccgatgtataaatctacagatactttcttacctttgtttagttacgataaactttatccatcaattattttgtatacttttctaacctatgtaaatttagaggttaatttggactgtttaatatttaaatgttgtgggtggattaaggggttatttagtgttttaagtacaaacagaggaggacaattcatgcacatactttagctttttattgcaatgatagataatttatatgaagtttaggacttattttggatataatatgtcagaatgacagagattcacctgataggcgagcatgagttctcgctaaaatgtagcattgagtattgactgcagttcagtaagtaaattaaagcatgatagtattgttgatccagtgaacccttcatcctatattctctttgagctaatcttcttgcaccttgatgtaaaccttgacatatctgatggttctgctcagtgcttgtgtcttagattattgcactgacgtaattggaaaatgagtaatctgccaggaagcaacatattgtgttttactgaagtacagttagtcctgctgtcgcacaactttgctctgatgtttgaaagcataaacttctcttgtaacattggatataatgacgctgctacatgactattattttgacatcataacctacatataaagattagagactaatctgttttttttctgaactaaggtgttaacacatttccaaatatcgaacatctatcttttagtatgcaagcattttagtttctcagaggtatactgttccccatctctgtattttatttcatccactgcccttgctaatttgtaggaaatgaacttccatcagacttgatagacacactactaaagtggatcccaagcaatgatgaggagcttaggcttcgactgtcctcccgtagcaccgccacaccgcacgcgtccgtggcggtcgaacatgcattttggagagaccaacttgaatgtgcggagcagtcgatcacacaatattttcataatgttgaatggaagcgataactaaatcaaggatgttctatttatatcggtctcagttgcatggaagcaataactgaatcaagaatgctctatttatttcgatctcagccattttggaggacgaacgagcaccggggagagtccaggaggaggcagatactgctgggacatgtccaagccagtggagatgcagtggagatggagatcaacattggcatggagaagctgtgaaacccaccgcagcagaaccccacccagaggaagtggcctcgcgtctcgtaagagtggcagacagtgatcggcgggttctttgcgacacgggctgctcttcgaccatgagcttcttgttactattcccccgcgacatttgtttggcatttctgttaacgattttctttgtttatattacactaaagtcaaagcctgaagccacgtcggcaactggatctaccattatgacataagcagaaatctaaataacacaaaaaaatcaggattactatatatttgtgcacaaagccacgaagaattgcatgaattgtggacaaagctgaaattcaaggatgctgaaagcctgcagcagacttctgacatggagagtgtgaatcttctccaaagtggggggccatgagatcaatgttgcctcggatcaatcacaaacaaggttgtctggatacacttcagttccatatacaagcttccctgcccaggcagagctaactgttgtaggttgcagcaaaggattggatgcaaaagggcgctggacacgtgctcgtgtggcccaagtgagcatgctaatcagccccttttggttccttgcacagcttacgttcaatctgtctctaagatacaccactgtcacggtaagtgttactaagaactgaatgatacttccatattttaaagccaaacctggcccaggcaccacccaggcaccagaggcctccaaacggtcaaggatacaccactgtcacggtcaagtcctgcagaagctgaaactgatcatggataagactttgccttgtgtcacaatgggtgcatttgctggtggtccttggatcaggttgctcatgggtggtgaatgatctgacgacttcagaagaggatagatctgagattacctttcatgcatgtcaaggaagttaagtagctgatgccatcaaagaaatggagaaacgtcaggtgaaccgcgagcagaattccgtggcgcatttgttagcgcagttagttaggactctgttcatacagctgttcgattaagccaaatacctgatttagttttatattggttgttgtcaaagaatttgtgaaatattgaggttgataatatatgtggcgttcgtttttatgtaatcattgttcactaata

SEQ ID NO: 27338 - DNA, 3693 bp, Zea Mays
atgccccccgcctccatagtccctgtcatcggcgacctcagatccaacaggttggtctgcttgcgccgtgatcgcggaagctaccgcgccttcgtctccgtggatgaggtcctggatttgtgtgtcactggcgcggaatatgagggatcgagggcggcgcaggcggcgagctcgtgggcggaacagactggtgagagcaagaggatggatcaggagcttgagccccaggtacaaagactaacatcagcttctactgtactaaggagggtgttggataatccagcactccaggactatcaagagaataatggatttggagacttgaactgtccggccgcgtgtaccgcgtcaccttcaccaaccggctcaacggggccgcaggcgcggtgccgtgaagcagatacggaccgccgggaaactgtacctccacaagtaaaatatttatttagccctctgtctttgtttttttccatattctaagtttatacctaataacacatttgcacatacttgatgcatttgtctatggtattttctttttataaagtgaatcatcttgacaatgaaatagtgcatttatcagttttgtaatgggacatcactcctcaagtatccagaaggtaaactagatgtatttctcatacatcaattgggcaagtctgagagatagctgtcccaatttgtccagaaatttatttacctgtacctccacaagtaaaatatgtatttagccctctatctttgtttttttccatattctaagtttatacccgatgtataaatctacagatactttcttacctttgtttagttacgataaactttatccatcaattattttgtatacttttctaacctatgtaaatttagaggttaatttggactgtttaatatttaaatgttgtgggtggattaaggggttatttagtgttttaagtacaaacagaggaggacaattcatgcacatactttagctttttattgcaatgatagataatttatatgaagtttaggacttattttggatataatatgtcagaatgacagagattcacctgataggcgagcatgagttctcgctaaaatgtagcattgagtattgactgcagttcagtaagtaaattaaagcatgatagtattgttgatccagtgaacccttcatcctatattctctttgagctaatcttcttgcaccttgatgtaaaccttgacatatctgatggttctgctcagtgcttgtgtcttagattattgcactgacgtaattggaaaatgagtaatctgccaggaagcaacatattgtgttttactgaagtacagttagtcctgctgtcgcacaactttgctctgatgtttgaaagcataaagtatgttttcctaccatgggagaggtccaactgatattgcatctggatcttttgtgaaacatgatagcacttagcaacgctaggcagaagatgcacttttgaaatgtagtgttgcaccgttgctgtcgcaatcgttagttacacatatgttctctatatgctgtcagatatccatatctcttaatggtcgtacctaccaatttgattctgataaaaatcaatcaatctattagttacagaacaagcagagaactcactgtacacggtctcttcttgtactgaactggtattcaacttcattcaaagagttctggtaaagtataaattgtgctagaacttttgagctccttaattttcatgtagtatttttgttacttgatttttcgcctatcttgcaatagcaactttaacactgaaaaagattgcttatggccactggcaagtatgaattgatcaaattctcaaaacatatcatttgctgatttgatgaagcacgattcttaccttatttgtatctaatttgttacattcactgtttacagcttctcttgtaacattggatataatgacgctgctacatgactattattttgacatcataacctacatataaagattagagactaatctgttttttttctgaactaaggtgttaacacatttccaaatatcgaacatctatcttttagtatgcaagcattttagtttctcagaggtatactgttccccatctctgtattttatttcatccactgcccttgctaatttgtaggaaatgaacttccatcagacttgatagacacactactaaagtggatcccaagcaatgatgaggagcttaggcttcgactgtcctcccgtagcaccgccacaccgcacgcgtccgtggcggtcgaacatgcattttggagagaccaacttgaatgtgcggagcagtcgatcacacaatattttcataatgttgaatggaagcgataactaaatcaaggatgttctatttatatcggtctcagttgcatggaagcaataactgaatcaagaatgctctatttatttcgatctcagccattttggaggacgaacgagcaccggggagagtccaggaggaggcagatactgctgggacatgtccaagccagtggagatgcagtggagatggagatcaacattggcatggagaagctgtgaaacccaccgcagcagaaccccacccagaggaagtggcctcgcgtctcgtaagagtggcagacagtgatcggcgggttctttgcgacacgggctgctcttcgaccatgagcttcttgttactattcccccgcgacatttgtttggcatttctgttaacgattttctttgtttatattacactaaagtcaaagcctgaagccacgtcggcaactggatctaccattatgacataagcagaaatctaaataacacaaaaaaatcaggattactatatatttgtgcacaaagccacgaagaattgcatgaattgtggacaaagctgaaattcaaggatgctgaaagcctgcagcagacttctgacatggagagtgtgaatcttctccaaagtggggggccatgagatcaatgttgcctcggatcaatcacaaacaaggttgtctggatacacttcagttccatatacaagcttccctgcccaggcagagctaactgttgtaggttgcagcaaaggattggatgcaaaagggcgctggacacgtgctcgtgtggcccaagtgagcatgctaatcagccccttttggttccttgcacagcttacgttcaatctgtctctaagatacaccactgtcacggtaagtgttactaagaactgaatgatacttccatattttaaagccaaacctggcccaggcaccacccaggcaccagaggcctccaaacggtcaaggatacaccactgtcacggtcaagtcctgcagaagctgaaactgatcatggataagactttgccttgtgtcacaatgggtgcatttgctggtggtccttggatcaggttgctcatgggtggtgaatgatctgacgacttcagaagaggatagatctgagattacctttcatgcatgtcaaggaagttaagtagctgatgccatcaaagaaatggagaaacgtcaggtgaaccgcgagcagaattccgtggcgcatttgttagcgcagttagttaggactctgttcatacagctgttcgattaagccaaatacctgatttagttttatattggttgttgtcaaagaatttgtgaaatattgaggttgataatatatgtggcgttcgtttttatgtaatcattgttcactaata

SEQ ID NO: 27339 - DNA, 3474 bp, Zea Mays
atgccccccgcctccatagtccctgtcatcggcgacctcagatccaacaggttggtctgcttgcgccgtgatcgcggaagctaccgcgccttcgtctccgtggatgaggtcctggatttgtgtgtcactggcgcggaatatgagggatcgagggcggcgcaggcggcgagctcgtgggcggaacagactggtgagagcaagaggatggatcaggagcttgagccccaggtacaaagactaacatcagcttctactgtactaaggagggtgttggataatccagcactccaggactatcaagagaataatggatttggagacttgaagttaagccttactgtttaggacttcactctcccagtgacacctactttacctgctgtttttgctgtatcctggcaatattcctttttactgtgatccatttccatttctgtgatgtgctcaactttacgtttggataaaagttagtaaggtaaagtaaacacattcacaaattcaagtactgagaagaaaaattgtacgtttcaaagtagttgtccaagttatgccaacttgcttttatgtaacgacagcaagaaaactgatctaagacctgcattgtggtgaattttgcagctgtccggccgcgtgtaccgcgtcaccttcaccaaccggctcaacggggccgcaggcgcggtgccgtgaagcagatacggaccgccgggaaactgtacctccacaagtaaaatatttatttagccctctgtctttgtttttttccatattctaagtttatacctaataacacatttgcacatacttgatgcatttgtctatggtattttctttttataaagtgaatcatcttgacaatgaaatagtgcatttatcagttttgtaatgggacatcactcctcaagtatccagaaggtaaactagatgtatttctcatacatcaattgggcaagtctgagagatagctgtcccaatttgtccagaaatttatttacctgtacctccacaagtaaaatatgtatttagccctctatctttgtttttttccatattctaagtttatacccgatgtataaatctacagatactttcttacctttgtttagttacgataaactttatccatcaattattttgtatacttttctaacctatgtaaatttagaggttaatttggactgtttaatatttaaatgttgtgggtggattaaggggttatttagtgttttaagtacaaacagaggaggacaattcatgcacatactttagctttttattgcaatgatagataatttatatgaagtttaggacttattttggatataatatgtcagaatgacagagattcacctgataggcgagcatgagttctcgctaaaatgtagcattgagtattgactgcagttcagtaagtaaattaaagcatgatagtattgttgatccagtgaacccttcatcctatattctctttgagctaatcttcttgcaccttgatgtaaaccttgacatatctgatggttctgctcagtgcttgtgtcttagattattgcactgacgtaattggaaaatgagtaatctgccaggaagcaacatattgtgttttactgaagtacagttagtcctgctgtcgcacaactttgctctgatgtttgaaagcataaagtatgttttcctaccatgggagaggtccaactgatattgcatctggatcttttgtgaaacatgatagcacttagcaacgctaggcagaagatgcacttttgaaatgtagtgttgcaccgttgctgtcgcaatcgttagttacacatatgttctctatatgctgtcagatatccatatctcttaatggtcgtacctaccaatttgattctgataaaaatcaatcaatctattagttacagaacaagcagagaactcactgtacacggtctcttcttgtactgaactggtattcaacttcattcaaagagttctggaaatgaacttccatcagacttgatagacacactactaaagtggatcccaagcaatgatgaggagcttaggcttcgactgtcctcccgtagcaccgccacaccgcacgcgtccgtggcggtcgaacatgcattttggagagaccaacttgaatgtgcggagcagtcgatcacacaatattttcataatgttgcatggaagcaataactgaatcaagaatgctctatttatttcgatctcagccattttggaggacgaacgagcaccggggagagtccaggaggaggcagatactgctgggacatgtccaagccagtggagatgcagtggagatggagatcaacattggcatggagaagctgtgaaacccaccgcagcagaaccccacccagaggaagtggcctcgcgtctcgtaagagtggcagacagtgatcggcgggttctttgcgacacgggctgctcttcgaccatgagcttcttgttactattcccccgcgacatttgtttggcatttctgttaacgattttctttgtttatattacactaaagtcaaagcctgaagccacgtcggcaactggatctaccattatgacataagcagaaatctaaataacacaaaaaaatcaggattactatatatttgtgcacaaagccacgaagaattgcatgaattgtggacaaagctgaaattcaaggatgctgaaagcctgcagcagacttctgacatggagagtgtgaatcttctccaaagtggggggccatgagatcaatgttgcctcggatcaatcacaaacaaggttgtctggatacacttcagttccatatacaagcttccctgcccaggcagagctaactgttgtaggttgcagcaaaggattggatgcaaaagggcgctggacacgtgctcgtgtggcccaagtgagcatgctaatcagccccttttggttccttgcacagcttacgttcaatctgtctctaagatacaccactgtcacggtaagtgttactaagaactgaatgatacttccatattttaaagccaaacctggcccaggcaccacccaggcaccagaggcctccaaacggtcaaggatacaccactgtcacggtcaagtcctgcagaagctgaaactgatcatggataagactttgccttgtgtcacaatgggtgcatttgctggtggtccttggatcaggttgctcatgggtggtgaatgatctgacgacttcagaagaggatagatctgagattacctttcatgcatgtcaaggaagttaagtagctgatgccatcaaagaaatggagaaacgtcaggtgaaccgcgagcagaattccgtggcgcatttgttagcgcagttagttaggactctgttcatacagctgttcgattaagccaaatacctgatttagttttatattggttgttgtcaaagaatttgtgaaatattgaggttgataatatatgtggcgttcgtttttatgtaatcattgttcactaata

SEQ ID NO: 27340 - DNA, 2358 bp, Zea Mays
atgccccccgcctccatagtccctgtcatcggcgacctcagatccaacaggttggtctgcttgcgccgtgatcgcggaagctaccgcgccttcgtctccgtggatgaggtcctggatttgtgtgtcactggcgcggaatatgagggatcgagggcggcgcaggcggcgagctcgtgggcggaacagactggtgagagcaagaggatggatcaggagcttgagccccaggtacaaagactaacatcagcttctactgtactaaggagggtgttggataatccagcactccaggactatcaagagaataatggatttggagacttgaagttaagccttactgtttaggacttcactctcccagtgacacctactttacctgctgtttttgctgtatcctggcaatattcctttttactgtgatccatttccatttctgtgatgtgctcaactttacgtttggataaaagttagtaaggtaaagtaaacacattcacaaattcaagtactgagaagaaaaattgtacgtttcaaagtagttgtccaagttatgccaacttgcttttatgtaacgacagcaagaaaactgatctaagacctgcattgtggtgaattttgcagctgtccggccgcgtgtaccgcgtcaccttcaccaaccggctcaacggggccgcaggcgcggtgccgtgaagcagatacggaccgccgggaaactgtacctccacaattacagaacaagcagagaactcactgtacacggtctcttcttgtactgaactggtattcaacttcattcaaagagttctggaaatgaacttccatcagacttgatagacacactactaaagtggatcccaagcaatgatgaggagcttaggcttcgactgtcctcccgtagcaccgccacaccgcacgcgtccgtggcggtcgaacatgcattttggagagaccaacttgaatgtgcggagcagtcgatcacacaatattttcataatgttgaatggaagcgataactaaatcaaggatgttctatttatatcggtctcagttgcatggaagcaataactgaatcaagaatgctctatttatttcgatctcagccattttggaggacgaacgagcaccggggagagtccaggaggaggcagatactgctgggacatgtccaagccagtggagatgcagtggagatggagatcaacattggcatggagaagctgtgaaacccaccgcagcagaaccccacccagaggaagtggcctcgcgtctcgtaagagtggcagacagtgatcggcgggttctttgcgacacgggctgctcttcgaccatgagcttcttgttactattcccccgcgacatttgtttggcatttctgttaacgattttctttgtttatattacactaaagtcaaagcctgaagccacgtcggcaactggatctaccattatgacataagcagaaatctaaataacacaaaaaaatcaggattactatatatttgtgcacaaagccacgaagaattgcatgaattgtggacaaagctgaaattcaaggatgctgaaagcctgcagcagacttctgacatggagagtgtgaatcttctccaaagtggggggccatgagatcaatgttgcctcggatcaatcacaaacaaggttgtctggatacacttcagttccatatacaagcttccctgcccaggcagagctaactgttgtaggttgcagcaaaggattggatgcaaaagggcgctggacacgtgctcgtgtggcccaagtgagcatgctaatcagccccttttggttccttgcacagcttacgttcaatctgtctctaagatacaccactgtcacggtaagtgttactaagaactgaatgatacttccatattttaaagccaaacctggcccaggcaccacccaggcaccagaggcctccaaacggtcaaggatacaccactgtcacggtcaagtcctgcagaagctgaaactgatcatggataagactttgccttgtgtcacaatgggtgcatttgctggtggtccttggatcaggttgctcatgggtggtgaatgatctgacgacttcagaagaggatagatctgagattacctttcatgcatgtcaaggaagttaagtagctgatgccatcaaagaaatggagaaacgtcaggtgaaccgcgagcagaattccgtggcgcatttgttagcgcagttagttaggactctgttcatacagctgttcgattaagccaaatacctgatttagttttatattggttgttgtcaaagaatttgtgaaatattgaggttgataatatatgtggcgttcgtttttatgtaatcattgttcactaata

SEQ ID NO: 27341 - DNA, 3861 bp, Zea Mays
atgccccccgcctccatagtccctgtcatcggcgacctcagatccaacaggttggtctgcttgcgccgtgatcgcggaagctaccgcgccttcgtctccgtggatgaggtcctggatttgtgtgtcactggcgcggaatatgagggatcgagggcggcgcaggcggcgagctcgtgggcggaacagactggtgagagcaagaggatggatcaggagcttgagccccaggtacaaagactaacatcagcttctactgtactaaggagggtgttggataatccagcactccaggactatcaagagaataatggatttggagacttgaagttaagccttactgtttaggacttcactctcccagtgacacctactttacctgctgtttttgctgtatcctggcaatattcctttttactgtgatccatttccatttctgtgatgtgctcaactttacgtttggataaaagttagtaaggtaaagtaaacacattcacaaattcaagtactgagaagaaaaattgtacgtttcaaagtagttgtccaagttatgccaacttgcttttatgtaacgacagcaagaaaactgatctaagacctgcattgtggtgaattttgcagctgtccggccgcgtgtaccgcgtcaccttcaccaaccggctcaacggggccgcaggcgcggtgccgtgaagcagatacggaccgccgggaaactgtacctccacaagtaaaatatttatttagccctctgtctttgtttttttccatattctaagtttatacctaataacacatttgcacatacttgatgcatttgtctatggtattttctttttataaagtgaatcatcttgacaatgaaatagtgcatttatcagttttgtaatgggacatcactcctcaagtatccagaaggtaaactagatgtatttctcatacatcaattgggcaagtctgagagatagctgtcccaatttgtccagaaatttatttacctgtacctccacaagtaaaatatgtatttagccctctatctttgtttttttccatattctaagtttatacccgatgtataaatctacagatactttcttacctttgtttagttacgataaactttatccatcaattattttgtatacttttctaacctatgtaaatttagaggttaatttggactgtttaatatttaaatgttgtgggtggattaaggggttatttagtgttttaagtacaaacagaggaggacaattcatgcacatactttagctttttattgcaatgatagataatttatatgaagtttaggacttattttggatataatatgtcagaatgacagagattcacctgataggcgagcatgagttctcgctaaaatgtagcattgagtattgactgcagttcagtaagtaaattaaagcatgatagtattgttgatccagtgaacccttcatcctatattctctttgagctaatcttcttgcaccttgatgtaaaccttgacatatctgatggttctgctcagtgcttgtgtcttagattattgcactgacgtaattggaaaatgagtaatctgccaggaagcaacatattgtgttttactgaagtacagttagtcctgctgtcgcacaactttgctctgatgtttgaaagcataaagtatgttttcctaccatgggagaggtccaactgatattgcatctggatcttttgtgaaacatgatagcacttagcaacgctaggcagaagatgcacttttgaaatgtagtgttgcaccgttgctgtcgcaatcgttagttacacatatgttctctatatgctgtcagatatccatatctcttaatggtcgtacctaccaatttgattctgataaaaatcaatcaatctattagttacagaacaagcagagaactcactgtacacggtctcttcttgtactgaactggtattcaacttcattcaaagagttctggtaaagtataaattgtgctagaacttttgagctccttaattttcatgtagtatttttgttacttgatttttcgcctatcttgcaatagcaactttaacactgaaaaagattgcttatggccactggcaagtatgaattgatcaaattctcaaaacatatcatttgctgatttgatgaagcacgattcttaccttatttgtatctaatttgttacattcactgtttacagcttctcttgtaacattggatataatgacgctgctacatgactattattttgacatcataacctacatataaagattagagactaatctgttttttttctgaactaagacttgatagacacactactaaagtggatcccaagcaatgatgaggagcttaggcttcgactgtcctcccgtagcaccgccacaccgcacgcgtccgtggcggtcgaacatgcattttggagagaccaacttgaatgtgcggagcagtcgatcacacaatattttcataatggtaattgtgagcagcagtagagactaagcagttctgtaattgcatttgttctaagatcattttctgtagttgcatggaagcaataactgaatcaagaatgctctatttatttcgatctcagccattttggaggacgaacgagcaccggggagagtccaggaggaggcagatactgctgggacatgtccaagccagtggagatgcagtggagatggagatcaacattggcatggagaagctgtgaaacccaccgcagcagaaccccacccagaggaagtggcctcgcgtctcgtaagagtggcagacagtgatcggcgggttctttgcgacacgggctgctcttcgaccatgagcttcttgttactattcccccgcgacatttgtttggcatttctgttaacgattttctttgtttatattacactaaagtcaaagcctgaagccacgtcggcaactggatctaccattatgacataagcagaaatctaaataacacaaaaaaatcaggattactatatatttgtgcacaaagccacgaagaattgcatgaattgtggacaaagctgaaattcaaggatgctgaaagcctgcagcagacttctgacatggagagtgtgaatcttctccaaagtggggggccatgagatcaatgttgcctcggatcaatcacaaacaaggttgtctggatacacttcagttccatatacaagcttccctgcccaggcagagctaactgttgtaggttgcagcaaaggattggatgcaaaagggcgctggacacgtgctcgtgtggcccaagtgagcatgctaatcagccccttttggttccttgcacagcttacgttcaatctgtctctaagatacaccactgtcacggtaagtgttactaagaactgaatgatacttccatattttaaagccaaacctggcccaggcaccacccaggcaccagaggcctccaaacggtcaaggatacaccactgtcacggtcaagtcctgcagaagctgaaactgatcatggataagactttgccttgtgtcacaatgggtgcatttgctggtggtccttggatcaggttgctcatgggtggtgaatgatctgacgacttcagaagaggatagatctgagattacctttcatgcatgtcaaggaagttaagtagctgatgccatcaaagaaatggagaaacgtcaggtgaaccgcgagcagaattccgtggcgcatttgttagcgcagttagttaggactctgttcatacagctgttcgattaagccaaatacctgatttagttttatattggttgttgtcaaagaatttgtgaaatattgaggttgataatatatgtggcgttcgtttttatgtaatcattgttcactaata

SEQ ID NO: 27342 - DNA, 2402 bp, Zea Mays
atgccccccgcctccatagtccctgtcatcggcgacctcagatccaacaggttggtctgcttgcgccgtgatcgcggaagctaccgcgccttcgtctccgtggatgaggtcctggatttgtgtgtcactggcgcggaatatgagggatcgagggcggcgcaggcggcgagctcgtgggcggaacagactggtgagagcaagaggatggatcaggagcttgagccccaggtacaaagactaacatcagcttctactgtactaaggagggtgttggataatccagcactccaggactatcaagagaataatggatttggagacttgaagttaagccttactgtttaggacttcactctcccagtgacacctactttacctgctgtttttgctgtatcctggcaatattcctttttactgtgatccatttccatttctgtgatgtgctcaactttacgtttggataaaagttagtaaggtaaagtaaacacattcacaaattcaagtactgagaagaaaaattgtacgtttcaaagtagttgtccaagttatgccaacttgcttttatgtaacgacagcaagaaaactgatctaagacctgcattgtggtgaattttgcagctgtccggccgcgtgtaccgcgtcaccttcaccaaccggctcaacggggccgcaggcgcggtgccgtgaagcagatacggaccgccgggaaactgtacctccacaacttctcttgtaacattggatataatgacgctgctacatgactattattttgacatcataacctacatataaagattagagactaatctgttttttttctgaactaaggaaatgaacttccatcagacttgatagacacactactaaagtggatcccaagcaatgatgaggagcttaggcttcgactgtcctcccgtagcaccgccacaccgcacgcgtccgtggcggtcgaacatgcattttggagagaccaacttgaatgtgcggagcagtcgatcacacaatattttcataatggtaattgtgagcagcagtagagactaagcagttctgtaattgcatttgttctaagatcattttctgtagttgcatggaagcaataactgaatcaagaatgctctatttatttcgatctcagccattttggaggacgaacgagcaccggggagagtccaggaggaggcagatactgctgggacatgtccaagccagtggagatgcagtggagatggagatcaacattggcatggagaagctgtgaaacccaccgcagcagaaccccacccagaggaagtggcctcgcgtctcgtaagagtggcagacagtgatcggcgggttctttgcgacacgggctgctcttcgaccatgagcttcttgttactattcccccgcgacatttgtttggcatttctgttaacgattttctttgtttatattacactaaagtcaaagcctgaagccacgtcggcaactggatctaccattatgacataagcagaaatctaaataacacaaaaaaatcaggattactatatatttgtgcacaaagccacgaagaattgcatgaattgtggacaaagctgaaattcaaggatgctgaaagcctgcagcagacttctgacatggagagtgtgaatcttctccaaagtggggggccatgagatcaatgttgcctcggatcaatcacaaacaaggttgtctggatacacttcagttccatatacaagcttccctgcccaggcagagctaactgttgtaggttgcagcaaaggattggatgcaaaagggcgctggacacgtgctcgtgtggcccaagtgagcatgctaatcagccccttttggttccttgcacagcttacgttcaatctgtctctaagatacaccactgtcacggtaagtgttactaagaactgaatgatacttccatattttaaagccaaacctggcccaggcaccacccaggcaccagaggcctccaaacggtcaaggatacaccactgtcacggtcaagtcctgcagaagctgaaactgatcatggataagactttgccttgtgtcacaatgggtgcatttgctggtggtccttggatcaggttgctcatgggtggtgaatgatctgacgacttcagaagaggatagatctgagattacctttcatgcatgtcaaggaagttaagtagctgatgccatcaaagaaatggagaaacgtcaggtgaaccgcgagcagaattccgtggcgcatttgttagcgcagttagttaggactctgttcatacagctgttcgattaagccaaatacctgatttagttttatattggttgttgtcaaagaatttgtgaaatattgaggttgataatatatgtggcgttcgtttttatgtaatcattgttcactaata

SEQ ID NO: 27343 - DNA, 3862 bp, Zea Mays
atgccccccgcctccatagtccctgtcatcggcgacctcagatccaacaggttggtctgcttgcgccgtgatcgcggaagctaccgcgccttcgtctccgtggatgaggtcctggatttgtgtgtcactggcgcggaatatgagggatcgagggcggcgcaggcggcgagctcgtgggcggaacagactggtgagagcaagaggatggatcaggagcttgagccccaggtacaaagactaacatcagcttctactgtactaaggagggtgttggataatccagcactccaggactatcaagagaataatggatttggagacttgaagttaagccttactgtttaggacttcactctcccagtgacacctactttacctgctgtttttgctgtatcctggcaatattcctttttactgtgatccatttccatttctgtgatgtgctcaactttacgtttggataaaagttagtaaggtaaagtaaacacattcacaaattcaagtactgagaagaaaaattgtacgtttcaaagtagttgtccaagttatgccaacttgcttttatgtaacgacagcaagaaaactgatctaagacctgcattgtggtgaattttgcagctgtccggccgcgtgtaccgcgtcaccttcaccaaccggctcaacggggccgcaggcgcggtgccgtgaagcagatacggaccgccgggaaactgtacctccacaagtaaaatatttatttagccctctgtctttgtttttttccatattctaagtttatacctaataacacatttgcacatacttgatgcatttgtctatggtattttctttttataaagtgaatcatcttgacaatgaaatagtgcatttatcagttttgtaatgggacatcactcctcaagtatccagaaggtaaactagatgtatttctcatacatcaattgggcaagtctgagagatagctgtcccaatttgtccagaaatttatttacctgtacctccacaagtaaaatatgtatttagccctctatctttgtttttttccatattctaagtttatacccgatgtataaatctacagatactttcttacctttgtttagttacgataaactttatccatcaattattttgtatacttttctaacctatgtaaatttagaggttaatttggactgtttaatatttaaatgttgtgggtggattaaggggttatttagtgttttaagtacaaacagaggaggacaattcatgcacatactttagctttttattgcaatgatagataatttatatgaagtttaggacttattttggatataatatgtcagaatgacagagattcacctgataggcgagcatgagttctcgctaaaatgtagcattgagtattgactgcagttcagtaagtaaattaaagcatgatagtattgttgatccagtgaacccttcatcctatattctctttgagctaatcttcttgcaccttgatgtaaaccttgacatatctgatggttctgctcagtgcttgtgtcttagattattgcactgacgtaattggaaaatgagtaatctgccaggaagcaacatattgtgttttactgaagtacagttagtcctgctgtcgcacaactttgctctgatgtttgaaagcataaagtatgttttcctaccatgggagaggtccaactgatattgcatctggatcttttgtgaaacatgatagcacttagcaacgctaggcagaagatgcacttttgaaatgtagtgttgcaccgttgctgtcgcaatcgttagttacacatatgttctctatatgctgtcagatatccatatctcttaatggtcgtacctaccaatttgattctgataaaaatcaatcaatctattagttacagaacaagcagagaactcactgtacacggtctcttcttgtactgaactggtattcaacttcattcaaagagttctggtaaagtataaattgtgctagaacttttgagctccttaattttcatgtagtatttttgttacttgatttttcgcctatcttgcaatagcaactttaacactgaaaaagattgcttatggccactggcaagtatgaattgatcaaattctcaaaacatatcatttgctgatttgatgaagcacgattcttaccttatttgtatctaatttgttacattcactgtttacagcttctcttgtaacattggatataatgacgctgctacatgactattattttgacatcataacctacatataaagattagagactaatctgttttttttctgaactaaggaaatgaacttccatcagacttgatagacacactactaaagtggatcccaagcaatgatgaggagcttaggcttcgactgtcctcccgtagcaccgccacaccgcacgcgtccgtggcggtcgaacatgcattttggagagaccaacttgaatgtgcggagcagtcgatcacacaatattttcataatgttgaatggaagcgataactaaatcaaggatgttctatttatatcggtctcagttgcatggaagcaataactgaatcaagaatgctctatttatttcgatctcagccattttggaggacgaacgagcaccggggagagtccaggaggaggcagatactgctgggacatgtccaagccagtggagatgcagtggagatggagatcaacattggcatggagaagctgtgaaacccaccgcagcagaaccccacccagaggaagtggcctcgcgtctcgtaagagtggcagacagtgatcggcgggttctttgcgacacgggctgctcttcgaccatgagcttcttgttactattcccccgcgacatttgtttggcatttctgttaacgattttctttgtttatattacactaaagtcaaagcctgaagccacgtcggcaactggatctaccattatgacataagcagaaatctaaataacacaaaaaaatcaggattactatatatttgtgcacaaagccacgaagaattgcatgaattgtggacaaagctgaaattcaaggatgctgaaagcctgcagcagacttctgacatggagagtgtgaatcttctccaaagtggggggccatgagatcaatgttgcctcggatcaatcacaaacaaggttgtctggatacacttcagttccatatacaagcttccctgcccaggcagagctaactgttgtaggttgcagcaaaggattggatgcaaaagggcgctggacacgtgctcgtgtggcccaagtgagcatgctaatcagccccttttggttccttgcacagcttacgttcaatctgtctctaagatacaccactgtcacggtaagtgttactaagaactgaatgatacttccatattttaaagccaaacctggcccaggcaccacccaggcaccagaggcctccaaacggtcaaggatacaccactgtcacggtcaagtcctgcagaagctgaaactgatcatggataagactttgccttgtgtcacaatgggtgcatttgctggtggtccttggatcaggttgctcatgggtggtgaatgatctgacgacttcagaagaggatagatctgagattacctttcatgcatgtcaaggaagttaagtagctgatgccatcaaagaaatggagaaacgtcaggtgaaccgcgagcagaattccgtggcgcatttgttagcgcagttagttaggactctgttcatacagctgttcgattaagccaaatacctgatttagttttatattggttgttgtcaaagaatttgtgaaatattgaggttgataatatatgtggcgttcgtttttatgtaatcattgttcactaata

SEQ ID NO: 27344 - DNA, 3149 bp, Zea Mays
atgccccccgcctccatagtccctgtcatcggcgacctcagatccaacaggttggtctgcttgcgccgtgatcgcggaagctaccgcgccttcgtctccgtggatgaggtcctggatttgtgtgtcactggcgcggaatatgagggatcgagggcggcgcaggcggcgagctcgtgggcggaacagactggtgagagcaagaggatggatcaggagcttgagccccaggtaagccattctgaaaatctgtatcgcgctgatttacccgctttaggatttgtagttgtcgttcgtttctcaatgcgcttggttatcgatactgctatctcatggtctcagttcagctgagttcacttaactaggaccagcatgtgcagtagaaaatctctggttaattatgggtccttataacctccgttcgttgcttgaatttctcgttatatgtggcatgttcattcaagttgtttacttacaatcacataatgcttgcggtgttacatgggacatgctaatttctttggatgttagcatgtgaacttgtgagtcagttcattgctcatttcattgaacctatgctgccatgctggtgaagagacaatgaagcagccagttggtgttataaacacaatacacctcgctcccagctccgcattcgcctccgcctcagatccctacagcgtgatgcgagggaacagcaaccgtgcggcctccccatcctgagcacctcaaatccgatgcccctccccaagccattccctcggccacgacagcgacggcaacgagcatggcccccctctaccacctatgcctttccatttgtggcctccgcatcgccccaacgttgacccctccgtcctccccctctactcccagcgcagcgccggttttagctttggaaattgctgatcgattaattatggggggaagcgtctctacttccttctcggttggtcaaggtatccccttcctgtgtcctctctcctctgtgtagatggcgaatttgtggagtccgaataatctgaatgttctcgcattctttacataatcccttgccaatttatggcaagttttatttgctccatttgttttatggtatgatgatctagatctgatgagcccattcaaattcttttgccgagccgccgtccctctttttctactgtttgtttgtgcatcggaattgctggatctataccaaaatctgaaaagtgtaggccatacagagaattaagaagttgtcttgacctcactggacccagagactactcatcaccagaggaaatggtacaaagactaacatcagcttctactgtactaaggagggtgttggataatccagcactccaggactatcaagagaataatggatttggagacttgaactgtccggccgcgtgtaccgcgtcaccttcaccaaccggctcaacggggccgcaggcgcggtgccgtgaagcagatacggaccgccgggaaactgtacctccacaacttctcttgtaacattggatataatgacgctgctacatgactattattttgacatcataacctacatataaagattagagactaatctgttttttttctgaactaaggaaatgaacttccatcagacttgatagacacactactaaagtggatcccaagcaatgatgaggagcttaggcttcgactgtcctcccgtagcaccgccacaccgcacgcgtccgtggcggtcgaacatgcattttggagagaccaacttgaatgtgcggagcagtcgatcacacaatattttcataatgttgaatggaagcgataactaaatcaaggatgttctatttatatcggtctcagttgcatggaagcaataactgaatcaagaatgctctatttatttcgatctcagccattttggaggacgaacgagcaccggggagagtccaggaggaggcagatactgctgggacatgtccaagccagtggagatgcagtggagatggagatcaacattggcatggagaagctgtgaaacccaccgcagcagaaccccacccagaggaagtggcctcgcgtctcgtaagagtggcagacagtgatcggcgggttctttgcgacacgggctgctcttcgaccatgagcttcttgttactattcccccgcgacatttgtttggcatttctgttaacgattttctttgtttatattacactaaagtcaaagcctgaagccacgtcggcaactggatctaccattatgacataagcagaaatctaaataacacaaaaaaatcaggattactatatatttgtgcacaaagccacgaagaattgcatgaattgtggacaaagctgaaattcaaggatgctgaaagcctgcagcagacttctgacatggagagtgtgaatcttctccaaagtggggggccatgagatcaatgttgcctcggatcaatcacaaacaaggttgtctggatacacttcagttccatatacaagcttccctgcccaggcagagctaactgttgtaggttgcagcaaaggattggatgcaaaagggcgctggacacgtgctcgtgtggcccaagtgagcatgctaatcagccccttttggttccttgcacagcttacgttcaatctgtctctaagatacaccactgtcacggtaagtgttactaagaactgaatgatacttccatattttaaagccaaacctggcccaggcaccacccaggcaccagaggcctccaaacggtcaaggatacaccactgtcacggtcaagtcctgcagaagctgaaactgatcatggataagactttgccttgtgtcacaatgggtgcatttgctggtggtccttggatcaggttgctcatgggtggtgaatgatctgacgacttcagaagaggatagatctgagattacctttcatgcatgtcaaggaagttaagtagctgatgccatcaaagaaatggagaaacgtcaggtgaaccgcgagcagaattccgtggcgcatttgttagcgcagttagttaggactctgttcatacagctgttcgattaagccaaatacctgatttagttttatattggttgttgtcaaagaatttgtgaaatattgaggttgataatatatgtggcgttcgtttttatgtaatcattgttcactaata

SEQ ID NO: 27345 - DNA, 3600 bp, Zea Mays
gcacggttctgccgaggatctccgccatcaacgctcgccatcggatcgaaccattacgcgatatctgcaccgcccattgccgaggccgccatcctcccgcaatccccgcctattgccttgcctgccccttccatcctccttcccacccctccttccatcctcgcccgcgcgctccacacgtccccgccgtcgcgctcgcctttcatcctcctccccacccctccttccatcctcgcccgcgcgctccgcacgtccccgccgtcgcgctcgcctccctcctctttgttgcctccgcgtcggcctccaccccgctatgacgcaagcaagggcggcgcttgccatggcatcgacgggaaccaggcatcactctccctatctctcgggatggtacgggcaggaggatcaggccaccgtcgaggaacgcgctctccgctgtgttccagcaagaagatgagggatcgagggcggcgcaggcggcgagctcgtgggcggaacagactggtgagagcaagaggatggatcaggagcttgagccccaggtaagccattctgaaaatctgtatcgcgctgatttacccgctttaggatttgtagttgtcgttcgtttctcaatgcgcttggttatcgatactgctatctcatggtctcagttcagctgagttcacttaactaggaccagcatgtgcagtagaaaatctctggttaattatgggtccttataacctccgttcgttgcttgaatttctcgttatatgtggcatgttcattcaagttgtttacttacaatcacataatgcttgcggtgttacatgggacatgctaatttctttggatgttagcatgtgaacttgtgagtcagttcattgctcatttcattgaacctatgctgccatgctggtgaagagacaatgaagcagccagttggtgttataaacacaatacacctcgctcccagctccgcattcgcctccgcctcagatccctacagcgtgatgcgagggaacagcaaccgtgcggcctccccatcctgagcacctcaaatccgatgcccctccccaagccattccctcggccacgacagcgacggcaacgagcatggcccccctctaccacctatgcctttccatttgtggcctccgcatcgccccaacgttgacccctccgtcctccccctctactcccagcgcagcgccggttttagctttggaaattgctgatcgattaattatggggggaagcgtctctacttccttctcggttggtcaaggtatccccttcctgtgtcctctctcctctgtgtagatggcgaatttgtggagtccgaataatctgaatgttctcgcattctttacataatcccttgccaatttatggcaagttttatttgctccatttgttttatggtatgatgatctagatctgatgagcccattcaaattcttttgccgagccgccgtccctctttttctactgtttgtttgtgcatcggaattgctggatctataccaaaatctgaaaagtgtaggccatacagagaattaagaagttgtcttgacctcactggacccagagactactcatcaccagaggaaatggtattatgctctgataatatattcttaaggattaaccatgttattttcttttttctaattgtgctattacatttaggtacaaagactaacatcagcttctactgtactaaggagggtgttggataatccagcactccaggactatcaagagaataatggatttggagacttgaagttaagccttactgtttaggacttcactctcccagtgacacctactttacctgctgtttttgctgtatcctggcaatattcctttttactgtgatccatttccatttctgtgatgtgctcaactttacgtttggataaaagttagtaaggtaaagtaaacacattcacaaattcaagtactgagaagaaaaattgtacgtttcaaagtagttgtccaagttatgccaacttgcttttatgtaacgacagcaagaaaactgatctaagacctgcattgtggtgaattttgcagctgtccggccgcgtgtaccgcgtcaccttcaccaaccggctcaacggggccgcaggcgcggtgccgtgaagcagatacggaccgccgggaaactgtacctccacaagaaatgaacttccatcagacttgatagacacactactaaagtggatcccaagcaatgatgaggagcttaggcttcgactgtcctcccgtagcaccgccacaccgcacgcgtccgtggcggtcgaacatgcattttggagagaccaacttgaatgtgcggagcagtcgatcacacaatattttcataatgttgaatggaagcgataactaaatcaaggatgttctatttatatcggtctcagttgcatggaagcaataactgaatcaagaatgctctatttatttcgatctcagccattttggaggacgaacgagcaccggggagagtccaggaggaggcagatactgctgggacatgtccaagccagtggagatgcagtggagatggagatcaacattggcatggagaagctgtgaaacccaccgcagcagaaccccacccagaggaagtggcctcgcgtctcgtaagagtggcagacagtgatcggcgggttctttgcgacacgggctgctcttcgaccatgagcttcttgttactattcccccgcgacatttgtttggcatttctgttaacgattttctttgtttatattacactaaagtcaaagcctgaagccacgtcggcaactggatctaccattatgacataagcagaaatctaaataacacaaaaaaatcaggattactatatatttgtgcacaaagccacgaagaattgcatgaattgtggacaaagctgaaattcaaggatgctgaaagcctgcagcagacttctgacatggagagtgtgaatcttctccaaagtggggggccatgagatcaatgttgcctcggatcaatcacaaacaaggttgtctggatacacttcagttccatatacaagcttccctgcccaggcagagctaactgttgtaggttgcagcaaaggattggatgcaaaagggcgctggacacgtgctcgtgtggcccaaccaaacctggcccaggcaccacccaggcaccagaggcctccaaacggtcaaggatacaccactgtcacggtcaagtcctgcagaagctgaaactgatcatggataagactttgccttgtgtcacaatgggtgcatttgctggtggtccttggatcaggttgctcatgggtggtgaatgatctgacgacttcagaagaggatagatctgagattacctttcatgcatgtcaaggaagttaagtagctgatgccatcaaagaaatggagaaacgtcaggtgaaccgcgagcagaattccgtggcgcatttgttagcgcagttagttaggactctgttcatacagctgttcgattaagccaaatacctgatttagttttatattggttgttgtcaaagaatttgtgaaatattgaggttgataatatatgtggcgttcgtttttatgtaatcattgttcactaata

SEQ ID NO: 27346 - DNA, 4004 bp, Zea Mays
gcacggttctgccgaggatctccgccatcaacgctcgccatcggatcgaaccattacgcgatatctgcaccgcccattgccgaggccgccatcctcccgcaatccccgcctattgccttgcctgccccttccatcctccttcccacccctccttccatcctcgcccgcgcgctccacacgtccccgccgtcgcgctcgcctttcatcctcctccccacccctccttccatcctcgcccgcgcgctccgcacgtccccgccgtcgcgctcgcctccctcctctttgttgcctccgcgtcggcctccaccccgctatgacgcaagcaagggcggcgcttgccatggcatcgacgggaaccaggcatcactctccctatctctcgggatggtacgggcaggaggatcaggccaccgtcgaggaacgcgctctccgctgtgttccagcaagaagatgagggatcgagggcggcgcaggcggcgagctcgtgggcggaacagactggtgagagcaagaggatggatcaggagcttgagccccaggtacaaagactaacatcagcttctactgtactaaggagggtgttggataatccagcactccaggactatcaagagaataatggatttggagacttgaactgtccggccgcgtgtaccgcgtcaccttcaccaaccggctcaacggggccgcaggcgcggtgccgtgaagcagatacggaccgccgggaaactgtacctccacaagtaaaatatttatttagccctctgtctttgtttttttccatattctaagtttatacctaataacacatttgcacatacttgatgcatttgtctatggtattttctttttataaagtgaatcatcttgacaatgaaatagtgcatttatcagttttgtaatgggacatcactcctcaagtatccagaaggtaaactagatgtatttctcatacatcaattgggcaagtctgagagatagctgtcccaatttgtccagaaatttatttacctgtacctccacaagtaaaatatgtatttagccctctatctttgtttttttccatattctaagtttatacccgatgtataaatctacagatactttcttacctttgtttagttacgataaactttatccatcaattattttgtatacttttctaacctatgtaaatttagaggttaatttggactgtttaatatttaaatgttgtgggtggattaaggggttatttagtgttttaagtacaaacagaggaggacaattcatgcacatactttagctttttattgcaatgatagataatttatatgaagtttaggacttattttggatataatatgtcagaatgacagagattcacctgataggcgagcatgagttctcgctaaaatgtagcattgagtattgactgcagttcagtaagtaaattaaagcatgatagtattgttgatccagtgaacccttcatcctatattctctttgagctaatcttcttgcaccttgatgtaaaccttgacatatctgatggttctgctcagtgcttgtgtcttagattattgcactgacgtaattggaaaatgagtaatctgccaggaagcaacatattgtgttttactgaagtacagttagtcctgctgtcgcacaactttgctctgatgtttgaaagcataaagtatgttttcctaccatgggagaggtccaactgatattgcatctggatcttttgtgaaacatgatagcacttagcaacgctaggcagaagatgcacttttgaaatgtagtgttgcaccgttgctgtcgcaatcgttagttacacatatgttctctatatgctgtcagatatccatatctcttaatggtcgtacctaccaatttgattctgataaaaatcaatcaatctattagttacagaacaagcagagaactcactgtacacggtctcttcttgtactgaactggtattcaacttcattcaaagagttctggtaaagtataaattgtgctagaacttttgagctccttaattttcatgtagtatttttgttacttgatttttcgcctatcttgcaatagcaactttaacactgaaaaagattgcttatggccactggcaagtatgaattgatcaaattctcaaaacatatcatttgctgatttgatgaagcacgattcttaccttatttgtatctaatttgttacattcactgtttacagcttctcttgtaacattggatataatgacgctgctacatgactattattttgacatcataacctacatataaagattagagactaatctgttttttttctgaactaaggtgttaacacatttccaaatatcgaacatctatcttttagtatgcaagcattttagtttctcagaggtatactgttccccatctctgtattttatttcatccactgcccttgctaatttgtaggaaatgaacttccatcagacttgatagacacactactaaagtggatcccaagcaatgatgaggagcttaggcttcgactgtcctcccgtagcaccgccacaccgcacgcgtccgtggcggtcgaacatgcattttggagagaccaacttgaatgtgcggagcagtcgatcacacaatattttcataatgttgaatggaagcgataactaaatcaaggatgttctatttatatcggtctcagttgcatggaagcaataactgaatcaagaatgctctatttatttcgatctcagccattttggaggacgaacgagcaccggggagagtccaggaggaggcagatactgctgggacatgtccaagccagtggagatgcagtggagatggagatcaacattggcatggagaagctgtgaaacccaccgcagcagaaccccacccagaggaagtggcctcgcgtctcgtaagagtggcagacagtgatcggcgggttctttgcgacacgggctgctcttcgaccatgagcttcttgttactattcccccgcgacatttgtttggcatttctgttaacgattttctttgtttatattacactaaagtcaaagcctgaagccacgtcggcaactggatctaccattatgacataagcagaaatctaaataacacaaaaaaatcaggattactatatatttgtgcacaaagccacgaagaattgcatgaattgtggacaaagctgaaattcaaggatgctgaaagcctgcagcagacttctgacatggagagtgtgaatcttctccaaagtggggggccatgagatcaatgttgcctcggatcaatcacaaacaaggttgtctggatacacttcagttccatatacaagcttccctgcccaggcagagctaactgttgtaggttgcagcaaaggattggatgcaaaagggcgctggacacgtgctcgtgtggcccaagtgagcatgctaatcagccccttttggttccttgcacagcttacgttcaatctgtctctaagatacaccactgtcacggtaagtgttactaagaactgaatgatacttccatattttaaagccaaacctggcccaggcaccacccaggcaccagaggcctccaaacggtcaaggatacaccactgtcacggtcaagtcctgcagaagctgaaactgatcatggataagactttgccttgtgtcacaatgggtgcatttgctggtggtccttggatcaggttgctcatgggtggtgaatgatctgacgacttcagaagaggatagatctgagattacctttcatgcatgtcaaggaagttaagtagctgatgccatcaaagaaatggagaaacgtcaggtgaaccgcgagcagaattccgtggcgcatttgttagcgcagttagttaggactctgttcatacagctgttcgattaagccaaatacctgatttagttttatattggttgttgtcaaagaatttgtgaaatattgaggttgataatatatgtggcgttcgtttttatgtaatcattgttcactaata

SEQ ID NO: 27347 - DNA, 4260 bp, Zea Mays
gcacggttctgccgaggatctccgccatcaacgctcgccatcggatcgaaccattacgcgatatctgcaccgcccattgccgaggccgccatcctcccgcaatccccgcctattgccttgcctgccccttccatcctccttcccacccctccttccatcctcgcccgcgcgctccacacgtccccgccgtcgcgctcgcctttcatcctcctccccacccctccttccatcctcgcccgcgcgctccgcacgtccccgccgtcgcgctcgcctccctcctctttgttgcctccgcgtcggcctccaccccgctatgacgcaagcaagggcggcgcttgccatggcatcgacgggaaccaggcatcactctccctatctctcgggatggtacgggcaggaggatcaggccaccgtcgaggaacgcgctctccgctgtgttccagcaagaagatgagggatcgagggcggcgcaggcggcgagctcgtgggcggaacagactggtgagagcaagaggatggatcaggagcttgagccccaggccatacagagaattaagaagttgtcttgacctcactggacccagagactactcatcaccagaggaaatggtacaaagactaacatcagcttctactgtactaaggagggtgttggataatccagcactccaggactatcaagagaataatggatttggagacttgaagttaagccttactgtttaggacttcactctcccagtgacacctactttacctgctgtttttgctgtatcctggcaatattcctttttactgtgatccatttccatttctgtgatgtgctcaactttacgtttggataaaagttagtaaggtaaagtaaacacattcacaaattcaagtactgagaagaaaaattgtacgtttcaaagtagttgtccaagttatgccaacttgcttttatgtaacgacagcaagaaaactgatctaagacctgcattgtggtgaattttgcagctgtccggccgcgtgtaccgcgtcaccttcaccaaccggctcaacggggccgcaggcgcggtgccgtgaagcagatacggaccgccgggaaactgtacctccacaagtaaaatatttatttagccctctgtctttgtttttttccatattctaagtttatacctaataacacatttgcacatacttgatgcatttgtctatggtattttctttttataaagtgaatcatcttgacaatgaaatagtgcatttatcagttttgtaatgggacatcactcctcaagtatccagaaggtaaactagatgtatttctcatacatcaattgggcaagtctgagagatagctgtcccaatttgtccagaaatttatttacctgtacctccacaagtaaaatatgtatttagccctctatctttgtttttttccatattctaagtttatacccgatgtataaatctacagatactttcttacctttgtttagttacgataaactttatccatcaattattttgtatacttttctaacctatgtaaatttagaggttaatttggactgtttaatatttaaatgttgtgggtggattaaggggttatttagtgttttaagtacaaacagaggaggacaattcatgcacatactttagctttttattgcaatgatagataatttatatgaagtttaggacttattttggatataatatgtcagaatgacagagattcacctgataggcgagcatgagttctcgctaaaatgtagcattgagtattgactgcagttcagtaagtaaattaaagcatgatagtattgttgatccagtgaacccttcatcctatattctctttgagctaatcttcttgcaccttgatgtaaaccttgacatatctgatggttctgctcagtgcttgtgtcttagattattgcactgacgtaattggaaaatgagtaatctgccaggaagcaacatattgtgttttactgaagtacagttagtcctgctgtcgcacaactttgctctgatgtttgaaagcataaagtatgttttcctaccatgggagaggtccaactgatattgcatctggatcttttgtgaaacatgatagcacttagcaacgctaggcagaagatgcacttttgaaatgtagtgttgcaccgttgctgtcgcaatcgttagttacacatatgttctctatatgctgtcagatatccatatctcttaatggtcgtacctaccaatttgattctgataaaaatcaatcaatctattagttacagaacaagcagagaactcactgtacacggtctcttcttgtactgaactggtattcaacttcattcaaagagttctggtaaagtataaattgtgctagaacttttgagctccttaattttcatgtagtatttttgttacttgatttttcgcctatcttgcaatagcaactttaacactgaaaaagattgcttatggccactggcaagtatgaattgatcaaattctcaaaacatatcatttgctgatttgatgaagcacgattcttaccttatttgtatctaatttgttacattcactgtttacagcttctcttgtaacattggatataatgacgctgctacatgactattattttgacatcataacctacatataaagattagagactaatctgttttttttctgaactaaggaaatgaacttccatcagacttgatagacacactactaaagtggatcccaagcaatgatgaggagcttaggcttcgactgtcctcccgtagcaccgccacaccgcacgcgtccgtggcggtcgaacatgcattttggagagaccaacttgaatgtgcggagcagtcgatcacacaatattttcataatggtaattgtgagcagcagtagagactaagcagttctgtaattgcatttgttctaagatcattttctgtagttgcatggaagcaataactgaatcaagaatgctctatttatttcgatctcagccattttggaggacgaacgagcaccggggagagtccaggaggaggcagatactgctgggacatgtccaagccagtggagatgcagtggagatggagatcaacattggcatggagaagctgtgaaacccaccgcagcagaaccccacccagaggaagtggcctcgcgtctcgtaagagtggcagacagtgatcggcgggttctttgcgacacgggctgctcttcgaccatgagcttcttgttactattcccccgcgacatttgtttggcatttctgttaacgattttctttgtttatattacactaaagtcaaagcctgaagccacgtcggcaactggatctaccattatgacataagcagaaatctaaataacacaaaaaaatcaggattactatatatttgtgcacaaagccacgaagaattgcatgaattgtggacaaagctgaaattcaaggatgctgaaagcctgcagcagacttctgacatggagagtgtgaatcttctccaaagtggggggccatgagatcaatgttgcctcggatcaatcacaaacaaggttgtctggatacacttcagttccatatacaagcttccctgcccaggcagagctaactgttgtaggttgcagcaaaggattggatgcaaaagggcgctggacacgtgctcgtgtggcccaagtgagcatgctaatcagccccttttggttccttgcacagcttacgttcaatctgtctctaagatacaccactgtcacggtaagtgttactaagaactgaatgatacttccatattttaaagccaaacctggcccaggcaccacccaggcaccagaggcctccaaacggtcaaggatacaccactgtcacggtcaagtcctgcagaagctgaaactgatcatggataagactttgccttgtgtcacaatgggtgcatttgctggtggtccttggatcaggttgctcatgggtggtgaatgatctgacgacttcagaagaggatagatctgagattacctttcatgcatgtcaaggaagttaagtagctgatgccatcaaagaaatggagaaacgtcaggtgaaccgcgagcagaattccgtggcgcatttgttagcgcagttagttaggactctgttcatacagctgttcgattaagccaaatacctgatttagttttatattggttgttgtcaaagaatttgtgaaatattgaggttgataatatatgtggcgttcgtttttatgtaatcattgttcactaata

SEQ ID NO: 27348 - DNA, 3370 bp, Zea Mays
gcacggttctgccgaggatctccgccatcaacgctcgccatcggatcgaaccattacgcgatatctgcaccgcccattgccgaggccgccatcctcccgcaatccccgcctattgccttgcctgccccttccatcctccttcccacccctccttccatcctcgcccgcgcgctccacacgtccccgccgtcgcgctcgcctttcatcctcctccccacccctccttccatcctcgcccgcgcgctccgcacgtccccgccgtcgcgctcgcctccctcctctttgttgcctccgcgtcggcctccaccccgctatgacgcaagcaagggcggcgcttgccatggcatcgacgggaaccaggcatcactctccctatctctcgggatggtacgggcaggaggatcaggccaccgtcgaggaacgcgctctccgctgtgttccagcaagaagatgagggatcgagggcggcgcaggcggcgagctcgtgggcggaacagactggtgagagcaagaggatggatcaggagcttgagccccaggtaagccattctgaaaatctgtatcgcgctgatttacccgctttaggatttgtagttgtcgttcgtttctcaatgcgcttggttatcgatactgctatctcatggtctcagttcagctgagttcacttaactaggaccagcatgtgcagtagaaaatctctggttaattatgggtccttataacctccgttcgttgcttgaatttctcgttatatgtggcatgttcattcaagttgtttacttacaatcacataatgcttgcggtgttacatgggacatgctaatttctttggatgttagcatgtgaacttgtgagtcagttcattgctcatttcattgaacctatgctgccatgctggtgaagagacaatgaagcagccagttggtgttataaacacaatacacctcgctcccagctccgcattcgcctccgcctcagatccctacagcgtgatgcgagggaacagcaaccgtgcggcctccccatcctgagcacctcaaatccgatgcccctccccaagccattccctcggccacgacagcgacggcaacgagcatggcccccctctaccacctatgcctttccatttgtggcctccgcatcgccccaacgttgacccctccgtcctccccctctactcccagcgcagcgccggttttagctttggaaattgctgatcgattaattatggggggaagcgtctctacttccttctcggttggtcaaggtatccccttcctgtgtcctctctcctctgtgtagatggcgaatttgtggagtccgaataatctgaatgttctcgcattctttacataatcccttgccaatttatggcaagttttatttgctccatttgttttatggtatgatgatctagatctgatgagcccattcaaattcttttgccgagccgccgtccctctttttctactgtttgtttgtgcatcggaattgctggatctataccaaaatctgaaaagtgtaggccatacagagaattaagaagttgtcttgacctcactggacccagagactactcatcaccagaggaaatggtacaaagactaacatcagcttctactgtactaaggagggtgttggataatccagcactccaggactatcaagagaataatggatttggagacttgaactgtccggccgcgtgtaccgcgtcaccttcaccaaccggctcaacggggccgcaggcgcggtgccgtgaagcagatacggaccgccgggaaactgtacctccacaagaaatgaacttccatcagacttgatagacacactactaaagtggatcccaagcaatgatgaggagcttaggcttcgactgtcctcccgtagcaccgccacaccgcacgcgtccgtggcggtcgaacatgcattttggagagaccaacttgaatgtgcggagcagtcgatcacacaatattttcataatggtaattgtgagcagcagtagagactaagcagttctgtaattgcatttgttctaagatcattttctgtagttgcatggaagcaataactgaatcaagaatgctctatttatttcgatctcagccattttggaggacgaacgagcaccggggagagtccaggaggaggcagatactgctgggacatgtccaagccagtggagatgcagtggagatggagatcaacattggcatggagaagctgtgaaacccaccgcagcagaaccccacccagaggaagtggcctcgcgtctcgtaagagtggcagacagtgatcggcgggttctttgcgacacgggctgctcttcgaccatgagcttcttgttactattcccccgcgacatttgtttggcatttctgttaacgattttctttgtttatattacactaaagtcaaagcctgaagccacgtcggcaactggatctaccattatgacataagcagaaatctaaataacacaaaaaaatcaggattactatatatttgtgcacaaagccacgaagaattgcatgaattgtggacaaagctgaaattcaaggatgctgaaagcctgcagcagacttctgacatggagagtgtgaatcttctccaaagtggggggccatgagatcaatgttgcctcggatcaatcacaaacaaggttgtctggatacacttcagttccatatacaagcttccctgcccaggcagagctaactgttgtaggttgcagcaaaggattggatgcaaaagggcgctggacacgtgctcgtgtggcccaagtgagcatgctaatcagccccttttggttccttgcacagcttacgttcaatctgtctctaagatacaccactgtcacggtaagtgttactaagaactgaatgatacttccatattttaaagccaaacctggcccaggcaccacccaggcaccagaggcctccaaacggtcaaggatacaccactgtcacggtcaagtcctgcagaagctgaaactgatcatggataagactttgccttgtgtcacaatgggtgcatttgctggtggtccttggatcaggttgctcatgggtggtgaatgatctgacgacttcagaagaggatagatctgagattacctttcatgcatgtcaaggaagttaagtagctgatgccatcaaagaaatggagaaacgtcaggtgaaccgcgagcagaattccgtggcgcatttgttagcgcagttagttaggactctgttcatacagctgttcgattaagccaaatacctgatttagttttatattggttgttgtcaaagaatttgtgaaatattgaggttgataatatatgtggcgttcgtttttatgtaatcattgttcactaata

SEQ ID NO: 27349 - DNA, 2487 bp, Zea Mays
atgccccccgcctccatagtccctgtcatcggcgacctcagatccaacaggttggtctgcttgcgccgtgatcgcggaagctaccgcgccttcgtctccgtggatgaggtcctggatttgtgtgtcactggcgcggaatatgagggatcgagggcggcgcaggcggcgagctcgtgggcggaacagactggtgagagcaagaggatggatcaggagcttgagccccaggtacaaagactaacatcagcttctactgtactaaggagggtgttggataatccagcactccaggactatcaagagaataatggatttggagacttgaactgtccggccgcgtgtaccgcgtcaccttcaccaaccggctcaacggggccgcaggcgcggtgccgtgaagcagatacggaccgccgggaaactgtacctccacaagtaaaatatttatttagccctctgtctttgtttttttccatattctaagtttatacctaataacacatttgcacatacttgatgcatttgtctatggtattttctttttataaagtgaatcatcttgacaatgaaatagtgcatttatcagttttgtaatgggacatcactcctcaagtatccagaaggtaaactagatgtatttctcatacatcaattgggcaagtctgagagatagctgtcccaatttgtccagaaatttatttacctgtacctccacaagtaaaatatgtatttagccctctatctttgtttttttccatattctaagtttatacccgatgtataaatctacagatactttcttacctttgtttagttacgataaactttatccatcaattattttgtatacttttctaacctatgtaaatttagaggttaatttggactgtttaatatttaaatgttgtgggtggattaaggggttatttagtgttttaagtacaaacagaggaggacaattcatgcacatactttagctttttattgcaatgatagataatttatatgaagtttaggacttattttggatataatatgtcagaatgacagagattcacctgataggcgagcatgagttctcgctaaaatgtagcattgagtattgactgcagttcagtaagtaaattaaagcatgatagtattgttgatccagtgaacccttcatcctatattctctttgagctaatcttcttgcaccttgatgtaaaccttgacatatctgatggttctgctcagtgcttgtgtcttagattattgcactgacgtaattggaaaatgagtaatctgccaggaagcaacatattgtgttttactgaagtacagttagtcctgctgtcgcacaactttgctctgatgtttgaaagcataaagtatgttttcctaccatgggagaggtccaactgatattgcatctggatcttttgtgaaacatgatagcacttagcaacgctaggcagaagatgcacttttgaaatgtagtgttgcaccgttgctgtcgcaatcgttagttacacatatgttctctatatgctgtcagatatccatatctcttaatggtcgtacctaccaatttgattctgataaaaatcaatcaatctattagttacagaacaagcagagaactcactgtacacggtctcttcttgtactgaactggtattcaacttcattcaaagagttctggtaaagtataaattgtgctagaacttttgagctccttaattttcatgtagtatttttgttacttgatttttcgcctatcttgcaatagcaactttaacactgaaaaagattgcttatggccactggcaagtatgaattgatcaaattctcaaaacatatcatttgctgatttgatgaagcacgattcttaccttatttgtatctaatttgttacattcactgtttacagcttctcttgtaacattggatataatgacgctgctacatgactattattttgacatcataacctacatataaagattagagactaatctgttttttttctgaactaaggaaatgaacttccatcagacttgatagacacactactaaagtggatcccaagcaatgatgaggagcttaggcttcgactgtcctcccgtagcaccgccacaccgcacgcgtccgtggcggtcgaacatgcattttggagagaccaacttgaatgtgcggagcagtcgatcacacaatattttcataatgatcattttctgtagttgcatggaagcaataactgaatcaagaatgctctatttatttcgatctcagccattttggaggacgaacgagcaccggggagagtccaggaggaggcagatactgctgggacatgtccaagccagtggagatgcagtggagatggagatcaacattggcatggagaagctgtgaaacccaccgcagcagaaccccacccagaggaagatcaacgcgcccgcctccgccatcaacgctctctctaccctctctctaccagtggagcag

SEQ ID NO: 27350 - DNA, 2382 bp, Zea Mays
attcagtttgacttgagaatctagatagaatggtttttttttctcattcctaaaataaaatattgagggtggttttggaagactccaaaacactcaaaacaaatcaagagtttgaggtcacatttgtcatggcgcatcctgcatcaagcaaacaatttatttagttttgaatggctatggctgttgccttacaagctgaaagaagtgtcattgaaaagaagaaacccgatatcaaacaaaggagggtggttgtcactggcatgggtgtagtgacaccattgggccatgatcccgacgtcttttacaacaatcttcttgatggtgttagcggaataagtgagatagagaggtttgactgttccaacttccccacgagaattgcaggagagataaaatccttttccactgatggttgggttgtacctaaacttgcaaagcggatggacaagtttatgctatatctgataactgctggaaagaaagcattagaaaatggtggactcactgaagaactgaggaacgagttggacaaaaccaggtgcggggtcctcattggttctgcaatgggcggcatgaaggtttttaatgatgcaatttgaagcactgagggtctcttacaagaaaatgaacccattttgtgttccttttgcaactaccaatatgggctctgcaatccttgcaatggatctgggatggatgggaccaaattattctatttccacagcctgtgctaccagtaacttctgtatccttaacgcagcaaaccacatcagaagaggcgaagctgacgttatgctctgcggtggttctgatgcacctcttatcccaatcggattgggaggttttgtggcctgcagagcactttcacagaggaacagtgacccaacgaaagcttctcgaccttgggacatgggccgtgatggttttgttatgggggaaggggctggtgtcctcgtattggaagaacttgagcacgccaaggaaagaggtgcaacaatatatgctgaatttcttggtggaagcttcacatgtgatgcttaccacatgactgagccacatcctgaaggaagagggattactctctgcatagaaaaggcactagctgatgcaggggtagcaagggaagaaatcaactacgtgaatgcccatgcaacttctacacaagcaggtgacctgaaggagtatgaggctattgtgcgctgttttcgccagaaccctcaactgagggtgaactcgaccaaatcaatgactgggcatcttataggagcagctggtggaatagaagcagttgcttctatacaagctataagaactggttgggtccatccaaatttgaatttagaaaatcctgaggacactgtggtaagctccttggcttgtgtagtctgtgtggcgagtattctcgtggtgttttgccccgcaaggagttgtaagagtcgtctagactcctttttctttctttttaatataatgatgcgtaattctcctgtgtgttcgggaaaaaacaaatcttctttctacttctactaaataagctagatatgaatgaaagagcaaaatctatatgttgaatggtgttttaaatttttaatgttggtcttgatgcaggatgtgggcatcttggtaggatcacagaaggagagatgtgaggtgaaggtggcgttatccaactcattcggcttcggtgggcacaactcatcaattctctttgccccctttaaggaactgccatcttcctcatcgtccaaatagattcatatatctggatctccacatagaagacaagtggactctgcaacttcctcggtgccatagatattacagggaggtccaaactgagcgtatctgagcgaacaaaacatcagcccccctacatgtttcatctatatcacgaagttgcagatatgtggtaactatcaaaaggatttaccgtacctgggccagtgttttcgccttcaccatacctgcccattgtcagtactatttcctagatttggagtagtcccgtagctaatcctcttccctgcggaggtgatgggattttatgttgtattgatgttgtcaacaatgtcgttcttagccatgaattgctggttccactgtaagcaccgctggatgtttatcgctttggctgtttttctgctgttcataactgagttaaagatttgtaaatggcgacgctgttcggcctttgatcatctgtgaaacttgagcggagggagcaacaagtatggcctagcctagcagtacgctagtgcctttgaagaaggcaggctagctgctgctcctcaaagtttagcacctagccgaccatagtctctttctcttttacagtcttctctaaaaaatcacttctccatatcttattcctctccaacagca

SEQ ID NO: 27351 - DNA, 2748 bp, Zea Mays
agtcgtccccgtccctccactcctcccgtcgagcacttggcactgccaatggcggcagccgcccacaccccttcgatgcgcgcaagccgcctcctttcctcctgagatcgacgcacctcctcctctcgtactccattcccgctccaagttcgtttcttcggcaccgagccatcgcacggccgcccccgcatctcgtcctgctctcaggtccttggcctccgccgttcttcgacaggggcgcgccccggtgcccactccgcgaaatccgagtcccttgtgcagctccgtagggtggaagagatccatcaggcggtgagcggtaggaggcgcccgtacaactgaggggacgggcaatggcggccgtggcaggcccactctgcacgtggctcgtcgccgcgtgcttgtctgcggcttgcgacgcagaagagtacaagcagaagcattgctgccccggcggaagcggcgctgggggcggcgtcatgctcggcctgcgccgccgcctcggcgcgcggcgtcgcggcttggcgcgctctggaatggctatggctgttgccttacaagctgaaagaagtgtcattgaaaagaagaaacccgatatcaaacaaaggagggtggttgtcactggcatgggtgtagtgacaccattgggccatgatcccgacgtcttttacaacaatcttcttgatggtgttagcggaataagtgagatagagaggtttgactgttccaacttccccacgagaattgcaggagagataaaatccttttccactgatggttgggttgtacctaaacttgcaaagcggatggacaagtttatgctatatctgataactgctggaaagaaagcattagaaaatggtggactcactgaagaactgaggaacgagttggacaaaaccaggtgcggggtcctcattggttctgcaatgggcggcatgaaggtttttaatgatgcaatttgaagcactgagggtctcttacaagaaaatgaacccattttgtgttccttttgcaactaccaatatgggctctgcaatccttgcaatggatctgggatggatgggaccaaattattctatttccacagcctgtgctaccagtaacttctgtatccttaacgcagcaaaccacatcagaagaggcgaagctgacgttatgctctgcggtggttctgatgcacctcttatcccaatcggattgggaggttttgtggcctgcagagcactttcacagaggaacagtgacccaacgaaagcttctcgaccttgggacatgggccgtgatggttttgttatgggggaaggggctggtgtcctcgtattggaagaacttgagcacgccaaggaaagaggtgcaacaatatatgctgaatttcttggtggaagcttcacatgtgatgcttaccacatgactgagccacatcctgaaggaagagggattactctctgcatagaaaaggcactagctgatgcaggggtagcaagggaagaaatcaactacgtgaatgcccatgcaacttctacacaagcaggtgacctgaaggagtatgaggctattgtgcgctgttttcgccagaaccctcaactgagggtgaactcgaccaaatcaatgactgggcatcttataggagcagctggtggaatagaagcagttgcttctatacaagctataagaactggttgggtccatccaaatttgaatttagaaaatcctgaggacactgtggtaagctccttggcttgtgtagtctgtgtggcgagtattctcgtggtgttttgccccgcaaggagttgtaagagtcgtctagactcctttttctttctttttaatataatgatgcgtaattctcctgtgtgttcgggaaaaaacaaatcttctttctacttctactaaataagctagatatgaatgaaagagcaaaatctatatgttgaatggtgttttaaatttttaatgttggtcttgatgcaggatgtgggcatcttggtaggatcacagaaggagagatgtgaggtgaaggtggcgttatccaactcattcggcttcggtgggcacaactcatcaattctctttgccccctttaaggaactgccatcttcctcatcgtccaaatagattcatatatctggatctccacatagaagacaagtggactctgcaacttcctcggtgccatagatattacagggaggtccaaactgagcgtatctgagcgaacaaaacatcagcccccctacatgtttcatctatatcacgaagttgcagatatgtggtaactatcaaaaggatttaccgtacctgggccagtgttttcgccttcaccatacctgcccattgtcagtactatttcctagatttggagtagtcccgtagctaatcctcttccctgcggaggtgatgggattttatgttgtattgatgttgtcaacaatgtcgttcttagccatgaattgctggttccactgtaagcaccgctggatgtttatcgctttggctgtttttctgctgttcataactgagttaaagatttgtaaatggcgacgctgttcggcctttgatcatctgtgaaacttgagcggagggagcaacaagtatggcctagcctagcagtacgctagtgcctttgaagaaggcaggctagctgctgctcctcaaagtttagcacctagccgaccatagtctctttctcttttacagtcttctctaaaaaatcacttctccatatcttattcctctccaacagca

SEQ ID NO: 27352 - DNA, 1269 bp, Zea Mays
cggaaggcgtttcttgacaactggctggctagattcagtagtcagaaccgaaaccttaaccttattcggcgactatggcggcggcaccggcaggcggcggccctcgggcattgtcccagcgggagcaggacatccagatgatgctcgccgccgatgtccacctcggcaccaagaactgcgacttccaggtggagcgctacgtgtacaagcgccgcactgatggtatctacattattaaccttggaaagacctgggacaagcttcagttggccgccagggtcatcgttgccattgagaatccgcaggacattatcgtgcagtctgctaggccctatggccagagggctgtcctcaagtttgcgcagtacactggtgcccatgccattgctggcaggcacactcctggtacattcaccaaccagttgcaaacctccttcagtgagccacgccttcttatcctgactgacccgaggactgatcatcagcccattaaggagtctgcgcttggaaacattcccaccatcgccttctgtgatactgattcccctatgcgctatgttgatatcggcattcccgccaataacaaggggaaacagagcattggttgtctgttctggctgctcgcccgaatggtcctccagatgcgcggtacaattcttccaggacacaagtgggacatcatggtagatcttttcttctacagagacccagaggaagcgaagcagctggaggaagaagaggctctggttgcacctgactatggcgcggttgcagaatacactgcaccaggcgctgacaactggggcggtgaatggggtgctggcgaagctgcagctccagctgctagcattccagctgctggcgcagactgggctgctgctccagctcctcctgctgacggtgtctgggacgcagctgtggctccacctccagcagcagcccccggatgggaacaaggcgcggcccccgttgcggcgtcgacccctacctgggagtaattaataaagagtaaatgagcatggtggatggtttatactagtcatcagcggagcttgttggtaggcacttgctggagtagttgcttcgaacttctttttttcgtgttagatgaggtaaaaaaacaattttgtgttattgactctgctgtgagcgagtgaaccttgcacattttcgttatctcaaatggatagatctgttctacgcttgttttgtgaattgtaatagctgttcgtttcggcaagtgtctcgcctggcagacggttttgcgca

SEQ ID NO: 27353 - DNA, 1993 bp, Zea Mays
aaagcctacggggtactgctacctcaacgagcgtatctgcttttttttttggtaaaagaatttgtttttgcaaagctagctcctacgctgccgccgccatgcaccgcttcgccgccgacagggcgcgccgcgcggtggccgcgtccctgcgcggcgcagcttccagagcagcagcagcgccgtcgcgtcacgctccggcgcctcgccatccaacctccccagtcggggcggcggcgccggttgctgccgccgccatggcgagggccgccatgtccacggcggtcgcgggcgtgccaccaccggtgtcgctcgacaccatcagccccaaggtgccgccagtgtcgctcgacaccatcaaccccaaggtcttgaagtgtcaatttgcagtccggggagagattgtcacacgtgctcagaaattgcaacaagaactgcagagaaatccagaatcgcttccttttgatgagatactctactgtaacattggaaatccccattccattggccaacagccagttacctacttcagagaagttctatctttatgtgagaatccagctctcctggacaaaagtgaaacgcatgctttatacaggtcagatgctatagagagagcacggaaaattctagacaagataccaggaagagctacaggagcatataggccacagtcagggtataaaaggtttacgtgatgaaattgctgccggaattgctgcccgtgatgggtttcatgcaagcgcagataacatcttcctaacggatggagcaagcccagcggtacacatgattctgcagttattgataaggtccgagaaggatggcattctttgtcctattccacagtacccattgtactctgcatcaattgctcttcatggttccttatttccttgatgaagagacagggtgggcacttgaggttgatgagctcaagaaacaacttgaggaggctcgatctaagggcatcagtgtcagggcgcttgttgtcataaatccaggaaatccaacaggacaggtccttaccgaggaaaaccagaagaaaattgttgaattctgcaagaatgaaaggctcgttcttctcgcggatgaggtttaccaagaaaacatatatgtcgaagacaagcaattccactcgttcaaaaaaatcgcacggtcgctgggatacactgatgacgaccttcctttggtatcgttccagtcgatttctaaaggctactatggagaatgtggaaagcgaggtggttacatggagataactgggttcagtcctcaagtacgggaccaaatctacaagatggcatcgataaatctgtgctccaatatcaccggccaaattcttgctagccttgtcatgaacccaccaaaggctggggatgaatccttcgaatccttcaggttagagagggatggtatcctttcatcgttgggtcgccgtgcaaaggctttggaagaagcattcaacagtttagaaggtattacatgcaataaagccgaaggcgcgatgtatctgttcccacgccttcacttaccccggaaggcgattggagctgcccaagcagccggcactgccccagatgcttactacgctaaacgcctgctagaggccactgggatcgtcttcgtccctggttctggttttggacaggtccccggaacatggcacatcagatccacgatactgccgcaggaggacaaaatacctgggatagtatctaggttcaaggagtttcacgacaagttcatggatgaattccgtgattattgagtgtccatctcagttcagtcattgcatgaattctgccaagagggcatcctgtcattttgtcgcgatcggcaccgttactaattggtgttgccccctcatcgtcctatggatgcatgaacaaaaaaaaacatcttaacttctgttaggatatatggctagcagatcatgtatatggtaataaaaatattgttttatgttatagattgtattatttatagagtgcta

SEQ ID NO: 27354 - DNA, 2158 bp, Zea Mays
aaagcctacggggtactgctacctcaacgagcgtatctgcttttttttttggtaaaagaatttgtttttgcaaagctagctcctacgctgccgccgccatgcaccgcttcgccgccgacagggcgcgccgcgcggtggccgcgtccctgcgcggcgcagcttccagagcagcagcagcgccgtcgcgtcacgctccggcgcctcgccatccaacctccccagtcggggcggcggcgccggttgctgccgccgccatggcgagggccgccatgtccacggcggtcgcgggcgtgccaccaccggtgtcgctcgacaccatcagccccaaggtgccgccagtgtcgctcgacaccatcaaccccaaggtcttgaagtgtcaatttgcagtccggggagagattgtcacacgtgctcagaaattgcaacaagaactgcagagaaatccagaatcgcttccttttgatgagatactctactgtaacattggaaatccccattccattggccaacagccagttacctacttcagagaagttctatctttatgtgagaatccagctctcctggacaaaagtgaaacgcatgctttatacagatgctatagagagagcacggaaaattctagacaagataccaggaagagctacaggagcatataggccacagtcagggtataaaaggtttacgtgatgaaattgctgccggaattgctgcccgtgatgggtttcatgcaagcgcagataacatcttcctaacggatggagcaagcccagcggtacacatgattctgcagttattgataaggtccgagaaggatggcattctttgtcctattccacagtacccattgtactctgcatcaattgctcttcatggtggttcccttgttccttatttccttgatgaagagacagggtgggcacttgaggttgatgagctcaagaaacaacttgaggaggctcgatctaagggcatcagtgtcagggcgcttgttgtcataaatccaggaaatccaacaggacaggtccttaccgaggaaaaccagaagaaaattgttgaattctgcaagaatgaaaggctcgttcttctcgcggatgaggtttaccaagaaaacatatatgtcgaagacaagcaattccactcgttcaaaaaaatcgcacggtcgctgggatacactgatgacgaccttcctttggtatcgttccagtcgatttctaaaggctactatggagaatgtggaaagcgaggtggttacatggagataactgggttcagtcctcaagtacgggaccaaatctacaagatggcatcgataaatctgtgctccaatatcaccggccaaattcttgctagccttgtcatgaacccaccaaaggctggggatgaatccttcgaatccttcaggttagagagggatggtatcctttcatcgttgggtcgccgtgcaaaggctttggaagaagcattcaacagtttagaaggtattacatgcaataaagccgaaggcgcgatgtatctgttcccacgccttcacttaccccggaaggcgattggagctgcccaagcagccggcactgccccagatgcttactacgctaaacgcctgctagaggccactgggatcgtcttcgtccctggttctggttttggacaggtccccggaacatggcacatcagatccacgatactgccgcaggaggacaaaatacctgggatagtatctaggttcaaggagtttcacgacaagttcatggatgaattccgtgattattgagtgtccatctcagttcagtcattgcatgaattctgccaagagggcatcctgtcattttgtcgcgatcggcaccgtctgcccgagttccagccacggtcggtcggtcggtaccgactagctagctagcggtggatccgtggatgaccaccgatgaaccgttcggtatagaccatctctgctgccacgtgtgtcgtcttttcattagtccacattatttcgatgtccaaaatattttaagaacctaaggaaatatttatgaatcatgtaacatttatatttacatattatattttttatgtttgtgtcaattttatttatgatgtacaaactatgtaatttgtatttcttttatgaactatataattttatttgttcaattatata

SEQ ID NO: 27355 - DNA, 1592 bp, Zea Mays
ctacctctcccgtcgcacctcgccctctcccttgccctgccccagatctcggccttcagtcctcgctgccgccgcgacttgctcgccccgtctccctccggccccgcctcatcgcggccgtggtggccaaggaacacgagctcattggaaaacactcttaaataaagcttccaatgaacaagacaggagctcgacttcgcctagctccgaacaagcggtcgacgaggcggaggtctcgcgtcctgcggatggcaaccgatagtgaagcctcgaaggcagctgaggttgtggttgactggcataaacaggacaaaaagaggatgctccatgcagtttaccgtgttggggatctggaccgcacaatcaaaatgctttgggatgaaactgctgaggaaaagggatgttcctgatgagaagtacaccaacgccttccttggctttgggccagagaacaccaactttgcagttgaattgaccaactttgcggaggtctcgcgtcctacgtgcgtcgcgccgttgcctggctccgtcctcgccgttcctctgtagaagctggccgctgaccctcgccgtcgcgccgttttttattagatgaagaatgaatcaacccttgtagaagctaaagatagaagataacactactctgtttttgaatgtctgaagtgtaattttgcagccttgcaactataaaacaaacaatgtatggcttaattattgcagttgcacagtgtgaagatttaaaattgaagtgctatgaagagatggataagaggaagaaactttataatattgttcaagagacaaaaggaaattatcagggtttttttgtcgatgccgacccttaagcaaaaatgaggtgtcatcaagcctgaatgcaaatggtggaacaactaaaaagacatttaagtttgatagagtattcacgccgaaggatgatcaaggtgtgggcgtctccggcggcccgactatacgaagcgagggcgtatcggggctaaggacacgaaaggccaagcgcacagggcgtacggcagtaagcccgcctgcaccgcaccagaccgtcacccgcgacgtgcccatgtcatgacgccacggtggcggcacgctgacccatcgacgtcaccctcttcctcgcttccgctcgacagcctccagtttcctggtcagtcttcgtgccgcctctctgccacacaccgtctctcagagatggaatcaccacccctcacagttgaagcgaccgcttttaccgagaaaaatgatggacatgactttggaggatataatcaagatgtgaaagaaaaagaatcctggaggcaagaaaccccctaggcggccggtaaactctaagtctgaaggtttagggttttcatgctctcgactctgatagctaactcagaactgatattcaatgtaaaatattcagtgtgatagaaaaagaagcgagaggtgtgacgtggtatgtttatagctattgtgcagtatacaccttgcttacagggcccacgccaccatgatgtcacatttcaattcattttgtgacctctgatgaagagatttaaacacatctgttctatcctatccatagttttaacttc

SEQ ID NO: 27356 - DNA, 1843 bp, Zea Mays
agccaacaaagctaaatgaactcaacaaagactacagaaaagctaaaagaactctaaaaagacaacaacaaagcacctccacacctaactgaacaaactgagaggacatcttcgggtgggaggagtctggagggtttaaagttggcggagtacaaggtgtatttaaagaagaatggtcttagccaaactgggggcatggacacttgtgtagacagaatagtactccattggaggttcaaagatgcggatccaaggagaatttatcctcggtcatccttttgtatcaactgtaaaggtgatgtttgtaggggcgatgccgttctattcaaacagaaggtgtacgagaagagtggaaaaaggcatgcaaaatgtataggtaatcgtatagtagccggcaaagtcatcaaggaaagttatggtaaacaaaaacagcaacacactttcacgattcaagtgttttggagcaaaggacctgggaaattaccacctttgcatctgttgcttgtcaaagggcgcaacctatacagaatgatgacttttcgtcagccttgggcaaatgaagcagaaaggctgaagattctagaagagaagcacaacagaggggatgatgcaaggcgtgttcgtgcattgaatagacctaattctgctggaaacactcttaaaggcaagaaaaaattgcacaaggaaaagcacaagtctcgatctgaaagacctcaccgccaatctaatatcaccgaactggataaaggcaaaaaacgacctgcacaatcctccaagtccgatctgcctaataaaagatctaagaaagaagggtcccaagttccttctaggaaaaaggatactggtggtaggatggcaaagaaaaatggtccctgccaagataagagcatttgtactggccagaacagctctctatgcaaagacaatagggagaagcacagtcatgctacctttcagaaaaagtgtcacgctgaacctctcaacaacggtccatctggttctgggtggaacagaactgctggcggacacagccaattcgaaggaagacacataactccagcttctcacgtcgaggcaaatcatggaaattttgtttctgtacagcatccttgcgtcgagaggcttcaacggcctactcaatcgcgtgaagttgctctggctcaccccggcggcggccatccatacgtactgtccagcgctgcaatgggcctccgacatcaaaatggagcaacggccggtgtgcacgcaccggcatatttcaggggacttccactcagtcaacagagggcagcatttccttcggccagcacgccgcaaactgggtaccatcctcatccagaagaattatttgttgcgccacacttcagatatcctagagggagtgctggtttccgccgataagacagtctggttggcgcctgctgcattttggtaactgcattggtggtaagacatgcggtcttcggcttattttcattgatgccatttcgttgccatgactcatgagcaaggagtatttgagtcttacctaatgtgcagagaggccagaactttgtttcatcttgagataaagcttccttcgtatataagaaaaaggaagatcctcacctcaattgaaggacttgattttctttgctttttttggggggcaggatgtgatggaaaaacagtgttaccatcgagtcgcataatcagggctctgcgtgcttcagacgggggaagggtttaatacaaacatgaatgctgcttttttttgtcgatctgagtccttagctgcaagattgacgcgagacatcggcttccaatatatgtacaccaatggtttctggaatttgagctagta

SEQ ID NO: 27357 - DNA, 1830 bp, Zea Mays
accatctgaaacctttcagcgttcatagccaacaaagctaaatgaactcaacaaagactacagaaaagctaaaagaactctaaaaagacaacaacaaagcacctccacacctaactgaacaaactgagaggacatcttcgggtgggaggagtctggagggtttaaagttggcggagtacaaggtgtatttaaagaagaatggtcttagccaaactgggggcatggacacttgtgtagacagaatagtactccattggaggttcaaagatgcggatccaaggagaatttatcctcggtcatccttttgtatcaactgtaaaggggcgatgccgttctattcaaacagaaggtgtacgagaagaggtaatcgtatagtagccggcaaagtcatcaaggaaagttatggtaaacaaaaacagcaacacactttcacgattcaagtgttttggagcaaaggacctgggaaattaccacctttgcatctgttgcttgtcaaagggcgcaacctatacagaatgatgacttttcgtcagccttgggcaaatgaagcagaaaggctgaagattctagaagagaagcacaacagaggggatgatgcaaggcgtgttcgtgcattgaatagacctaattctgctggaaacactcttaaaggcaagaaaaaattgcacaaggaaaagcacaagtctcgatctgaaagacctcaccgccaatctaatatcaccgaactggataaaggcaaaaaacgacctgcacaatcctccaagtccgatctgcctaataaaagatctaagaaagaagggtcccaagttccttctaggaaaaaggatactggtggtaggatggcaaagaaaaatggtccctgccaagataagagcatttgtactggccagaacagctctctatgcaaagacaatagggagaagcacagtcatgctacctttcagaaaaagtgtcacgctgaacctctcaacaacggtccatctggttctgggtggaacagaactgctggcggacacagccaattcgaaggaagacacataactccagcttctcacgtcgaggcaaatcatggaaattttgtttctgtacagcatccttgcgtcgagaggcttcaacggcctactcaatcgcgtgaagttgctctggctcaccccggcggcggccatccatacgtactgtccagcgctgcaatgggcctccgacatcaaaatggagcaacggccggtgtgcacgcaccggcatatttcaggggacttccactcagtcaacagagggcagcatttccttcggccagcacgccgcaaactgggtaccatcctcatccagaagaattatttgttgcgccacacttcagatatcctagagggagtgctggtttccgccgataagacagtctggttggcgcctgctgcattttggtaactgcattggtggtaagacatgcggtcttcggcttattttcattgatgccatttcgttgccatgactcatgagcaaggagtatttgagtcttacctaatgtgcagagaggccagaactttgtttcatcttgagataaagcttccttcgtatataagaaaaaggaagatcctcacctcaattgaaggacttgattttctttgctttttttggggggcaggatgtgatggaaaaacagtgttaccatcgagtcgcataatcagggctctgcgtgcttcagacgggggaagggtttaatacaaacatgaatgctgcttttttttgtcgatctgagtccttagctgcaagattgacgcgagacatcggcttccaatatatgtacaccaatggtttctggaatttgagctagta

SEQ ID NO: 27358 - DNA, 1861 bp, Zea Mays
ggcataccatctgaaacctttcagcgttcatagccaacaaagctaaatgaactcaacaaagactacagaaaagctaaaagaactctaaaaagacaacaacaaagcacctccacacctaactgaacaaactgagaggacatcttcgggtgggaggagtctggagggtttaaagttggcggagtacaaggtgtatttaaagaagaatggtcttagccaaactgggggcatggacacttgtgtagacagaatagtactccattggaggttcaaagatgcggatccaaggagaatttatcctcggtcatccttttgtatcaactgtaaaggggcgatgccgttctattcaaacagaaggtgtacgagaagagtggaaaaaggcatgcaaaatgtataggtaatcgtatagtagccggcaaagtcatcaaggaaagttatggtaaacaaaaacagcaacacactttcacgattcaagtgttttggagcaaaggacctgggaaattaccacctttgcatctgttgcttgtcaaagggcgcaacctatacagaatgatgacttttcgtcagccttgggcaaatgaagcagaaaggctgaagattctagaagagaagcacaacagaggggatgatgcaaggcgtgttcgtgcattgaatagacctaattctgctggaaacactcttaaaggcaagaaaaaattgcacaaggaaaagcacaagtctcgatctgaaagacctcaccgccaatctaatatcaccgaactggataaaggcaaaaaacgacctgcacaatcctccaagtccgatctgcctaataaaagatctaagaaagaagggtcccaagttccttctaggaaaaaggatactggtggtaggatggcaaagaaaaatggtccctgccaagataagagcatttgtactggccagaacagctctctatgcaaagacaatagggagaagcacagtcatgctacctttcagaaaaagtgtcacgctgaacctctcaacaacggtccatctggttctgggtggaacagaactgctggcggacacagccaattcgaaggaagacacataactccagcttctcacgtcgaggcaaatcatggaaattttgtttctgtacagcatccttgcgtcgagaggcttcaacggcctactcaatcgcgtgaagttgctctggctcaccccggcggcggccatccatacgtactgtccagcgctgcaatgggcctccgacatcaaaatggagcaacggccggtgtgcacgcaccggcatatttcaggggacttccactcagtcaacagagggcagcatttccttcggccagcacgccgcaaactgggtaccatcctcatccagaagaattatttgttgcgccacacttcagatatcctagagggagtgctggtttccgccgataagacagtctggttggcgcctgctgcattttggtaactgcattggtggtaagacatgcggtcttcggcttattttcattgatgccatttcgttgccatgactcatgagcaaggagtatttgagtcttacctaatgtgcagagaggccagaactttgtttcatcttgagataaagcttccttcgtatataagaaaaaggaagatcctcacctcaattgaaggacttgattttctttgctttttttggggggcaggatgtgatggaaaaacagtgttaccatcgagtcgcataatcagggctctgcgtgcttcagacgggggaagggtttaatacaaacatgaatgctgcttttttttgtcgatctgagtccttagctgcaagattgacgcgagacatcggcttccaatatatgtacaccaatggtttctggaatttgagctagta

SEQ ID NO: 27359 - DNA, 2172 bp, Zea Mays
gcaaaaacgcgaaacgttttcaccaacacggctatctgtcttctgtcccatcccattccaaagcgaatagaggggaaggtgggggcgggaggcaatcggagggcgagggccgaggaggagtcaaaaggcttctccagttgagcggcgggatgccggtaacgcgtaggcgcgccgccgtggcggcggtggcgcaggaggaggggcgcgatgcggcgatctacatatcctctgattccgatgcggggtcagacccggaggattcagaatccgaggaagaggaggatactagcgatgaggacttcatcgacgtcagcgacagcgaggccgatgatggggaaagcagcgacgaggaaggcgaggaggattcggagtcggaggctgaggctgaggctgagcaattgggcgcggatcggagcgaggttgcctgcaacaaaattgctggtcttctaagcagtgggaggagtctggagggtttaaagttggcggagtacaaggtgtatttaaagaagaatggtcttagccaaactgggggcatggacacttgtgtagacagaatagtactccattggaggttcaaagatgcggatccaaggagaatttatcctcggtcatccttttgtatcaactgtaaaggtgatgtttgtaggggcgatgccgttctattcaaacagaaggtgtacgagaagaggcatgcaaaatgtataggtaatcgtatagtagccggcaaagtcatcaaggaaagttatggtaaacaaaaacagcaacacactttcacgattcaagtgttttggagcaaaggacctgggaaattaccacctttgcatctgttgcttgtcaaagggcgcaacctatacagaatgatgacttttcgtcagccttgggcaaatgaagcagaaaggctgaagattctagaagagaagcacaacagaggggatgatgcaaggcgtgttcgtgcattgaatagacctaattctgctggaaacactcttaaaggcaagaaaaaattgcacaaggaaaagcacaagtctcgatctgaaagacctcaccgccaatctaatatcaccgaactggataaaggcaaaaaacgacctgcacaatcctccaagtccgatctgcctaataaaagatctaagaaagaagggtcccaagttccttctaggaaaaaggatactggtggtaggatggcaaagaaaaatggtccctgccaagataagagcatttgtactggccagaacagctctctatgcaaagacaatagggagaagcacagtcatgctacctttcagaaaaagtgtcacgctgaacctctcaacaacggtccatctggttctgggtggaacagaactgctggcggacacagccaattcgaaggaagacacataactccagcttctcacgtcgaggcaaatcatggaaattttgtttctgtacagcatccttgcgtcgagaggcttcaacggcctactcaatcgcgtgaagttgctctggctcaccccggcggcggccatccatacgtactgtccagcgctgcaatgggcctccgacatcaaaatggagcaacggccggtgtgcacgcaccggcatatttcaggggacttccactcagtcaacagagggcagcatttccttcggccagcacgccgcaaactgggtaccatcctcatccagaagaattatttgttgcgccacacttcagatatcctagagggagtgctggtttccgccgataagacagtctggttggcgcctgctgcattttggtaactgcattggtggtaagacatgcggtcttcggcttattttcattgatgccatttcgttgccatgactcatgagcaaggagtatttgagtcttacctaatgtgcagagaggccagaactttgtttcatcttgagataaagcttccttcgtatataagaaaaaggaagatcctcacctcaattgaaggacttgattttctttgctttttttggggggcaggatgtgatggaaaaacagtgttaccatcgagtcgcataatcagggctctgcgtgcttcagacgggggaagggtttaatacaaacatgaatgctgcttttttttgtcgatctgagtccttagctgcaagattgacgcgagacatcggcttccaatatatgtacaccaatggtttctggaatttgagctagta

SEQ ID NO: 27360 - DNA, 2155 bp, Zea Mays
gcaaaaacgcgaaacgttttcaccaacacggctatctgtcttctgtcccatcccattccaaagcgaatagaggggaaggtgggggcgggaggcaatcggagggcgagggccgaggaggagtcaaaaggcttctccagttgagcggcgggatgccggtaacgcgtaggcgcgccgccgtggcggcggtggcgcaggaggaggggcgcgatgcggcgatctacatatcctctgattccgatgcggggtcagacccggaggattcagaatccgaggaagaggaggatactagcgatgaggacttcatcgacgtcagcgacagcgaggccgatgatggggaaagcagcgacgaggaaggcgaggaggattcggagtcggaggctgaggctgaggctgagcaattgggcgcggatcggagcgaggttgcctgcaacaaaattgctggtcttctaagcagtgggaggagtctggagggtttaaagttggcggagtacaaggtgtatttaaagaagaatggtcttagccaaactgggggcatggacacttgtgtagacagaatagtactccattggaggttcaaagatgcggatccaaggagaatttatcctcggtcatccttttgtatcaactgtaaaggtgatgtttgtaggggcgatgccgttctattcaaacagaaggtgtacgagaagaggtaatcgtatagtagccggcaaagtcatcaaggaaagttatggtaaacaaaaacagcaacacactttcacgattcaagtgttttggagcaaaggacctgggaaattaccacctttgcatctgttgcttgtcaaagggcgcaacctatacagaatgatgacttttcgtcagccttgggcaaatgaagcagaaaggctgaagattctagaagagaagcacaacagaggggatgatgcaaggcgtgttcgtgcattgaatagacctaattctgctggaaacactcttaaaggcaagaaaaaattgcacaaggaaaagcacaagtctcgatctgaaagacctcaccgccaatctaatatcaccgaactggataaaggcaaaaaacgacctgcacaatcctccaagtccgatctgcctaataaaagatctaagaaagaagggtcccaagttccttctaggaaaaaggatactggtggtaggatggcaaagaaaaatggtccctgccaagataagagcatttgtactggccagaacagctctctatgcaaagacaatagggagaagcacagtcatgctacctttcagaaaaagtgtcacgctgaacctctcaacaacggtccatctggttctgggtggaacagaactgctggcggacacagccaattcgaaggaagacacataactccagcttctcacgtcgaggcaaatcatggaaattttgtttctgtacagcatccttgcgtcgagaggcttcaacggcctactcaatcgcgtgaagttgctctggctcaccccggcggcggccatccatacgtactgtccagcgctgcaatgggcctccgacatcaaaatggagcaacggccggtgtgcacgcaccggcatatttcaggggacttccactcagtcaacagagggcagcatttccttcggccagcacgccgcaaactgggtaccatcctcatccagaagaattatttgttgcgccacacttcagatatcctagagggagtgctggtttccgccgataagacagtctggttggcgcctgctgcattttggtaactgcattggtggtaagacatgcggtcttcggcttattttcattgatgccatttcgttgccatgactcatgagcaaggagtatttgagtcttacctaatgtgcagagaggccagaactttgtttcatcttgagataaagcttccttcgtatataagaaaaaggaagatcctcacctcaattgaaggacttgattttctttgctttttttggggggcaggatgtgatggaaaaacagtgttaccatcgagtcgcataatcagggctctgcgtgcttcagacgggggaagggtttaatacaaacatgaatgctgcttttttttgtcgatctgagtccttagctgcaagattgacgcgagacatcggcttccaatatatgtacaccaatggtttctggaatttgagctagta

SEQ ID NO: 27361 - DNA, 2136 bp, Zea Mays
gcaaaaacgcgaaacgttttcaccaacacggctatctgtcttctgtcccatcccattccaaagcgaatagaggggaaggtgggggcgggaggcaatcggagggcgagggccgaggaggagtcaaaaggcttctccagttgagcggcgggatgccggtaacgcgtaggcgcgccgccgtggcggcggtggcgcaggaggaggggcgcgatgcggcgatctacatatcctctgattccgatgcggggtcagacccggaggattcagaatccgaggaagaggaggatactagcgatgaggacttcatcgacgtcagcgacagcgaggccgatgatggggaaagcagcgacgaggaaggcgaggaggattcggagtcggaggctgaggctgaggctgagcaattgggcgcggatcggagcgaggttgcctgcaacaaaattgctggtcttctaagcagtgggaggagtctggagggtttaaagttggcggagtacaaggtgtatttaaagaagaatggtcttagccaaactgggggcatggacacttgtgtagacagaatagtactccattggaggttcaaagatgcggatccaaggagaatttatcctcggtcatccttttgtatcaactgtaaaggtgatgtttgtaggggcgatgccgttctattcaaacagaaggtgtacgagaagaggtaatcgtatagtagccggcaaagtcatcaaggaaagttatggtaaacaaaaacagcaacacactttcacgattcaagtgttttggagcaaaggacctgggaaattaccacctttgcatctgttgcttgtcaaagggcgcaacctatacagaatgatgacttttcgtcagaaaggctgaagattctagaagagaagcacaacagaggggatgatgcaaggcgtgttcgtgcattgaatagacctaattctgctggaaacactcttaaaggcaagaaaaaattgcacaaggaaaagcacaagtctcgatctgaaagacctcaccgccaatctaatatcaccgaactggataaaggcaaaaaacgacctgcacaatcctccaagtccgatctgcctaataaaagatctaagaaagaagggtcccaagttccttctaggaaaaaggatactggtggtaggatggcaaagaaaaatggtccctgccaagataagagcatttgtactggccagaacagctctctatgcaaagacaatagggagaagcacagtcatgctacctttcagaaaaagtgtcacgctgaacctctcaacaacggtccatctggttctgggtggaacagaactgctggcggacacagccaattcgaaggaagacacataactccagcttctcacgtcgaggcaaatcatggaaattttgtttctgtacagcatccttgcgtcgagaggcttcaacggcctactcaatcgcgtgaagttgctctggctcaccccggcggcggccatccatacgtactgtccagcgctgcaatgggcctccgacatcaaaatggagcaacggccggtgtgcacgcaccggcatatttcaggggacttccactcagtcaacagagggcagcatttccttcggccagcacgccgcaaactgggtaccatcctcatccagaagaattatttgttgcgccacacttcagatatcctagagggagtgctggtttccgccgataagacagtctggttggcgcctgctgcattttggtaactgcattggtggtaagacatgcggtcttcggcttattttcattgatgccatttcgttgccatgactcatgagcaaggagtatttgagtcttacctaatgtgcagagaggccagaactttgtttcatcttgagataaagcttccttcgtatataagaaaaaggaagatcctcacctcaattgaaggacttgattttctttgctttttttggggggcaggatgtgatggaaaaacagtgttaccatcgagtcgcataatcagggctctgcgtgcttcagacgggggaagggtttaatacaaacatgaatgctgcttttttttgtcgatctgagtccttagctgcaagattgacgcgagacatcggcttccaatatatgtacaccaatggtttctggaatttgagctagta

SEQ ID NO: 27362 - DNA, 2142 bp, Zea Mays
gcaaaaacgcgaaacgttttcaccaacacggctatctgtcttctgtcccatcccattccaaagcgaatagaggggaaggtgggggcgggaggcaatcggagggcgagggccgaggaggagtcaaaaggcttctccagttgagcggcgggatgccggtaacgcgtaggcgcgccgccgtggcggcggtggcgcaggaggaggggcgcgatgcggcgatctacatatcctctgattccgatgcggggtcagacccggaggattcagaatccgaggaagaggaggatactagcgatgaggacttcatcgacgtcagcgacagcgaggccgatgatggggaaagcagcgacgaggaaggcgaggaggattcggagtcggaggctgaggctgaggctgagcaattgggcgcggatcggagcgaggttgcctgcaacaaaattgctggtcttctaagcagtgggaggagtctggagggtttaaagttggcggagtacaaggtgtatttaaagaagaatggtcttagccaaactgggggcatggacacttgtgtagacagaatagtactccattggaggttcaaagatgcggatccaaggagaatttatcctcggtcatccttttgtatcaactgtaaaggggcgatgccgttctattcaaacagaaggtgtacgagaagaggtaatcgtatagtagccggcaaagtcatcaaggaaagttatggtaaacaaaaacagcaacacactttcacgattcaagtgttttggagcaaaggacctgggaaattaccacctttgcatctgttgcttgtcaaagggcgcaacctatacagaatgatgacttttcgtcagccttgggcaaatgaagcagaaaggctgaagattctagaagagaagcacaacagaggggatgatgcaaggcgtgttcgtgcattgaatagacctaattctgctggaaacactcttaaaggcaagaaaaaattgcacaaggaaaagcacaagtctcgatctgaaagacctcaccgccaatctaatatcaccgaactggataaaggcaaaaaacgacctgcacaatcctccaagtccgatctgcctaataaaagatctaagaaagaagggtcccaagttccttctaggaaaaaggatactggtggtaggatggcaaagaaaaatggtccctgccaagataagagcatttgtactggccagaacagctctctatgcaaagacaatagggagaagcacagtcatgctacctttcagaaaaagtgtcacgctgaacctctcaacaacggtccatctggttctgggtggaacagaactgctggcggacacagccaattcgaaggaagacacataactccagcttctcacgtcgaggcaaatcatggaaattttgtttctgtacagcatccttgcgtcgagaggcttcaacggcctactcaatcgcgtgaagttgctctggctcaccccggcggcggccatccatacgtactgtccagcgctgcaatgggcctccgacatcaaaatggagcaacggccggtgtgcacgcaccggcatatttcaggggacttccactcagtcaacagagggcagcatttccttcggccagcacgccgcaaactgggtaccatcctcatccagaagaattatttgttgcgccacacttcagatatcctagagggagtgctggtttccgccgataagacagtctggttggcgcctgctgcattttggtaactgcattggtggtaagacatgcggtcttcggcttattttcattgatgccatttcgttgccatgactcatgagcaaggagtatttgagtcttacctaatgtgcagagaggccagaactttgtttcatcttgagataaagcttccttcgtatataagaaaaaggaagatcctcacctcaattgaaggacttgattttctttgctttttttggggggcaggatgtgatggaaaaacagtgttaccatcgagtcgcataatcagggctctgcgtgcttcagacgggggaagggtttaatacaaacatgaatgctgcttttttttgtcgatctgagtccttagctgcaagattgacgcgagacatcggcttccaatatatgtacaccaatggtttctggaatttgagctagta

SEQ ID NO: 27363 - DNA, 2039 bp, Zea Mays
aaaaaacacaaacatttcggtgtttccataactcccaagccagcaggattattaaggaattaaggcccttgtgagcttcttttggtgatgttgcaatcgtgtttctccaccattctgaaaaacagacagccgtaggttgtggtgctaactgcatcactcctaaaagttgcaaaattatggtccagacttcacaggcaaaaacacaccctatcaatagataatgtattgtttcatcctcctggtcacaaaaagggaaagcctccggatggggtagattcctcttggctagtcgatcagctgtccacaatcggttatgatgaggctgttctccatagaatatgttgtgtgaaggtggagagctacttgacagaatactttccagaggtgggaagtactctgaggatgatgcaaaagctgtcctggtgcaaatattaaatgtcgtcgctttttgccacattcaaggagtggttcatcgagatctcaaaccagagaattttcttttcacatcaaaagatgagaattcccatcttaaggccattgactttggcttatcagactttgtaaaaccagatgagaggctgaatgacattgttggaagtgcttattatgttgctccagaagttctgcatagatgctatagcacagaagctgatgtctggagtataggtgtaattgcatatatccttctttgcggcagccgtccattttgggcacgcactgaatctggcatattccgttcggttctcaaagctgaccccagctacaatgaggcaccatggccttcgctgactccagaagcaatggattttgttaagcgattgctgtgcaaggatccacgtagaaggatgactgcagctcaggctttaaaaattataatgccattaggctgccgttggacattcttatattccgacttatcaaagcttatattcgttcctcatctttacggaaagccgctttgagggctctatcaaagaccttaacagttgacgagcttttctatctgaaagcacagttttctttattggaaccagacagaaatggatgcatcactcttgacaatatcagaatggccttaacgagagaagctactgatgcaatgaaggaatcccgagttcaagacattcttgtttcgttgagcgcccttcagtacagaagaatggacttccaagagttctgtgcagcagcagttagtgtgcatcagcttgaagcattggatagatgggagcaacatgcgcgatctgcttatgaatattttgagaaggaaggcaaccgagctattgtaatagatgaattagcttctgaattgggcctcagtccttcagtgccactgcatgtcgttctgcaagattggatcaggcatacggatgggaaattaagttttcttggatttgtcaagttgttgcatggcatgtccagcaggtccctgtcaaagatgagatagctgtcgataatctctaacgacagcgcgtgtttacaccgtcctgttgacttggttcacaggcaaattaacagggctaaagaatcgtacgattggagcttgcatatcaagggcgtctgagctctaacagcacctgatccgacactaatttaactatagagttatgtttattgttgcctgcctactgatcatttagccgatagggaaatgaaagaaaatctcacccatgtctgcaacatgtgatgtttctaacaaccttagattaggcgtcatcttctgttatgattctagaaattttgtaatgcttcttttctcgaactggagcaagttagctgcagtcaccaggttggcgactggagcatggacatatcactgtcattgtgacattgttactgtatcattgtaccgacagatgaaagtgcttgatgtggtatgtcaggttctctccgtgtatatattgattgatgagatggaattgtgccatttttaaatatcggaatattagtatgtcaacttgcactctctaaggctcttttggaaagcaggattttagaaaaaatcatataaattttttacaggaatcagttcattttcgaag

SEQ ID NO: 27364 - DNA, 2491 bp, Zea Mays
ctcactcgcaggccgcgtcggcaccgtgctgcctttactcctctccgaccaccttccccgtttcaattcgcttcactccccgcagtcgccactcgccgctccctcgaccccagagctctctctctctctccctccctcttcctagctccccctttccggcatggcctcctgctagctcccgtcggaacgcctcccagatcccagacgcagcgcgctaccccacgcgagcgaaggccggcgcgcgacatgggagggtgccacgcgaagccgctcacgcaggacgcggacggctcgccgccgcacgcggcgccggcgaccccgcccccgggcaacgctacccccggccccgggaagaagcactgggcggtgtccccgttcttcgcgttctccacgccgagcccgagccccgcgcaccacctcttcggcggctccgcggcgtcgccgcgcaagtcccccgcccccccgggctcggcgcccaccaccccggccaggcggatcctgaggctgcccttcccgccgccgtcgcccgccaagcacatccgggcggctctcgcgaggcggcacggcccgccgcggccgtccatccccgaggagggcggcggcgaaggggagggcggcggcggtgccaggggcctcgacaaggggtttgggttcaacaaggggttcgcggccaagtatgacttgggggatgaggtcggacggggccactttggctacacctgcgccgccacggttaagaagggcgcacgcaagggggagtccgtcgccgtcaaagtcatccccaaagcaaaggttgtgtgaaggtggagagctacttgacagaatactttccagaggtgggaagtactctgaggatgatgcaaaagctgtcctggtgcaaatattaaatgtcgtcgctttttgccacattcaaggagtggttcatcgagatctcaaaccagagaattttcttttcacatcaaaagatgagaattcccatcttaaggccattgactttggcttatcagactttgtaaaaccagatgagaggctgaatgacattgttggaagtgcttattatgttgctccagaagttctgcatagatgctatagcacagaagctgatgtctggagtataggtgtaattgcatatatccttctttgcggcagccgtccattttgggcacgcactgaatctggcatattccgttcggttctcaaagctgaccccagctacaatgaggcaccatggccttcgctgactccagaagcaatggattttgttaagcgattgctgtgcaaggatccacgtagaaggatgactgcagctcaggctttaaaaattataatgccattaggctgccgttggacattcttatattccgacttatcaaagcttatattcgttcctcatctttacggaaagccgctttgagggctctatcaaagaccttaacagttgacgagcttttctatctgaaagcacagttttctttattggaaccagacagaaatggatgcatcactcttgacaatatcagaatggccttaacgagagaagctactgatgcaatgaaggaatcccgagttcaagacattcttgtttcgttgagcgcccttcagtacagaagaatggacttccaagagttctgtgcagcagcagttagtgtgcatcagcttgaagcattggatagatgggagcaacatgcgcgatctgcttatgaatattttgagaaggaaggcaaccgagctattgtaatagatgaattagcttctgaattgggcctcagtccttcagtgccactgcatgtcgttctgcaagattggatcaggcatacggatgggaaattaagttttcttggatttgtcaagttgttgcatggcatgtccagcaggtccctgtcaaagatgagatagctgtcgataatctctaacgacagcgcgtgtttacaccgtcctgttgacttggttcacaggcaaattaacagggctaaagaatcgtacgattggagcttgcatatcaagggcgtctgagctctaacagcacctgatccgacactaatttaactatagagttatgtttattgttgcctgcctactgatcatttagccgatagggaaatgaaagaaaatctcacccatgtctgcaacatgtgatgtttctaacaaccttagattaggcgtcatcttctgttatgattctagaaattttgtaatgcttcttttctcgaactggagcaagttagctgcagtcaccaggttggcgactggagcatggacatatcactgtcattgtgacattgttactgtatcattgtaccgacagatgaaagtgcttgatgtggtatgtcaggttctctccgtgtatatattgattgatgagatggaattgtgccatttttaaatatcggaatattagtatgtcaacttgcactctctaaggctcttttggaaagcaggattttagaaaaaatcatataaattttttacaggaatcagttcattttcgaag

SEQ ID NO: 27365 - DNA, 3640 bp, Zea Mays
gtgctcgcgtacgtgtcagtggccgccgatgttgacacgctgtggtaggtcatcaccgactacgagcacctcgccgactcaatccccaacctcatatagagtgggacgattctgtgtctgcatgaagggtggatatggctggagcagagaggcctgcaatgggcaacacacgttgtattggcacaatgaatgttgattcagttatttaaaattcagatctcatagtttgataaggagcaatacaggcatggacgtcattagattggggtggtgagctatatgatgatcttttagggagtcagcggccttgcaatccccctctgcaaccataagaaatttcgtgtgctacagatttagtactgatgaatccctctatgcagttccaaacaactgcacaaatcttaagagagaggtaggaacaacagtggtcgttgttgctgcacaaacaaaggctattgctggtaacttttacttgttatattatttaagcatattatatagactagacatttgctactttgctttctcatcatcttatgtttttgatttatttctgcatctgttcaatataaatttgagatgcatatgctctttcatttctttttacattaaatagtaaaaattatggtggcagggttgatgtctttgtgtgtgtgtgaaccagacatgaaaataaattcgaagctattgccattttaaaaaaagaactacattacacatgatacatatatttatacctaacaattttttaatacttcaatctttcagtttcgactcgtcaatttctttactttcattaggacagttgttactgatggtgcattttccaccattatgcccttcatattccatcaacgtgagataagtttcattaaaattaagcaatggtgtcgagaaaggccatttaggctctaaacagtcgcagcgatatactctttcttcatacactgactttgacgtggcgagatagtgggatatttggggccaaaattagggtgaacggttgtagacagtctcaataaatggttataagatgaaacattcaagccataaaaatcagatagcctttccttgatccttccatcctctatggtgcatttcaaatcaaataacctgatgactgctatagaaattaatctgcaacttagtgttgttttttgacaatactctgacaagatagtggtaaaaatgtccactatgtaaaaaatttgctcaaatgttctggccaccatgcactccatatccaaatgcctaagttggagtgttgaacatcccattttttttcttcatattaacatttggcttgtcgtggaaatagatttgcaaaagcaacaaactgacttggttattgaaatagaactcttttatacttaaatgtttgttggccactcaatcgtccaatggtgcacaagcgctgcttttggcaaaggagaattatgggtgaaaaagtgaattggcatgtttttgtcaagtcaattcttactctttttttggtaattgaatgttttgttagattcactaaaatggtgatcaactatgtgcacctccactagataaattcttactgtttgcgtatttcactccttcaaagatagtctattggataaagctaaaagtagtagccatttccttatacttgcacatcttagggtcaatttcatactagatatattccttcaggtactttttatttgcttgcgcctaaaaatggctaaacatcactttttgcttgatgtttagtattagattgattaacattgatgtgcatttctcgttgggttattgaaaaccacatttaatttattgtgtgcccttaatggtagggaaatagatcgtgtatgcacaactttttgcagtaaagagttctattgtagtttgtaggaattaaaatttcatttttctatatataaaaacacgatttcatgcaaatttctctctctatggtacaagatacgtgacgatgtggcatttgcaatgcacacggtgagaaaggatatggttagttggtctgtcaactctacttgatgaatgacaacaattctttcatttgttgaaattctcagcttgttcagttcatagttttgatttcatggttcatatatggatacacaccaatacatgtttgttgtgacaatatgataaaggtgtacatgttttgtcgtctccattccctatgcttatatcaactgtaataaacaagttgtatttgaaaagatttcatttcacatcactatgatacaatacataatagatgagagaacataatagatgagagaactgatctcttttgttttctttctttctgagagataaattgtatacatcttatgccaaacttccaagagcttaatagatgaaccactcgaggtttttttattcattttagatttcaactgatcgtactacttgtcactcaagtcatggacagtttgcatgcggatttgactaaatcaatgataaaaggtttagggtttggcattgttacttctcttactactattccatgtctttttccttcgtgtttctatatctcttgtatgctctagatatattatgcactaacattttattaaatgataatctatgtcccgttgcaacgcacgggtaactaactaatataacttaaatggagagactaattcttagtccctcaaactaaacatgtctaaatctgcatttggactggcgtggcgagcggttccgtttctcaaaataaactgaagaaacgctatagccacgaaacgtttctggcttgaaagtttgtggtagtaaacggcttcaagctggattcgagcgttttggtttctgatccttcgcacacactagcgattatcatttctttaattatcttgctcaggtataacaagtaaaaatgtatttacttaagttattcttcacctgtaaagttcttaaaaaatcaaagtacatttttattcatttgttttttatgaaaagggtttcttcttatgagccagaatttagggaaacgttcattaagggctcgtttgggataaagagtaatggaggggattgagggggctagaatccctcactattcaaaattaagtagtggaggattctagccccctcaatccacttcattactctttatcccaaacgagccctaagagaatccggatctaaaaacgtctctgtaaaaatctaggtatctaccaaatgtactctaagtccatagggtgaggtcttattcattttatttccaaagcaagggagttggacaaaatgaacaaggctgaaacggggaagaatccactgggtgaactgggattgagatgaattaaagtaaaaccaaaagaagtgtttggtttgaggaatcaattaattctagatgagatggtgtattatttcattatgggtcttttccatagattaatagaataaacttaattctcatattattactaattattagactataaggaatgaaatgatgatggatcaattcatttcatttcacaaaccaaacaaaaaaaaacgaccagtaacaaggtaatggaccacaccattccttagaccaaacacgttgaaattaagtcatctcttccttcgatggtcatccgcgtacggcgtaccacagttaccaaacgaaccatgggcttgtttggctcgcgactaactg

SEQ ID NO: 27366 - DNA, 3635 bp, Zea Mays
gtcgtggtgggtgctcgcgtacgtgtcagtggccgccgatgttgacacgctgtggtaggtcatcaccgactacgagcacctcgccgactcaatccccaacctcatatagagtgggacgattctgtgtctgcatgaagggtggatatggctggagcagagaggcctgcaatgggcaacacacgttgtattggcacaatgaatgttgattcagttatttaaaattcagatctcatagtttgataaggagcaatacaggcatggacgtcattagattggggtgatcttttagggagtcagcggccttgcaatccccctctgcaaccataagaaatttcgtgtgctacagatttagtactgatgaatccctctatgcagttccaaacaactgcacaaatcttaagagagaggtaggaacaacagtggtcgttgttgctgcacaaacaaaggctattgctggtaacttttacttgttatattatttaagcatattatatagactagacatttgctactttgctttctcatcatcttatgtttttgatttatttctgcatctgttcaatataaatttgagatgcatatgctctttcatttctttttacattaaatagtaaaaattatggtggcagggttgatgtctttgtgtgtgtgtgaaccagacatgaaaataaattcgaagctattgccattttaaaaaaagaactacattacacatgatacatatatttatacctaacaattttttaatacttcaatctttcagtttcgactcgtcaatttctttactttcattaggacagttgttactgatggtgcattttccaccattatgcccttcatattccatcaacgtgagataagtttcattaaaattaagcaatggtgtcgagaaaggccatttaggctctaaacagtcgcagcgatatactctttcttcatacactgactttgacgtggcgagatagtgggatatttggggccaaaattagggtgaacggttgtagacagtctcaataaatggttataagatgaaacattcaagccataaaaatcagatagcctttccttgatccttccatcctctatggtgcatttcaaatcaaataacctgatgactgctatagaaattaatctgcaacttagtgttgttttttgacaatactctgacaagatagtggtaaaaatgtccactatgtaaaaaatttgctcaaatgttctggccaccatgcactccatatccaaatgcctaagttggagtgttgaacatcccattttttttcttcatattaacatttggcttgtcgtggaaatagatttgcaaaagcaacaaactgacttggttattgaaatagaactcttttatacttaaatgtttgttggccactcaatcgtccaatggtgcacaagcgctgcttttggcaaaggagaattatgggtgaaaaagtgaattggcatgtttttgtcaagtcaattcttactctttttttggtaattgaatgttttgttagattcactaaaatggtgatcaactatgtgcacctccactagataaattcttactgtttgcgtatttcactccttcaaagatagtctattggataaagctaaaagtagtagccatttccttatacttgcacatcttagggtcaatttcatactagatatattccttcaggtactttttatttgcttgcgcctaaaaatggctaaacatcactttttgcttgatgtttagtattagattgattaacattgatgtgcatttctcgttgggttattgaaaaccacatttaatttattgtgtgcccttaatggtagggaaatagatcgtgtatgcacaactttttgcagtaaagagttctattgtagtttgtaggaattaaaatttcatttttctatatataaaaacacgatttcatgcaaatttctctctctatggtacaagatacgtgacgatgtggcatttgcaatgcacacggtgagaaaggatatggttagttggtctgtcaactctacttgatgaatgacaacaattctttcatttgttgaaattctcagcttgttcagttcatagttttgatttcatggttcatatatggatacacaccaatacatgtttgttgtgacaatatgataaaggtgtacatgttttgtcgtctccattccctatgcttatatcaactgtaataaacaagttgtatttgaaaagatttcatttcacatcactatgatacaatacataatagatgagagaacataatagatgagagaactgatctcttttgttttctttctttctgagagataaattgtatacatcttatgccaaacttccaagagcttaatagatgaaccactcgaggtttttttattcattttagatttcaactgatcgtactacttgtcactcaagtcatggacagtttgcatgcggatttgactaaatcaatgataaaaggtttagggtttggcattgttacttctcttactactattccatgtctttttccttcgtgtttctatatctcttgtatgctctagatatattatgcactaacattttattaaatgataatctatgtcccgttgcaacgcacgggtaactaactaatataacttaaatggagagactaattcttagtccctcaaactaaacatgtctaaatctgcatttggactggcgtggcgagcggttccgtttctcaaaataaactgaagaaacgctatagccacgaaacgtttctggcttgaaagtttgtggtagtaaacggcttcaagctggattcgagcgttttggtttctgatccttcgcacacactagcgattatcatttctttaattatcttgctcaggtataacaagtaaaaatgtatttacttaagttattcttcacctgtaaagttcttaaaaaatcaaagtacatttttattcatttgttttttatgaaaagggtttcttcttatgagccagaatttagggaaacgttcattaagggctcgtttgggataaagagtaatggaggggattgagggggctagaatccctcactattcaaaattaagtagtggaggattctagccccctcaatccacttcattactctttatcccaaacgagccctaagagaatccggatctaaaaacgtctctgtaaaaatctaggtatctaccaaatgtactctaagtccatagggtgaggtcttattcattttatttccaaagcaagggagttggacaaaatgaacaaggctgaaacggggaagaatccactgggtgaactgggattgagatgaattaaagtaaaaccaaaagaagtgtttggtttgaggaatcaattaattctagatgagatggtgtattatttcattatgggtcttttccatagattaatagaataaacttaattctcatattattactaattattagactataaggaatgaaatgatgatggatcaattcatttcatttcacaaaccaaacaaaaaaaaacgaccagtaacaaggtaatggaccacaccattccttagaccaaacacgttgaaattaagtcatctcttccttcgatggtcatccgcgtacggcgtaccacagttaccaaacgaaccatgggcttgtttggctcgcgactaactg

SEQ ID NO: 27367 - DNA, 3659 bp, Zea Mays
gccggacccactgtcttggcgtgcggcgtcagtgcgacgtggtcgtggtgggtgctcgcgtacgtgtcagtggccgccgatgttgacacgctgtggtgtctgattcaggtggttccgctcgtgcttcgcttgtagtgggacgattctgtgtctgcatgaagggtggatatggctggagcagagaggcctgcaatgggcaacacacgttgtattggcacaatgaatgttgattcagttatttaaaattcagatctcatagtttgataaggagcaatacaggcatggacgtcattagattggggtgatcttttagggagtcagcggccttgcaatccccctctgcaaccataagaaatttcgtgtgctacagatttagtactgatgaatccctctatgcagttccaaacaactgcacaaatcttaagagagaggtaggaacaacagtggtcgttgttgctgcacaaacaaaggctattgctggtaacttttacttgttatattatttaagcatattatatagactagacatttgctactttgctttctcatcatcttatgtttttgatttatttctgcatctgttcaatataaatttgagatgcatatgctctttcatttctttttacattaaatagtaaaaattatggtggcagggttgatgtctttgtgtgtgtgtgaaccagacatgaaaataaattcgaagctattgccattttaaaaaaagaactacattacacatgatacatatatttatacctaacaattttttaatacttcaatctttcagtttcgactcgtcaatttctttactttcattaggacagttgttactgatggtgcattttccaccattatgcccttcatattccatcaacgtgagataagtttcattaaaattaagcaatggtgtcgagaaaggccatttaggctctaaacagtcgcagcgatatactctttcttcatacactgactttgacgtggcgagatagtgggatatttggggccaaaattagggtgaacggttgtagacagtctcaataaatggttataagatgaaacattcaagccataaaaatcagatagcctttccttgatccttccatcctctatggtgcatttcaaatcaaataacctgatgactgctatagaaattaatctgcaacttagtgttgttttttgacaatactctgacaagatagtggtaaaaatgtccactatgtaaaaaatttgctcaaatgttctggccaccatgcactccatatccaaatgcctaagttggagtgttgaacatcccattttttttcttcatattaacatttggcttgtcgtggaaatagatttgcaaaagcaacaaactgacttggttattgaaatagaactcttttatacttaaatgtttgttggccactcaatcgtccaatggtgcacaagcgctgcttttggcaaaggagaattatgggtgaaaaagtgaattggcatgtttttgtcaagtcaattcttactctttttttggtaattgaatgttttgttagattcactaaaatggtgatcaactatgtgcacctccactagataaattcttactgtttgcgtatttcactccttcaaagatagtctattggataaagctaaaagtagtagccatttccttatacttgcacatcttagggtcaatttcatactagatatattccttcaggtactttttatttgcttgcgcctaaaaatggctaaacatcactttttgcttgatgtttagtattagattgattaacattgatgtgcatttctcgttgggttattgaaaaccacatttaatttattgtgtgcccttaatggtagggaaatagatcgtgtatgcacaactttttgcagtaaagagttctattgtagtttgtaggaattaaaatttcatttttctatatataaaaacacgatttcatgcaaatttctctctctatggtacaagatacgtgacgatgtggcatttgcaatgcacacggtgagaaaggatatggttagttggtctgtcaactctacttgatgaatgacaacaattctttcatttgttgaaattctcagcttgttcagttcatagttttgatttcatggttcatatatggatacacaccaatacatgtttgttgtgacaatatgataaaggtgtacatgttttgtcgtctccattccctatgcttatatcaactgtaataaacaagttgtatttgaaaagatttcatttcacatcactatgatacaatacataatagatgagagaacataatagatgagagaactgatctcttttgttttctttctttctgagagataaattgtatacatcttatgccaaacttccaagagcttaatagatgaaccactcgaggtttttttattcattttagatttcaactgatcgtactacttgtcactcaagtcatggacagtttgcatgcggatttgactaaatcaatgataaaaggtttagggtttggcattgttacttctcttactactattccatgtctttttccttcgtgtttctatatctcttgtatgctctagatatattatgcactaacattttattaaatgataatctatgtcccgttgcaacgcacgggtaactaactaatataacttaaatggagagactaattcttagtccctcaaactaaacatgtctaaatctgcatttggactggcgtggcgagcggttccgtttctcaaaataaactgaagaaacgctatagccacgaaacgtttctggcttgaaagtttgtggtagtaaacggcttcaagctggattcgagcgttttggtttctgatccttcgcacacactagcgattatcatttctttaattatcttgctcaggtataacaagtaaaaatgtatttacttaagttattcttcacctgtaaagttcttaaaaaatcaaagtacatttttattcatttgttttttatgaaaagggtttcttcttatgagccagaatttagggaaacgttcattaagggctcgtttgggataaagagtaatggaggggattgagggggctagaatccctcactattcaaaattaagtagtggaggattctagccccctcaatccacttcattactctttatcccaaacgagccctaagagaatccggatctaaaaacgtctctgtaaaaatctaggtatctaccaaatgtactctaagtccatagggtgaggtcttattcattttatttccaaagcaagggagttggacaaaatgaacaaggctgaaacggggaagaatccactgggtgaactgggattgagatgaattaaagtaaaaccaaaagaagtgtttggtttgaggaatcaattaattctagatgagatggtgtattatttcattatgggtcttttccatagattaatagaataaacttaattctcatattattactaattattagactataaggaatgaaatgatgatggatcaattcatttcatttcacaaaccaaacaaaaaaaaacgaccagtaacaaggtaatggaccacaccattccttagaccaaacacgttgaaattaagtcatctcttccttcgatggtcatccgcgtacggcgtaccacagttaccaaacgaaccatgggcttgtttggctcgcgactaactg

SEQ ID NO: 27368 - DNA, 4020 bp, Zea Mays
cgagcctgagccctagccctcacgcggtcatgcctccccgctctgtggcgattgcgctctcgcgccccccttctgggtgctttgtcgcagttgcggctgtggccgccacattgctccttcctctcgggtatctgccctcgtgttgtcgtgtctccccgctccgctgtggtcgtgctctcacggcccctgtcgggcgctccgtcgccgccgcggctgcgtccgccacaggggaccactgaggcgctgaccaccagcactaccacagagggcgcgcgggcgtgccggaggccggacccactgtcttggcgtgcggcgtcagtgcgacgtggtcgtggtgggtgctcgcgtacgtgtcagtggccgccgatgttgacacgctgtggtaggtcatcaccgactacgagcacctcgccgactcaatccccaacctcatatagaggtggttccgctcgtgcttcgcttgtagtgggacgattctgtgtctgcatgaagggtggatatggctggagcagagaggcctgcaatgggcaacacacgttgtattggcacaatgaatgttgattcagttatttaaaattcagatctcatagtttgataaggtagtttcttgcttggagcaatacaggcatggacgtcattagattggggtggtgagctatatgatgatcttttagggagtcagcggccttgcaatccccctctgcaaccataagaaatttcgtgtgctacagatttagtactgatgaatccctctatgcagttccaaacaactgcacaaatcttaagagagaggtaggaacaacagtggtcgttgttgctgcacaaacaaaggctattgctggtaacttttacttgttatattatttaagcatattatatagactagacatttgctactttgctttctcatcatcttatgtttttgatttatttctgcatctgttcaatataaatttgagatgcatatgctctttcatttctttttacattaaatagtaaaaattatggtggcagggttgatgtctttgtgtgtgtgtgaaccagacatgaaaataaattcgaagctattgccattttaaaaaaagaactacattacacatgatacatatatttatacctaacaattttttaatacttcaatctttcagtttcgactcgtcaatttctttactttcattaggacagttgttactgatggtgcattttccaccattatgcccttcatattccatcaacgtgagataagtttcattaaaattaagcaatggtgtcgagaaaggccatttaggctctaaacagtcgcagcgatatactctttcttcatacactgactttgacgtggcgagatagtgggatatttggggccaaaattagggtgaacggttgtagacagtctcaataaatggttataagatgaaacattcaagccataaaaatcagatagcctttccttgatccttccatcctctatggtgcatttcaaatcaaataacctgatgactgctatagaaattaatctgcaacttagtgttgttttttgacaatactctgacaagatagtggtaaaaatgtccactatgtaaaaaatttgctcaaatgttctggccaccatgcactccatatccaaatgcctaagttggagtgttgaacatcccattttttttcttcatattaacatttggcttgtcgtggaaatagatttgcaaaagcaacaaactgacttggttattgaaatagaactcttttatacttaaatgtttgttggccactcaatcgtccaatggtgcacaagcgctgcttttggcaaaggagaattatgggtgaaaaagtgaattggcatgtttttgtcaagtcaattcttactctttttttggtaattgaatgttttgttagattcactaaaatggtgatcaactatgtgcacctccactagataaattcttactgtttgcgtatttcactccttcaaagatagtctattggataaagctaaaagtagtagccatttccttatacttgcacatcttagggtcaatttcatactagatatattccttcaggtactttttatttgcttgcgcctaaaaatggctaaacatcactttttgcttgatgtttagtattagattgattaacattgatgtgcatttctcgttgggttattgaaaaccacatttaatttattgtgtgcccttaatggtagggaaatagatcgtgtatgcacaactttttgcagtaaagagttctattgtagtttgtaggaattaaaatttcatttttctatatataaaaacacgatttcatgcaaatttctctctctatggtacaagatacgtgacgatgtggcatttgcaatgcacacggtgagaaaggatatggttagttggtctgtcaactctacttgatgaatgacaacaattctttcatttgttgaaattctcagcttgttcagttcatagttttgatttcatggttcatatatggatacacaccaatacatgtttgttgtgacaatatgataaaggtgtacatgttttgtcgtctccattccctatgcttatatcaactgtaataaacaagttgtatttgaaaagatttcatttcacatcactatgatacaatacataatagatgagagaacataatagatgagagaactgatctcttttgttttctttctttctgagagataaattgtatacatcttatgccaaacttccaagagcttaatagatgaaccactcgaggtttttttattcattttagatttcaactgatcgtactacttgtcactcaagtcatggacagtttgcatgcggatttgactaaatcaatgataaaaggtttagggtttggcattgttacttctcttactactattccatgtctttttccttcgtgtttctatatctcttgtatgctctagatatattatgcactaacattttattaaatgataatctatgtcccgttgcaacgcacgggtaactaactaatataacttaaatggagagactaattcttagtccctcaaactaaacatgtctaaatctgcatttggactggcgtggcgagcggttccgtttctcaaaataaactgaagaaacgctatagccacgaaacgtttctggcttgaaagtttgtggtagtaaacggcttcaagctggattcgagcgttttggtttctgatccttcgcacacactagcgattatcatttctttaattatcttgctcaggtataacaagtaaaaatgtatttacttaagttattcttcacctgtaaagttcttaaaaaatcaaagtacatttttattcatttgttttttatgaaaagggtttcttcttatgagccagaatttagggaaacgttcattaagggctcgtttgggataaagagtaatggaggggattgagggggctagaatccctcactattcaaaattaagtagtggaggattctagccccctcaatccacttcattactctttatcccaaacgagccctaagagaatccggatctaaaaacgtctctgtaaaaatctaggtatctaccaaatgtactctaagtccatagggtgaggtcttattcattttatttccaaagcaagggagttggacaaaatgaacaaggctgaaacggggaagaatccactgggtgaactgggattgagatgaattaaagtaaaaccaaaagaagtgtttggtttgaggaatcaattaattctagatgagatggtgtattatttcattatgggtcttttccatagattaatagaataaacttaattctcatattattactaattattagactataaggaatgaaatgatgatggatcaattcatttcatttcacaaaccaaacaaaaaaaaacgaccagtaacaaggtaatggaccacaccattccttagaccaaacacgttgaaattaagtcatctcttccttcgatggtcatccgcgtacggcgtaccacagttaccaaacgaaccatgggcttgtttggctcgcgactaactg

SEQ ID NO: 27369 - DNA, 3990 bp, Zea Mays
cgagcctgagccctagccctcacgcggtcatgcctccccgctctgtggcgattgcgctctcgcgccccccttctgggtgctttgtcgcagttgcggctgtggccgccacattgctccttcctctcgggtatctgccctcgtgttgtcgtgtctccccgctccgctgtggtcgtgctctcacggcccctgtcgggcgctccgtcgccgccgcggctgcgtccgccacaggggaccactgaggcgctgaccaccagcactaccacagagggcgcgcgggcgtgccggaggccggacccactgtcttggcgtgcggcgtcagtgcgacgtggtcgtggtgggtgctcgcgtacgtgtcagtggccgccgatgttgacacgctgtggtaggtcatcaccgactacgagcacctcgccgactcaatccccaacctcatatagaggtggttccgctcgtgcttcgcttgtagtgggacgattctgtgtctgcatgaagggtggatatggctggagcagagaggcctgcaatgggcaacacacgttgtattggcacaatgaatgttgattcagttatttaaaattcagatctcatagtttgataaggagcaatacaggcatggacgtcattagattggggtgatcttttagggagtcagcggccttgcaatccccctctgcaaccataagaaatttcgtgtgctacagatttagtactgatgaatccctctatgcagttccaaacaactgcacaaatcttaagagagaggtaggaacaacagtggtcgttgttgctgcacaaacaaaggctattgctggtaacttttacttgttatattatttaagcatattatatagactagacatttgctactttgctttctcatcatcttatgtttttgatttatttctgcatctgttcaatataaatttgagatgcatatgctctttcatttctttttacattaaatagtaaaaattatggtggcagggttgatgtctttgtgtgtgtgtgaaccagacatgaaaataaattcgaagctattgccattttaaaaaaagaactacattacacatgatacatatatttatacctaacaattttttaatacttcaatctttcagtttcgactcgtcaatttctttactttcattaggacagttgttactgatggtgcattttccaccattatgcccttcatattccatcaacgtgagataagtttcattaaaattaagcaatggtgtcgagaaaggccatttaggctctaaacagtcgcagcgatatactctttcttcatacactgactttgacgtggcgagatagtgggatatttggggccaaaattagggtgaacggttgtagacagtctcaataaatggttataagatgaaacattcaagccataaaaatcagatagcctttccttgatccttccatcctctatggtgcatttcaaatcaaataacctgatgactgctatagaaattaatctgcaacttagtgttgttttttgacaatactctgacaagatagtggtaaaaatgtccactatgtaaaaaatttgctcaaatgttctggccaccatgcactccatatccaaatgcctaagttggagtgttgaacatcccattttttttcttcatattaacatttggcttgtcgtggaaatagatttgcaaaagcaacaaactgacttggttattgaaatagaactcttttatacttaaatgtttgttggccactcaatcgtccaatggtgcacaagcgctgcttttggcaaaggagaattatgggtgaaaaagtgaattggcatgtttttgtcaagtcaattcttactctttttttggtaattgaatgttttgttagattcactaaaatggtgatcaactatgtgcacctccactagataaattcttactgtttgcgtatttcactccttcaaagatagtctattggataaagctaaaagtagtagccatttccttatacttgcacatcttagggtcaatttcatactagatatattccttcaggtactttttatttgcttgcgcctaaaaatggctaaacatcactttttgcttgatgtttagtattagattgattaacattgatgtgcatttctcgttgggttattgaaaaccacatttaatttattgtgtgcccttaatggtagggaaatagatcgtgtatgcacaactttttgcagtaaagagttctattgtagtttgtaggaattaaaatttcatttttctatatataaaaacacgatttcatgcaaatttctctctctatggtacaagatacgtgacgatgtggcatttgcaatgcacacggtgagaaaggatatggttagttggtctgtcaactctacttgatgaatgacaacaattctttcatttgttgaaattctcagcttgttcagttcatagttttgatttcatggttcatatatggatacacaccaatacatgtttgttgtgacaatatgataaaggtgtacatgttttgtcgtctccattccctatgcttatatcaactgtaataaacaagttgtatttgaaaagatttcatttcacatcactatgatacaatacataatagatgagagaacataatagatgagagaactgatctcttttgttttctttctttctgagagataaattgtatacatcttatgccaaacttccaagagcttaatagatgaaccactcgaggtttttttattcattttagatttcaactgatcgtactacttgtcactcaagtcatggacagtttgcatgcggatttgactaaatcaatgataaaaggtttagggtttggcattgttacttctcttactactattccatgtctttttccttcgtgtttctatatctcttgtatgctctagatatattatgcactaacattttattaaatgataatctatgtcccgttgcaacgcacgggtaactaactaatataacttaaatggagagactaattcttagtccctcaaactaaacatgtctaaatctgcatttggactggcgtggcgagcggttccgtttctcaaaataaactgaagaaacgctatagccacgaaacgtttctggcttgaaagtttgtggtagtaaacggcttcaagctggattcgagcgttttggtttctgatccttcgcacacactagcgattatcatttctttaattatcttgctcaggtataacaagtaaaaatgtatttacttaagttattcttcacctgtaaagttcttaaaaaatcaaagtacatttttattcatttgttttttatgaaaagggtttcttcttatgagccagaatttagggaaacgttcattaagggctcgtttgggataaagagtaatggaggggattgagggggctagaatccctcactattcaaaattaagtagtggaggattctagccccctcaatccacttcattactctttatcccaaacgagccctaagagaatccggatctaaaaacgtctctgtaaaaatctaggtatctaccaaatgtactctaagtccatagggtgaggtcttattcattttatttccaaagcaagggagttggacaaaatgaacaaggctgaaacggggaagaatccactgggtgaactgggattgagatgaattaaagtaaaaccaaaagaagtgtttggtttgaggaatcaattaattctagatgagatggtgtattatttcattatgggtcttttccatagattaatagaataaacttaattctcatattattactaattattagactataaggaatgaaatgatgatggatcaattcatttcatttcacaaaccaaacaaaaaaaaacgaccagtaacaaggtaatggaccacaccattccttagaccaaacacgttgaaattaagtcatctcttccttcgatggtcatccgcgtacggcgtaccacagttaccaaacgaaccatgggcttgtttggctcgcgactaactg

SEQ ID NO: 27370 - DNA, 2548 bp, Zea Mays
cgccgccaaaccccgccatccgcgcatccccctcgatccgcactcgccgccgcacaatccggtatcccgagcctgagccctagccctcacgcggtcatgcctccccgctctgtggcgattgcgctctcgcgccccccttctgggtgctttgtcgcagttgcggctgtggccgccacattgctccttcctctcgggtatctgccctcgtgttgtcgtgtctccccgctccgctgtggtcgtgctctcacggcccctgtcgggcgctccgtcgccgccgcggctgcgtccgccacaggggaccactgaggcgctgaccaccagcactaccacagagggcgcgcgggcgtgccggaggccggacccactgtcttggcgtgcggcgtcagtgcgacgtggtcgtggtgggtgctcgcgtacgtgtcagtggccgccgatgttgacacgctgtggtgtctgattcaggtggttccgctcgtgcttcgcttgtagtgggacgattctgtgtctgcatgaagggtggatatggctggagcagagaggcctgcaatgggcaacacacgttgtattggcacaatgaatgttgattcagttatttaaaattcagatctcatagtttgataaggtttccattctatgcttggtttaggagcaatacaggcatggacgtcattagattggggtgatcttttagggagtcagcggccttgcaatccccctctgcaaccataagaaatttcgtgtgctacagatttagtactgatgaatccctctatgcagttccaaacaactgcacaaatcttaagagagaggtaggaacaacagtggtcgttgttgctgcacaaacaaaggctattgctgatacgtgacgatgtggcatttgcaatgcacacggtgagaaaggatatggttagttggtctgtcaactctacttgatgaatgacaacaattctttcatttgttgaaattctcagcttgttcagttcatagttttgatttcatggttcatatatggatacacaccaatacatgtttgttgtgacaatatgataaaggtgtacatgttttgtcgtctccattccctatgcttatatcaactgtaataaacaagttgtatttgaaaagatttcatttcacatcactatgatacaatacataatagatgagagaacataatagatgagagaactgatctcttttgttttctttctttctgagagataaattgtatacatcttatgccaaacttccaagagcttaatagatgaaccactcgaggtttttttattcattttagatttcaactgatcgtactacttgtcactcaagtcatggacagtttgcatgcggatttgactaaatcaatgataaaaggtttagggtttggcattgttacttctcttactactattccatgtctttttccttcgtgtttctatatctcttgtatgctctagatatattatgcactaacattttattaaatgataatctatgtcccgttgcaacgcacgggtaactaactaatataacttaaatggagagactaattcttagtccctcaaactaaacatgtctaaatctgcatttggactggcgtggcgagcggttccgtttctcaaaataaactgaagaaacgctatagccacgaaacgtttctggcttgaaagtttgtggtagtaaacggcttcaagctggattcgagcgttttggtttctgatccttcgcacacactagcgattatcatttctttaattatcttgctcaggtataacaagtaaaaatgtatttacttaagttattcttcacctgtaaagttcttaaaaaatcaaagtacatttttattcatttgttttttatgaaaagggtttcttcttatgagccagaatttagggaaacgttcattaagggctcgtttgggataaagagtaatggaggggattgagggggctagaatccctcactattcaaaattaagtagtggaggattctagccccctcaatccacttcattactctttatcccaaacgagccctaagagaatccggatctaaaaacgtctctgtaaaaatctaggtatctaccaaatgtactctaagtccatagggtgaggtcttattcattttatttccaaagcaagggagttggacaaaatgaacaaggctgaaacggggaagaatccactgggtgaactgggattgagatgaattaaagtaaaaccaaaagaagtgtttggtttgaggaatcaattaattctagatgagatggtgtattatttcattatgggtcttttccatagattaatagaataaacttaattctcatattattactaattattagactataaggaatgaaatgatgatggatcaattcatttcatttcacaaaccaaacaaaaaaaaacgaccagtaacaaggtaatggaccacaccattccttagaccaaacacgttgaaattaagtcatctcttccttcgatggtcatccgcgtacggcgtaccacagttaccaaacgaaccatgggcttgtttggctcgcgactaactg

SEQ ID NO: 27371 - DNA, 4031 bp, Zea Mays
ccgccgccaaaccccgccatccgcgcatccccctcgatccgcactcgccgccgcacaatccggtatcccgagcctgagccctagccctcacgcggtcatgcctccccgctctgtggcgattgcgctctcgcgccccccttctgggtgctttgtcgcagttgcggctgtggccgccacattgctccttcctctcgggtatctgccctcgtgttgtcgtgtctccccgctccgctgtggtcgtgctctcacggcccctgtcgggcgctccgtcgccgccgcggctgcgtccgccacaggggaccactgaggcgctgaccaccagcactaccacagagggcgcgcgggcgtgccggaggccggacccactgtcttggcgtgcggcgtcagtgcgacgtggtcgtggtgggtgctcgcgtacgtgtcagtggccgccgatgttgacacgctgtggtggttccgctcgtgcttcgcttgtagtgggacgattctgtgtctgcatgaagggtggatatggctggagcagagaggcctgcaatgggcaacacacgttgtattggcacaatgaatgttgattcagttatttaaaattcagatctcatagtttgataaggtagtttcttgcttggagcaatacaggcatggacgtcattagattggggtggtgagctatatgatgatcttttagggagtcagcggccttgcaatccccctctgcaaccataagaaatttcgtgtgctacagatttagtactgatgaatccctctatgcagttccaaacaactgcacaaatcttaagagagaggtaggaacaacagtggtcgttgttgctgcacaaacaaaggctattgctggtaacttttacttgttatattatttaagcatattatatagactagacatttgctactttgctttctcatcatcttatgtttttgatttatttctgcatctgttcaatataaatttgagatgcatatgctctttcatttctttttacattaaatagtaaaaattatggtggcagggttgatgtctttgtgtgtgtgtgaaccagacatgaaaataaattcgaagctattgccattttaaaaaaagaactacattacacatgatacatatatttatacctaacaattttttaatacttcaatctttcagtttcgactcgtcaatttctttactttcattaggacagttgttactgatggtgcattttccaccattatgcccttcatattccatcaacgtgagataagtttcattaaaattaagcaatggtgtcgagaaaggccatttaggctctaaacagtcgcagcgatatactctttcttcatacactgactttgacgtggcgagatagtgggatatttggggccaaaattagggtgaacggttgtagacagtctcaataaatggttataagatgaaacattcaagccataaaaatcagatagcctttccttgatccttccatcctctatggtgcatttcaaatcaaataacctgatgactgctatagaaattaatctgcaacttagtgttgttttttgacaatactctgacaagatagtggtaaaaatgtccactatgtaaaaaatttgctcaaatgttctggccaccatgcactccatatccaaatgcctaagttggagtgttgaacatcccattttttttcttcatattaacatttggcttgtcgtggaaatagatttgcaaaagcaacaaactgacttggttattgaaatagaactcttttatacttaaatgtttgttggccactcaatcgtccaatggtgcacaagcgctgcttttggcaaaggagaattatgggtgaaaaagtgaattggcatgtttttgtcaagtcaattcttactctttttttggtaattgaatgttttgttagattcactaaaatggtgatcaactatgtgcacctccactagataaattcttactgtttgcgtatttcactccttcaaagatagtctattggataaagctaaaagtagtagccatttccttatacttgcacatcttagggtcaatttcatactagatatattccttcaggtactttttatttgcttgcgcctaaaaatggctaaacatcactttttgcttgatgtttagtattagattgattaacattgatgtgcatttctcgttgggttattgaaaaccacatttaatttattgtgtgcccttaatggtagggaaatagatcgtgtatgcacaactttttgcagtaaagagttctattgtagtttgtaggaattaaaatttcatttttctatatataaaaacacgatttcatgcaaatttctctctctatggtacaagatacgtgacgatgtggcatttgcaatgcacacggtgagaaaggatatggttagttggtctgtcaactctacttgatgaatgacaacaattctttcatttgttgaaattctcagcttgttcagttcatagttttgatttcatggttcatatatggatacacaccaatacatgtttgttgtgacaatatgataaaggtgtacatgttttgtcgtctccattccctatgcttatatcaactgtaataaacaagttgtatttgaaaagatttcatttcacatcactatgatacaatacataatagatgagagaacataatagatgagagaactgatctcttttgttttctttctttctgagagataaattgtatacatcttatgccaaacttccaagagcttaatagatgaaccactcgaggtttttttattcattttagatttcaactgatcgtactacttgtcactcaagtcatggacagtttgcatgcggatttgactaaatcaatgataaaaggtttagggtttggcattgttacttctcttactactattccatgtctttttccttcgtgtttctatatctcttgtatgctctagatatattatgcactaacattttattaaatgataatctatgtcccgttgcaacgcacgggtaactaactaatataacttaaatggagagactaattcttagtccctcaaactaaacatgtctaaatctgcatttggactggcgtggcgagcggttccgtttctcaaaataaactgaagaaacgctatagccacgaaacgtttctggcttgaaagtttgtggtagtaaacggcttcaagctggattcgagcgttttggtttctgatccttcgcacacactagcgattatcatttctttaattatcttgctcaggtataacaagtaaaaatgtatttacttaagttattcttcacctgtaaagttcttaaaaaatcaaagtacatttttattcatttgttttttatgaaaagggtttcttcttatgagccagaatttagggaaacgttcattaagggctcgtttgggataaagagtaatggaggggattgagggggctagaatccctcactattcaaaattaagtagtggaggattctagccccctcaatccacttcattactctttatcccaaacgagccctaagagaatccggatctaaaaacgtctctgtaaaaatctaggtatctaccaaatgtactctaagtccatagggtgaggtcttattcattttatttccaaagcaagggagttggacaaaatgaacaaggctgaaacggggaagaatccactgggtgaactgggattgagatgaattaaagtaaaaccaaaagaagtgtttggtttgaggaatcaattaattctagatgagatggtgtattatttcattatgggtcttttccatagattaatagaataaacttaattctcatattattactaattattagactataaggaatgaaatgatgatggatcaattcatttcatttcacaaaccaaacaaaaaaaaacgaccagtaacaaggtaatggaccacaccattccttagaccaaacacgttgaaattaagtcatctcttccttcgatggtcatccgcgtacggcgtaccacagttaccaaacgaaccatgggcttgtttggctcgcgactaactg

SEQ ID NO: 27372 - DNA, 4029 bp, Zea Mays
ccgccgccaaaccccgccatccgcgcatccccctcgatccgcactcgccgccgcacaatccggtatcccgagcctgagccctagccctcacgcggtcatgcctccccgctctgtggcgattgcgctctcgcgccccccttctgggtgctttgtcgcagttgcggctgtggccgccacattgctccttcctctcgggtatctgccctcgtgttgtcgtgtctccccgctccgctgtggtcgtgctctcacggcccctgtcgggcgctccgtcgccgccgcggctgcgtccgccacaggggaccactgaggcgctgaccaccagcactaccacagagggcgcgcgggcgtgccggaggccggacccactgtcttggcgtgcggcgtcagtgcgacgtggtcgtggtgggtgctcgcgtacgtgtcagtggccgccgatgttgacacgctgtggtgtctgattcaggtggttccgctcgtgcttcgcttgtagtgggacgattctgtgtctgcatgaagggtggatatggctggagcagagaggcctgcaatgggcaacacacgttgtattggcacaatgaatgttgattcagttatttaaaattcagatctcatagtttgataaggtagtttcttgcttggagcaatacaggcatggacgtcattagattggggtgatcttttagggagtcagcggccttgcaatccccctctgcaaccataagaaatttcgtgtgctacagatttagtactgatgaatccctctatgcagttccaaacaactgcacaaatcttaagagagaggtaggaacaacagtggtcgttgttgctgcacaaacaaaggctattgctggtaacttttacttgttatattatttaagcatattatatagactagacatttgctactttgctttctcatcatcttatgtttttgatttatttctgcatctgttcaatataaatttgagatgcatatgctctttcatttctttttacattaaatagtaaaaattatggtggcagggttgatgtctttgtgtgtgtgtgaaccagacatgaaaataaattcgaagctattgccattttaaaaaaagaactacattacacatgatacatatatttatacctaacaattttttaatacttcaatctttcagtttcgactcgtcaatttctttactttcattaggacagttgttactgatggtgcattttccaccattatgcccttcatattccatcaacgtgagataagtttcattaaaattaagcaatggtgtcgagaaaggccatttaggctctaaacagtcgcagcgatatactctttcttcatacactgactttgacgtggcgagatagtgggatatttggggccaaaattagggtgaacggttgtagacagtctcaataaatggttataagatgaaacattcaagccataaaaatcagatagcctttccttgatccttccatcctctatggtgcatttcaaatcaaataacctgatgactgctatagaaattaatctgcaacttagtgttgttttttgacaatactctgacaagatagtggtaaaaatgtccactatgtaaaaaatttgctcaaatgttctggccaccatgcactccatatccaaatgcctaagttggagtgttgaacatcccattttttttcttcatattaacatttggcttgtcgtggaaatagatttgcaaaagcaacaaactgacttggttattgaaatagaactcttttatacttaaatgtttgttggccactcaatcgtccaatggtgcacaagcgctgcttttggcaaaggagaattatgggtgaaaaagtgaattggcatgtttttgtcaagtcaattcttactctttttttggtaattgaatgttttgttagattcactaaaatggtgatcaactatgtgcacctccactagataaattcttactgtttgcgtatttcactccttcaaagatagtctattggataaagctaaaagtagtagccatttccttatacttgcacatcttagggtcaatttcatactagatatattccttcaggtactttttatttgcttgcgcctaaaaatggctaaacatcactttttgcttgatgtttagtattagattgattaacattgatgtgcatttctcgttgggttattgaaaaccacatttaatttattgtgtgcccttaatggtagggaaatagatcgtgtatgcacaactttttgcagtaaagagttctattgtagtttgtaggaattaaaatttcatttttctatatataaaaacacgatttcatgcaaatttctctctctatggtacaagatacgtgacgatgtggcatttgcaatgcacacggtgagaaaggatatggttagttggtctgtcaactctacttgatgaatgacaacaattctttcatttgttgaaattctcagcttgttcagttcatagttttgatttcatggttcatatatggatacacaccaatacatgtttgttgtgacaatatgataaaggtgtacatgttttgtcgtctccattccctatgcttatatcaactgtaataaacaagttgtatttgaaaagatttcatttcacatcactatgatacaatacataatagatgagagaacataatagatgagagaactgatctcttttgttttctttctttctgagagataaattgtatacatcttatgccaaacttccaagagcttaatagatgaaccactcgaggtttttttattcattttagatttcaactgatcgtactacttgtcactcaagtcatggacagtttgcatgcggatttgactaaatcaatgataaaaggtttagggtttggcattgttacttctcttactactattccatgtctttttccttcgtgtttctatatctcttgtatgctctagatatattatgcactaacattttattaaatgataatctatgtcccgttgcaacgcacgggtaactaactaatataacttaaatggagagactaattcttagtccctcaaactaaacatgtctaaatctgcatttggactggcgtggcgagcggttccgtttctcaaaataaactgaagaaacgctatagccacgaaacgtttctggcttgaaagtttgtggtagtaaacggcttcaagctggattcgagcgttttggtttctgatccttcgcacacactagcgattatcatttctttaattatcttgctcaggtataacaagtaaaaatgtatttacttaagttattcttcacctgtaaagttcttaaaaaatcaaagtacatttttattcatttgttttttatgaaaagggtttcttcttatgagccagaatttagggaaacgttcattaagggctcgtttgggataaagagtaatggaggggattgagggggctagaatccctcactattcaaaattaagtagtggaggattctagccccctcaatccacttcattactctttatcccaaacgagccctaagagaatccggatctaaaaacgtctctgtaaaaatctaggtatctaccaaatgtactctaagtccatagggtgaggtcttattcattttatttccaaagcaagggagttggacaaaatgaacaaggctgaaacggggaagaatccactgggtgaactgggattgagatgaattaaagtaaaaccaaaagaagtgtttggtttgaggaatcaattaattctagatgagatggtgtattatttcattatgggtcttttccatagattaatagaataaacttaattctcatattattactaattattagactataaggaatgaaatgatgatggatcaattcatttcatttcacaaaccaaacaaaaaaaaacgaccagtaacaaggtaatggaccacaccattccttagaccaaacacgttgaaattaagtcatctcttccttcgatggtcatccgcgtacggcgtaccacagttaccaaacgaaccatgggcttgtttggctcgcgactaactg

SEQ ID NO: 27373 - DNA, 4087 bp, Zea Mays
ctgtcgtgcacgtcgttcccagaaaccaccgccgaacccgcgcgcgccgtccctggaaccgccgccaaaccccgccatccgcgcatccccctcgatccgcactcgccgccgcacaatccggtatcccgagcctgagccctagccctcacgcggtcatgcctccccgctctgtggcgattgcgctctcgcgccccccttctgggtgctttgtcgcagttgcggctgtggccgccacattgctccttcctctcgggtatctgccctcgtgttgtcgtgtctccccgctccgctgtggtcgtgctctcacggcccctgtcgggcgctccgtcgccgccgcggctgcgtccgccacaggggaccactgaggcgctgaccaccagcactaccacagagggcgcgcgggcgtgccggaggccggacccactgtcttggcgtgcggcgtcagtgcgacgtggtcgtggtgggtgctcgcgtacgtgtcagtggccgccgatgttgacacgctgtggtgtctgattcaggtggttccgctcgtgcttcgcttgtagtgggacgattctgtgtctgcatgaagggtggatatggctggagcagagaggcctgcaatgggcaacacacgttgtattggcacaatgaatgttgattcagttatttaaaattcagatctcatagtttgataaggagcaatacaggcatggacgtcattagattggggtggtgagctatatgatgatcttttagggagtcagcggccttgcaatccccctctgcaaccataagaaatttcgtgtgctacagatttagtactgatgaatccctctatgcagttccaaacaactgcacaaatcttaagagagaggtaggaacaacagtggtcgttgttgctgcacaaacaaaggctattgctggtaacttttacttgttatattatttaagcatattatatagactagacatttgctactttgctttctcatcatcttatgtttttgatttatttctgcatctgttcaatataaatttgagatgcatatgctctttcatttctttttacattaaatagtaaaaattatggtggcagggttgatgtctttgtgtgtgtgtgaaccagacatgaaaataaattcgaagctattgccattttaaaaaaagaactacattacacatgatacatatatttatacctaacaattttttaatacttcaatctttcagtttcgactcgtcaatttctttactttcattaggacagttgttactgatggtgcattttccaccattatgcccttcatattccatcaacgtgagataagtttcattaaaattaagcaatggtgtcgagaaaggccatttaggctctaaacagtcgcagcgatatactctttcttcatacactgactttgacgtggcgagatagtgggatatttggggccaaaattagggtgaacggttgtagacagtctcaataaatggttataagatgaaacattcaagccataaaaatcagatagcctttccttgatccttccatcctctatggtgcatttcaaatcaaataacctgatgactgctatagaaattaatctgcaacttagtgttgttttttgacaatactctgacaagatagtggtaaaaatgtccactatgtaaaaaatttgctcaaatgttctggccaccatgcactccatatccaaatgcctaagttggagtgttgaacatcccattttttttcttcatattaacatttggcttgtcgtggaaatagatttgcaaaagcaacaaactgacttggttattgaaatagaactcttttatacttaaatgtttgttggccactcaatcgtccaatggtgcacaagcgctgcttttggcaaaggagaattatgggtgaaaaagtgaattggcatgtttttgtcaagtcaattcttactctttttttggtaattgaatgttttgttagattcactaaaatggtgatcaactatgtgcacctccactagataaattcttactgtttgcgtatttcactccttcaaagatagtctattggataaagctaaaagtagtagccatttccttatacttgcacatcttagggtcaatttcatactagatatattccttcaggtactttttatttgcttgcgcctaaaaatggctaaacatcactttttgcttgatgtttagtattagattgattaacattgatgtgcatttctcgttgggttattgaaaaccacatttaatttattgtgtgcccttaatggtagggaaatagatcgtgtatgcacaactttttgcagtaaagagttctattgtagtttgtaggaattaaaatttcatttttctatatataaaaacacgatttcatgcaaatttctctctctatggtacaagatacgtgacgatgtggcatttgcaatgcacacggtgagaaaggatatggttagttggtctgtcaactctacttgatgaatgacaacaattctttcatttgttgaaattctcagcttgttcagttcatagttttgatttcatggttcatatatggatacacaccaatacatgtttgttgtgacaatatgataaaggtgtacatgttttgtcgtctccattccctatgcttatatcaactgtaataaacaagttgtatttgaaaagatttcatttcacatcactatgatacaatacataatagatgagagaacataatagatgagagaactgatctcttttgttttctttctttctgagagataaattgtatacatcttatgccaaacttccaagagcttaatagatgaaccactcgaggtttttttattcattttagatttcaactgatcgtactacttgtcactcaagtcatggacagtttgcatgcggatttgactaaatcaatgataaaaggtttagggtttggcattgttacttctcttactactattccatgtctttttccttcgtgtttctatatctcttgtatgctctagatatattatgcactaacattttattaaatgataatctatgtcccgttgcaacgcacgggtaactaactaatataacttaaatggagagactaattcttagtccctcaaactaaacatgtctaaatctgcatttggactggcgtggcgagcggttccgtttctcaaaataaactgaagaaacgctatagccacgaaacgtttctggcttgaaagtttgtggtagtaaacggcttcaagctggattcgagcgttttggtttctgatccttcgcacacactagcgattatcatttctttaattatcttgctcaggtataacaagtaaaaatgtatttacttaagttattcttcacctgtaaagttcttaaaaaatcaaagtacatttttattcatttgttttttatgaaaagggtttcttcttatgagccagaatttagggaaacgttcattaagggctcgtttgggataaagagtaatggaggggattgagggggctagaatccctcactattcaaaattaagtagtggaggattctagccccctcaatccacttcattactctttatcccaaacgagccctaagagaatccggatctaaaaacgtctctgtaaaaatctaggtatctaccaaatgtactctaagtccatagggtgaggtcttattcattttatttccaaagcaagggagttggacaaaatgaacaaggctgaaacggggaagaatccactgggtgaactgggattgagatgaattaaagtaaaaccaaaagaagtgtttggtttgaggaatcaattaattctagatgagatggtgtattatttcattatgggtcttttccatagattaatagaataaacttaattctcatattattactaattattagactataaggaatgaaatgatgatggatcaattcatttcatttcacaaaccaaacaaaaaaaaacgaccagtaacaaggtaatggaccacaccattccttagaccaaacacgttgaaattaagtcatctcttccttcgatggtcatccgcgtacggcgtaccacagttaccaaacgaaccatgggcttgtttggctcgcgactaactg

SEQ ID NO: 27374 - DNA, 428 bp, Zea Mays
gatcttgtatttacggtcaatgcccacaaagttacagtttcaggttatggtagtgcatctgtcaaatatcagaacacaatggtgacttgctctcgcgtaaaggctcctgagagcgagcgatcagcgagcctgcctgttgtcgctgctcgctcggggaaagaagatcacacaaatgtaatatgagagctcgaaaagaagccgccgtctagcagcgaaagcagcaattcaaacatggacccctgcgcatcaaagaaaagtcgaacaccagatcttccaagaaccgaagattttctaagattatcagcagccttttaggttgtagaatgtcctctatataattatatataaccgctcaactcttctgaagacatttcatgtaaatataacaagatagcttcaaatatcgcaacaaacatattacattatgc

SEQ ID NO: 27375 - DNA, 847 bp, Zea Mays
cgcttctcggcttctcgcctcttctctcacccgtgactccgccgccgcatctctcctccaacgcgccgccgcatctcttcaacgctccatggtccccttcacctcccgccgctaccctacccatggccaccgcagccgctcgtgctaccctcccgcggcccctcctctctctcccacccttcctcctcccaccacatcctccgtgtgtcagcccgtcgttggctccgccttctattgccgtagggaacacgcggcgtcgcccttgcgctcctcgccacatgctgttacaggctgtcgtacccgtgtccgcggttgagggccttgtgccggtcatgttgaagaagaagcccatcgactagatctatctcgtcgtcgtgcgcctctctgccgaagagaggcaacgcctcctccgcggtgccatcacgtgctcctctcactactgcttccactcctcccagagtcccagtacacccccgccttgtggcatcgctgctcgccgcggccctgcacctcagccctgcctccatcccgagtcacacacctatcctttgaagaattaatggcgactggaagcagctttttacagattgctacccagtcattacctgagaatgcaggaggtgctgatgcaaaatatcttatcgatgagtggccaacgataagcaaaagtagtggaagactcatctaggtggagtatgtaacaatattgtcacacccggttccaggggtagaaccgagcgcataccatatgtgtgccaggatccatttccacacatatgttgacgtcacaagtgtaatatatcaaaatacaatgcaataaagacgtaaagagagtataatactttat

SEQ ID NO: 27376 - DNA, 1284 bp, Zea Mays
cggctcccagtaacgcaacgcttctcggcttctcgcctcttctctcacccgtgactccgccgccgcatctctcctccaacgcgccgccgcatctcttcaacgctccatggtccccttcacctcccgccgctaccctacccatggccaccgcagccgctcgtgctaccctcccgcggcccctcctctctctcccacccttcctcctcccaccacatcctccgtgtgtcagcccgtcgttggctccgccttctattgccgtagggaacacgcggcgtcgcccttgcgctcctcgccacatgctgttacaggctgtcgtacccgtgtccgcggttgagggccttgtgccggtcatgttgaagaagaagcccatcgactagatctatctcgtcgtcgtgcgcctctctgccgaagagaggcaacgcctcctccgcggtgccatcacgtgctcctctcactactgcttccactcctcccagagtcccagtacacccccgccttgtggcatcgctgctcgccgcggccctgcacctcagccctgcctccatcccgagtcacacacctatcctttgaagaattaatggcgactggaagcagctttttacaggtgatttctgcacccatctcctttgaagaatgaatgacgactggaagaagcttttgacaggagtgccattctgctagatgccacacgctagctaaagcaaagatacacatagagcaaagaggggaaaagaatatgagctgaaatgcgcaaaaggctaaggaaagcagacaacttattgcaaataagaaatcagtacaaatgatgaatcgacctatgaaaattgagtccgatgggaatttggatccaaagaaaggtggtgctgtcttggattctactaaaactataggacttacaagtgttaagtagtgggatgactggcatatagttggatttcctggggcagagctattaagtactagtgtaagtaagacatgaaaatccttttgatttgaggaaaagcttctatgttgtcagaacagattgctacccagtcattacctgagaatgcaggaggtgctgatgcaaaatatcttatcgatgagtggccaacgataagcaaaagtagtggaagactcatctaggtggagtatgtaacaatattgtcacacccggttccaggggtagaaccgagcgcataccatatgtgtgccaggatccatttccacacatatgttgacgtcacaagtgtaatatatcaaaatacaatgcaataaagacgtaaagagagtataatactttat

SEQ ID NO: 27377 - DNA, 1224 bp, Zea Mays
cggctcccagtaacgcaacgcttctcggcttctcgcctcttctctcacccgtgactccgccgccgcatctctcctccaacgcgccgccgcatctcttcaacgctccatggtccccttcacctcccgccgctaccctacccatggccaccgcagccgctcgtgctaccctcccgcggcccctcctctctctcccacccttcctcctcccaccacatcctccgtgtgtcagcccgtcgttggctccgccttctattgccgtagggaacacgcggcgtcgcccttgcgctcctcgccacatgctgttacaggctgtcgtacccgtgtccgcggttgagggccttgtgccggtcatgttgaagaagaagcccatcgactagatctatctcgtcgtcgtgcgcctctctgccgaagagaggcaacgcctcctccgcggtgccatcacgtgctcctctcactactgcttccactcctcccagagtcccagtacacccccgccttgtggcatcgctgctcgccgcggccctgcacctcagccctgcctccatcccgagtcacacacctatcctttgaagaattaatggcgactggaagcagctttttacaggagtgccattctgctagatgccacacgctagctaaagcaaagatacacatagagcaaagaggggaaaagaatatgagctgaaatgcgcaaaaggctaaggaaagcagacaacttattgcaaataagaaatcagtacaaatgatgaatcgacctatgaaaattgagtccgatgggaatttggatccaaagaaaggtggtgctgtcttggattctactaaaactataggacttacaagtgttaagtagtgggatgactggcatatagttggatttcctggggcagagctattaagtactagtgtaagtaagacatgaaaatccttttgatttgaggaaaagcttctatgttgtcagaacagattgctacccagtcattacctgagaatgcaggaggtgctgatgcaaaatatcttatcgatgagtggccaacgataagcaaaagtagtggaagactcatctaggtggagtatgtaacaatattgtcacacccggttccaggggtagaaccgagcgcataccatatgtgtgccaggatccatttccacacatatgttgacgtcacaagtgtaatatatcaaaatacaatgcaataaagacgtaaagagagtataatactttat

SEQ ID NO: 27378 - DNA, 1194 bp, Zea Mays
attgattcttttgtgtgtaaacaaggtaccgtgaattggcccatagggtggatgatgctcttgggttcatgactgcatcggggcttacagtcgaccacccgataatgacgactactgacttctggacctcgcacgagtgccttctcttaccctacgagcaggctcttacccgtgaggattccaccagtggccttttctatgattgttcggcccacatgttgtgggttggtgagcgcactcgacaactcgatggagctcatgttgaattcctccgtggtgttgccaaccctctgggcataaaggtgagcgacaaaatgaaccccagtgagttggtgaagctgattgatattctgaacccttcaaacaaacctggaaggatcaccataattacaaggatgggggcagagaacatgagggtgaagttgcctcatctcatccgtgctgttcgcaatgctggactgattgtcacatggattactgatcctatgcatggaaacaccatcaaggccccttgtggcctgaagactcgtccatttgactccattctggctgaagtgcgtgccttcttcgatgtgcatgaccaagaaggaagccaccctgggggcgtccaccttgaaatgactgggcagaatgtgaccgagtgcatcggtggatcacggaccgtgaccttcgacgatctgagcgaccgctaccacacccactgcgacccaaggctgaatgcctcccagtccctggagctcgcctttatcatcgcagagaggctgaggaagaggaggatgcgatcggggctcaacagcagcctgccactgccgccactggctttctgagtagccggagccaaacacaaaggagggtaggaatagctgtggtgactcggaagagaaagagacagtcgacgccttgttttgttgatgcttagtgtggtgacctggtggtggtggtggtgggtgttcttggcacaagttacatgctggggatagctataggaggtacctgttgaggtgtgtaagacagtagctagcaaccgtatgccttggtttcctgtttgggtgcgtgacttgccgactttctagctgcttctggggttttgacctcggtaaggaaagaataaaaagataatcggagtgcaatgcttgctgaactggtgctcaataaattgatcccttgatgcctctattttcttcttttgtgttt

SEQ ID NO: 27379 - DNA, 555 bp, Zea Mays
gtgtttatgtgttgatttgacagaaaatagaccagatttctcacatcaggcaggttcattcctgggtgctatacacttgctgtctcggaggagcttccagaagagtatcaagggatttgtcaagacaacaacgtgcagtatgtgccgcccaagcgtgtctaagtatcaagacggcaatgatggtgtcttggtcctgaagcagtatagataattaggtagaagtatctgtgcttgccaagggaactgctcctcttatgctttgtatccgagtgctaaggcagtctatttcatgttagtgataaggctgtctatttaggtggtgaaccggcgggtgattgaatcttatccaataaccttgatgcctgttcttgaaatctgtgacaatgcggctcatgtgcgtctgtcatgttctttcacatctatgtatatatgaagaaaaatgtaatagctaaaggtcgttggaccatgaaccctcggcccctgaagaccctatgtataagggactcaacatgtttaagtgtaattcgagataaaacataaaaatgtgattaggcc

SEQ ID NO: 27380 - DNA, 918 bp, Zea Mays
gttactctgtaagcccaaagctccgaaacagagcccaaaagactacgagctcgcggggaagacggggacttccggagagagagagagagagagagagagagagagagcaggaagcaggggctagacgcggatcggcgagcatgaggggcggcggcggcggcgggatgatggacgatgaagagagggtgggccatgcggagatcccgaccagtttcggtcccgagctgcgcgcctgcctccgatgccgcctcgtcaagacctacgaccagggagaacggctgcgaaaactgcccgtttctagagatggacagagagcacgacaacgtcgtcaactgcaccacccccaacttcactggaattatctctctgatggaccccagtaggagctgggcagcccgttggttgagaattggcaggttcattcctgggtgctatacacttgctgtctcggaggagcttccagaagagtatcaagggatttgtcaagacaacaacgtgcagtatgtgccgcccaagcgtgtctaagtatcaagacggcaatgatggtgtcttggtcctgaagcagtatagataattaggtagaagtatctgtgcttgccaagggaactgctcctcttatgctttgtatccgagtgctaaggcagtctatttcatgttagtgataaggctgtctatttaggtggtgaaccggcgggtgattgaatcttatccaataaccttgatgcctgttcttgaaatctgtgacaatgcggctcatgtgcgtctgtcatgttctttcacatctatgtatatatgaagaaaaatgtaatagctaaaggtcgttggaccatgaaccctcggcccctgaagaccctatgtataagggactcaacatgtttaagtgtaattcgagataaaacataaaaatgtgattaggcc

SEQ ID NO: 27381 - DNA, 899 bp, Zea Mays
ctcaatatacccggaggacaagcaaggcaataaaatccagtccgtagatgtccctattgggctgctctgttactctgtaagcccaaagctccgaaacagagcccaaaagactacgagctcgcggggaagacggggacttccggagagagagagagagagagagagagagagagagcaggaagcaggggctagacgcggatcggcgagcatgaggggcggcggcggcggcgggatgatggacgatgaagagagggtgggccatgcggagatcccgaccagtttcggtcccgagctgcgcgcctgcctccgatgccgcctcgtcaagacctacgaccagaattatctctctgatggaccccagtaggagctgggcagcccgttggttgagaattggcaggttcattcctgggtgctatacacttgctgtctcggaggagcttccagaagagtatcaagggatttgtcaagacaacaacgtgcagtatgtgccgcccaagcgtgtctaagtatcaagacggcaatgatggtgtcttggtcctgaagcagtatagataattaggtagaagtatctgtgcttgccaagggaactgctcctcttatgctttgtatccgagtgctaaggcagtctatttcatgttagtgataaggctgtctatttaggtggtgaaccggcgggtgattgaatcttatccaataaccttgatgcctgttcttgaaatctgtgacaatgcggctcatgtgcgtctgtcatgttctttcacatctatgtatatatgaagaaaaatgtaatagctaaaggtcgttggaccatgaaccctcggcccctgaagaccctatgtataagggactcaacatgtttaagtgtaattcgagataaaacataaaaatgtgattaggcc

SEQ ID NO: 27382 - DNA, 1002 bp, Zea Mays
aaaaaaatctggaagctcaatatacccggaggacaagcaaggcaataaaatccagtccgtagatgtccctattgggctgctctgttactctgtaagcccaaagctccgaaacagagcccaaaagactacgagctcgcggggaagacggggacttccggagagagagagagagagagagagagagagagagcaggaagcaggggctagacgcggatcggcgagcatgaggggcggcggcggcggcgggatgatggacgatgaagagagggtgggccatgcggagatcccgaccagtttcggtcccgagctgcgcgcctgcctccgatgccgcctcgtcaagacctacgaccagttcagggagaacggctgcgaaaactgcccgtttctagagatggacagagagcacgacaacgtcgtcaactgcaccacccccaacttcactggaattatctctctgatggaccccagtaggagctgggcagcccgttggttgagaattggttcattcctgggtgctatacacttgctgtctcggaggagcttccagaagagtatcaagggatttgtcaagacaacaacgtgcagtatgtgccgcccaagcgtgtctaagtatcaagacggcaatgatggtgtcttggtcctgaagcagtatagataattaggtagaagtatctgtgcttgccaagggaactgctcctcttatgctttgtatccgagtgctaaggcagtctatttcatgttagtgataaggctgtctatttaggtggtgaaccggcgggtgattgaatcttatccaataaccttgatgcctgttcttgaaatctgtgacaatgcggctcatgtgcgtctgtcatgttctttcacatctatgtatatatgaagaaaaatgtaatagctaaaggtcgttggaccatgaaccctcggcccctgaagaccctatgtataagggactcaacatgtttaagtgtaattcgagataaaacataaaaatgtgattaggcc

SEQ ID NO: 27383 - DNA, 2388 bp, Zea Mays
cttccttccattcgactccacactccactcccagcctcgcctcccctcgcctttttagagagagaaaccacggctgccggcccccagcgagctagagagagaaaccaaggccaaggagcacagcaccccgtccgtccccagcaggagagcgagagacagaagggtgtgcgaaggaaagaagaggcggtgggagaggagggcgacatggagaggccggcaccggtgaggaagtctcacacgtcgacggcggacctgctgatctggccggagggggcgccgcaggagtcgcccgccggggccacgccgccatccaaccgccggccgcatcagccgtcggaggcgctcaggaaggtggtgttcggcgggcaggtgacggaggaggaggccgagagcctcaacaagagatctcccgagatttacggcacaactttgggcactgttatttcttttgtatgtgccgttgttgatctgtgctgctgtgggtggagaaattcgttggatttgaggaaaccatgctctgctcccaagtggaaggagatgacaggaagcggcatatttgctgctgggggcgaggctgaagaagatgaatctgccaatgcctctgcaactcccattcggaccgctccaaagaattatcaggtactgcttatgtaggttgatttttactctgttttgtttaggcttcatccctggcaacccttctgcgttgaactgttgatattaggattattgttttattttcaggtgctggctaacttgttgtgacaagatggatcacttgatttatctatttatgttcttgctttgctataaattttgaatgtcgttgatataagctgctggttgctatgatcaaaacttttaaatgttatacatacgttctagtcctacctctccttagggggctagaggttgttgagatgaatcttgtgagaagggtttgggcaagcattattattttgtatacacattggttggtgagctttccttgtgatagaactgggcattttgattggtaagttgagctgaacgagaaatattcgagaactttgattgatagacacatgagacttaggtactattttttttttgtagataactttggttaagatgtcaataaacaacaaaccttgattaaactctaaacatatatagtacagcaagtttcataatttttctacagactgcttagcatgcttctaatccataatcatcttgatgctggcttcaaatggaaagggtgaatatgcttaggtttgatatagatttaacctcttacgtcgctggaacactgttacacagactaatcctactgcattttctcaaacacaggcaattagcaccataagccacatctcattttccgaggaagaaagcatttctccgaagaagccgacttcgatagcagaggtggcgaagcagcgcgagctgagcggcacacttctgagcgaggacgacagcaagatgaagaagcagatatcggacctgaaatccaaggagctgagcggccacgacatctttgctcctccggaagacccacggccacgcaactcagagaacggctcgacctcgcagaccccgggcaaaaatgcacacgtcctgacctctgaactcacctcgccctaatataaactctcgcagtcacagaagctgcatgcagtgttgcttactgctgctggttgtcgttctctcacaacaggtaagcaacttcaagttcggcgaggccgacgaggacggcatggtgaagaccgcgaagaagatccccacaaagaaattcaccgacctcgcgggcaatatcttcaagggcgacgagaccccccctgggacggcggagaagcacctgagcacagcgaagctgaaggagatgaccggcagcgacatcttcgcggacgggaaggccccctcgcgggactacctcggcgggatccgcaagccgcctggcggggagagcagcatcgcgctggtttaacagcaacagcaacctgatggacatagcagcccctacatcattcgtttctttctcctcgccgtcaccgtcttaggagtgatcttttgttcttcttctttttcctttcctttggaggactgatcgattggaacccccggcttgctttcctgttccccgtaacttgcgccagattttcgttgtcgatcccctctgatggtggtgttgtgtgggcatgacaacaacgatggttatctctaatttaacattgatttggcttggctactgtttgttggttggtcggtcatggcgtacctgatgcagcaacaacaacccagtggtgcactatctcatttcccgtgactggatgtctcagctgctgagggaggagaaggacgacgacgaccaccatatcctccctagtgctagtgctgccctttttt

SEQ ID NO: 27384 - DNA, 1589 bp, Zea Mays
caccttccttccattcgactccacactccactcccagcctcgcctcccctcgcctttttagagagagaaaccacggctgccggcccccagcgagctagagagagaaaccaaggccaaggagcacagcaccccgtccgtccccagcaggagagcgagagacagaagggtgtgcgaaggaaagaagaggcggtgggagaggagggcgacatggagaggccggcaccggtgaggaagtctcacacgtcgacggcggacctgctgatctggccggagggggcgccgcaggagtcgcccgccggggccacgccgccatccaaccgccggccgcatcagccgtcggaggcgctcaggaaggtggtgttcggcgggcaggtgacggaggaggaggccgagagcctcaacaagagatctcccgagatttacggcacaactttgggcactgttatttcttttgtatgtgccgttgttgatctgtgctgctgtgggtggagaaattcgttggatttgaggaaaccatgctctgctcccaagtggaaggagatgacaggaagcggcatatttgctgctgggggcgaggctgaagaagatgaatctgccaatgcctctgcaactcccattcggaccgctccaaagaattatcaggcaattagcaccataagccacatctcattttccgaggaagaaagcatttctccgaagaagccgacttcgatagcagaggtggcgaagcagcgcgagctgagcggcacacttctgagcgaggacgacagcaagatgaagaagcagatatcggacctgaaatccaaggagctgagcggccacgacatctttgctcctccggaagacccacggccacgcaactcagagaacggctcgacctcgcagaccccgggcaaaaatgtaagcaacttcaagttcggcgaggccgacgaggacggcatggtgaagaccgcgaagaagatccccacaaagaaattcaccgacctcgcgggcaatatcttcaagggcgacgagaccccccctgggacggcggagaagcacctgagcacagcgaagctgaaggagatgaccggcagcgacatcttcgcggacgggaaggccccctcgcgggactacctcggcgggatccgcaagccgcctggcggggagagcagcatcgcgctggtttaacagcaacagcaacctgatggacatagcagcccctacatcattcgtttctttctcctcgccgtcaccgtcttaggagtgatcttttgttcttcttctttttcctttcctttggaggactgatcgattggaacccccggcttgctttcctgttccccgtaacttgcgccagattttcgttgtcgatcccctctgatggtggtgttgtgtgggcatgacaacaacgatggttatctctaatttaacattgatttggcttggctactgtttgttggttggtcggtcatggcgtacctgatgcagcaacaacaacccagtggtgcactatctcatttcccgtgactggatgtctcagctgctgagggaggagaaggacgacgacgaccaccatatcctccctagtgctagtgctgccctttttt

SEQ ID NO: 27385 - DNA, 2197 bp, Zea Mays
cagcgaccccgcaccttccttccattcgactccacactccactcccagcctcgcctcccctcgcctttttagagagagaaaccacggctgccggcccccagcgagctagagagagaaaccaaggccaaggagcacagcaccccgtccgtccccagcaggagagcgagagacagaagggtgtgcgaaggaaagaagaggcggtgggagaggagggcgacatggagaggccggcaccggtgaggaagtctcacacgtcgacggcggacctgctgatctggccggagggggcgccgcaggagtcgcccgccggggccacgccgccatccaaccgccggccgcatcagccgtcggaggcgctcaggaaggtggtgttcggcgggcaggtgacggaggaggaggccgagagcctcaacaagaggaaaccatgctctgctcccaagtggaaggagatgacaggaagcggcatatttgctgctgggggcgaggctgaagaagatgaatctgccaatgcctctgcaactcccattcggaccgctccaaagaattatcaggtactgcttatgtaggttgatttttactctgttttgtttaggcttcatccctggcaacccttctgcgttgaactgttgatattaggattattgttttattttcaggtgctggctaacttgttgtgacaagatggatcacttgatttatctatttatgttcttgctttgctataaattttgaatgtcgttgatataagctgctggttgctatgatcaaaacttttaaatgttatacatacgttctagtcctacctctccttagggggctagaggttgttgagatgaatcttgtgagaagggtttgggcaagcattattattttgtatacacattggttggtgagctttccttgtgatagaactgggcattttgattggtaagttgagctgaacgagaaatattcgagaactttgattgatagacacatgagacttaggtactattttttttttgtagataactttggttaagatgtcaataaacaacaaaccttgattaaactctaaacatatatagtacagcaagtttcataatttttctacagactgcttagcatgcttctaatccataatcatcttgatgctggcttcaaatggaaagggtgaatatgcttaggtttgatatagatttaacctcttacgtcgctggaacactgttacacagactaatcctactgcattttctcaaacacaggcaattagcaccataagccacatctcattttccgaggaagaaagcatttctccgaagaagccgacttcgatagcagaggtggcgaagcagcgcgagctgagcggcacacttctgagcgaggacgacagcaagatgaagaagcagatatcggacctgaaatccaaggagctgagcggccacgacatctttgctcctccggaagacccacggccacgcaactcagagaacggctcgacctcgcagaccccgggcaaaaatgcacacgtaagcaacttcaagttcggcgaggccgacgaggacggcatggtgaagaccgcgaagaagatccccacaaagaaattcaccgacctcgcgggcaatatcttcaagggcgacgagaccccccctgggacggcggagaagcacctgagcacagcgaagctgaaggagatgaccggcagcgacatcttcgcggacgggaaggccccctcgcgggactacctcggcgggatccgcaagccgcctggcggggagagcagcatcgcgctggtttaacagcaacagcaacctgatggacatagcagcccctacatcattcgtttctttctcctcgccgtcaccgtcttaggagtgatcttttgttcttcttctttttcctttcctttggaggactgatcgattggaacccccggcttgctttcctgttccccgtaacttgcgccagattttcgttgtcgatcccctctgatggtggtgttgtgtgggcatgacaacaacgatggttatctctaatttaacattgatttggcttggctactgtttgttggttggtcggtcatggcgtacctgatgcagcaacaacaacccagtggtgcactatctcatttcccgtgactggatgtctcagctgctgagggaggagaaggacgacgacgaccaccatatcctccctagtgctagtgctgccctttttt

SEQ ID NO: 27386 - DNA, 771 bp, Zea Mays
atggcgcgcctcggcctcttggccctcgcggtggccgtcctcgcgcttgcgtccggcgtggcgtcgcaggcgccggggccggcgccgtcggccgactgcgcgtcggcgctggccgggctcatgggctgcctgccgtacgtgcagcaggggagcacgcagggcaagcccgatagggagtgctgcgccggcgtcaaggccgcgctgaagagccccgccaccgtcgtctgcctctgcgccgccgtcgggcagaactacggcatgcccgtcaacctcacccgcggcgccgggctgcccgcggcgtgcggcgaagaccccgccgccttgagcaagtgcaacaagcccacagcttccggaacggctccggcagtcccaagcccgggctcttccaagtcgtcgtcgtcggcggcggcggcgatccgattcccggtctcagcgttcgccgttgtcgtcgccgcgactctgctctcgcactgcctcctctgaagatgcccgggtgtttggtggttttagttcatgatgatgagttgtgacgtgaacctgtgtatccgcactgtgtcataattcgttgagttcaattgactaatcgaccatgttggctgttggcatactgcatgcagctattcatgtcgttctgcaaggaatttctgtgtccaggtacccaccttaacgttcacaaaactatgctgaaaacaacgcaatgcaacacatctcgttttagtttcgacacaagatttgctgccaattcatgttttgaaagatacaggatatatt

SEQ ID NO: 27387 - DNA, 3747 bp, Zea Mays
ccctctctctctatctctctctctcgcacatctcacattctcaccaccaccacctcctcctctctctcccatctccaatggcggccgccacccacacctccccttccggctgctccgcctccggcaagccctagccctaggcaggctgctccactcccccacgcacacaccacacttctatggccgcgctactcgcgttcctcctcctcctgctgctgctgctctccgggggcgccgccggcgacgacgtggcggcgctgctcgagttcaagaagggcatcgcggggcgagaccgggacagggtgctggggtcctggtcgcggcccgcgacgaccgaggccggcagcggcggcgggtgccccgcgtcgtggcgcggcgtggcgtgcgacggcggcgcggtggtcggcgtggcgctcgacggcctcggcctggggggcgagctcaagctcgcgaccctcgccggcatgcgcgcgctccagaacctctccctcgccgggaacgccttctccggccgcctgccgcccggcatcggctccctctcctcgctgcgccacctcgacctctcccggaaccgcttctacgggcccgtcccggcccgcctcgccaacctctcgggcctcgtccacctcgacctctcccgcaacaacttcacctccgccttccccaccgacgggatccagcagctgcagaacctgcgccgcgtcgacgtccgcggcaacagcttctggggcaacgccaccgacctgctcgccaagctccgcaacgccgagcacgtcgacctcagcgacaacctcttcacggggaccatcgatttggacctccgcagcctctccagcatcgggaacacggtcaggtatctcaacctcagccacaacaacctggacgggggcttcttccggaacgagacggtgggcgcgttcaagaacttggcggtccttgatttgagcaacaacgggcttgctggcacagtgccgaggctcgatgcgtggttctcgctcgagtttttcagcgttgccgggaatgggctattcgggatgatgcctgagacactcctccagaattccatgcggcttgtcgaggttgatctcagcaggaacggcttctcaggatttctgcagtcaagaaattgacatgctatttcaatgctatggcatgggatcgactattgtgaatgcatatctcgatgtttgaacatttaatgttttagtaatatgacaacttgccatggtcattgccgattgtgaattctacgactttgaaggtgttgaatctctcttcaaatgtcttatcaggatcattaccagccaccatgggcaaatgtacctcagttgatcttagtgggaacctgttttcaggggaattagctatattacgttcctgggatgggattgttgaggtcattgacttgagctcaaacaaattggtgggaagctacccaaatgatgcctcccagtttcagaacttagtgtcactgaaattacgaaacaattcattgtcagggtctctcccttcggtgttgggtacctatcagaagttatctgtccttgatctgagtcagaacaccctcgagggatctgtgttgcctactttcttcatgtcaccaactttgactgtgttaaatctttctggaaataaattttctggaactattccatttgagagcacccattcaacggaatcaatacttctttcatctcaaccaggtctcaggattgttgatctgtccagcaattctttgactgggccattgccaccagatatctcgaacctgcaaaaacttgagttcctcattcttatgatgaatgaattatctggggagattcccagtgagataagcaagcttcaagcactggagtatattgacttatcacacaaccacctgacaggcagaattccggatatgcctcaaaatggcctgaaggtgttcaatgtatcttacaacaatctacaaggaactgttcccaaaagtatcgaaaagtttcctttatcttgcttccgacctggaaatgacatgttagttttcccagatggcctccctgctggaaatgatgattacaccggagtttctcagggccaaacatctcatgtacataaggctggtgttcgagttgctcttattattggttgcattggagctgttttgctagttatcttcatagccctagcattctatgtggtcaggtctcaagagctttgcggaagaaatggatttagaagtcagatcactatcagggatctgaaggggagaataagccctccaaatctgttcaagcccccgaaagataatgtgataccaagtaaaacaagtttctcaaatgatcatctcttaagagccgcagctagatcgatgtctgcccagaaagagttattggctgaagcctctgttgaatatggctacactgatccaaaggaagttgccgagtccacaagtttaggtgtgaccgagacttcttctgcaatccaggctcaggagtcttctccacggtctgcattgccaacatcgccacattttgctgattctagattccttgaggaacctgttgcttttgaagtatactctccagaccggctggctggagaattgatcttcatggacagcactttggttttcacagctgaggatctgtcacgtgcaccggcggaagttcttggaaggagcagccatggaacaacgtataaagctgttctacaaagcgggcatgtcctaacagtgaaatggctgcgtgtcggtcttgtgaagcataaaaaggagttcacaaaggagataaagaggattggcactatcaggaatccaaatataatttcatggagagccttctattggggccctaaggagcaagagagattaattatttctgactatgtcaatggtgatagcttggcactttacctttatgagtcgactccaagaagatactcccgcctatcggttcctcagcgtctcagaatcgccatcgacctagcccgctgcctccagttcctacaccaggagaagggcttgccgcacggcaacttgaagccaactaacatattcttggctggtcctgacctctctccaaagctggtggactacggcctgcacaggttcatgactccaagcggcaccgccgagcagatactgaatctaggagcgctagggtaccgagccccggagctggcgaacgcggccaagcccgcgcccacgttcaaggcggacgtgtatgcgttcggggtgatcgtcatggagatgctgacacggaggagcgctggggacatcatctcgggccagtccggcgcggtcgacctgaccgactgggtccagatgtgcagcagggaagggcggggcactgactgcttcgaccgagacatcgccggcctggaagagtccccgagggtcatggacgagctgctggcggtctcgcttaggtgcgtcctccctgtaaatgagaggcctagcatgaagacggtctgcgatgacctgtgctccataacagcgtgagtgagtttccccctcccccaatgtacatgtaaccgatcaattttccgcccgttggtcctgattttttctctatcccgtgggggttccagagccttgtagacagggcttgtttgatttgtaactgctagtgtaaagaggattcgatccacccattgattgattgatatcagccattgccgtctttcttcgtgagttgggggcaccagtgtcttatctgttcactggtcgagctcttcacgctggacatttccccagtgagttatgcagct

SEQ ID NO: 27388 - DNA, 464 bp, Zea Mays
  misc_feature (464)..(464): n is a, c, g, or t
ctcgcttgccatgccattgccatggctgccgcgtccacgaaatcaagggaggaatatttgacttgtgcacctccaactgccaatcaatcaatcatatcggaaggctgcccaccaccgcggcggcggcgctagctcgtgtccccgtcaccgtcaccacagctcccgggctggcttccatgtgtggagggggaagaagacagaagaggcgcgcgcgactcgcggtcattttcaccgcatactttttttcccccatttatggatctggataccatccgtcaagcacccacttttaactcccattcttgttgatcgaggagaccattcctgtgtgcaaaatctcaagtttcctggacagtattgcacagtagagaaatctcccctcatctacttctacctacctggtagtattgcacagcagagaaatctccagaacccctccccgcccaaatgtctctctcaccctn

SEQ ID NO: 27389 - DNA, 869 bp, Zea Mays
ccacttttgagcaacaacaaagattttgagaagatgactcaagctacagttgatgggaagaagaacaaggtttatggacagaacctttgttatctggctaagctatttcttgatcacaagacattgtactatgatgttgatttgttcttgttttatgtcctctgcgaatgtgatgatcggggatgtcatatggtgggatatttctctaaggaaaaacactccgaagaatcttataatttggcttgcattctcactctccccccataccaaagaaaaggatatgggaagttcctgattgctttctcatatgaactttccaagaaagaaggtaaagttgggacaccggagcgccctctctctgatcttggtctgctcagctatagaggttattggactagagtgcttctggaaattctaaagaaacataagggaaacatatctataaaggaactaagcgacatgacggcaataaaagcagatgacatattgagcacgctacagagcctggacctaatccagtaccgcaaagggcagcacgtcatctgcgctgacccgaaggtcctcgaccgccacctcaaggcggcggggcggggcggcctggacgtcgacgttagcaagctcatatggactccctacaaggagcaaggctaaaaggcgaactgctccgtgtctcagatttagactcgctgaccgatgcgatgcagtccctgtacatagcatctccccacagctcacttgacttgacttgactcgtgtaccgtgaaactctacttgtaactttgaacatccacatcgttgtctcctcatttctccttgcattaaccatgctacctttttttttttcttggataagccagatcagagcgtgg

SEQ ID NO: 27390 - DNA, 2955 bp, Zea Mays
aaggtacgaaagcccaacgggccccaaacagtccagaaggggctctcacaccggatccgctctggctccaacaacgtgatgggctccatggaagcgtcgaccgcgccggagaacggctcctccgctgccggtggcggagccggcggcacggcgtgcaacggggcgggcgccgcgtctaacggaggaggcatggagaggcggctgaggtcctcggccgcgtccgcgtcgtgggcggcgcaccttcccctggaggtgggcacgcgcgtgatgtgccggtggcgcgaccagaagctccacccggtcaaggtgatcgagcgccgcaagggctccgcgtgctcttcccccgccgactacgagtattacgtccactacaccgagttcaatagaagacttgacgagtgggttaagcttgatcagcttgatcttgacactgtcgagaccgttgtcgatgagaaagtagaagataaggcaacaagcttaaagatgacacggcaccagaaacgtaaaattgatgaaacacatgtggagcaaggacatgaggagcttgatgcagccagcttgcgggaacatgaagaattcacaaaggtgaaaaatatcgcgaagatcgaactggggagatatgagatagacacatggtatttctctccttttccaccagagtataatgactgcccgaagctgtttttctgtgaattttgcctcaacttcatgaagcgcaaagaacagcttcagaggcacatgaagaagtgtgatcttaagcaccccccaggtgatgaaatctatagaagtggaactctatcaatgttcgaggttgatgggaagaagaacaaggtttatggacagaacctttgttatctggctaagctatttcttgatcacaagacattgtactatgatgttgatttgttcttgttttatgtcctctgcgaatgtgatgatcggggatgtcatatggtgggatatttctctaaggaaaaacactccgaagaatcttataatttggcttgcattctcactctccccccataccaaagaaaaggatatgggaagttcctgattgctttctcatatgaactttccaagaaagaaggtaaagttgggacaccggagcgccctctctctgatcttggtctgctcagctatagaggttattggactagagtgcttctggaaattctaaagaaacataagggaaacatatctataaaggtaacacccttccatccagatatacctttttcgttgtacaaatttcgaaagctgattgaattatgatgcagcagttctagaaagaaactttctattggctcctcatattaccctacttaacccttgatctatgaccaaaaaaggttagcccctgtgtttcatagattacacttcaataaacaggtggattttctgtgctgcaattgcgtgttagtcaaacattccctgaataaggacatttagtagtcttctagaacataatgtatggtaatggtctttttggatgagaaagatcacctcaggaatgtttaggtttagtccagttccaacatcctctttccaaacatatcttaaaataccaggttacatgtggagtcagctttatattactcggtgctgttatctggtataaaaactggcttttcatcttagttatcctgctactgcatgtcttgcctgggccctgaaacttttgggtgcatgtgaagcgactagtttggtggtagatatcatcatctggaattctggatatttatgggatcgtagttgtcagcacagtgtactgtgtcgctattcggggaggtagtatgtacgggtggtagattgttatacctggcttcagctcttcaagcagtagatttttttttttaccgaaaaacaggtggatggagcagttagtcgatgttattcttttcactcctaggagaatcatgtttgttatcgaaagcactataacatcgcagaagagacaaaacatgtaaatagtaacatatatcatatcataggcagctgtaacttgtaacatcagatgtgcaaggattgtagcaaacaatatgctagacttcaaaccgagtagaagtgtactgaatagctttaattctataactgtgaagcccagtgcaatgttgacagggccacgtgcacccagtgaaatatgcagaaacttcctgcatggaaggacatttgatccatgtgctctgtgggtcttctgtctgtgccctcctgtccgtgttgctgctgcccttgaaaaaatttggacgtaggaagtatgcaaagcagatcatctgacgagagtacatggaacaattgtattctgaacgtcattgctgttgccttcttgtccttgatctgtaccagtgtttgttggtagagtgcacatgctcgtagtagaaccttttttttcatgaagacatgtacatgatcatagggtgcccctctagcattcatgagtgtttctgaatccaaaaggtagcataacactgttctaacaagctagttcgtacatgcatttttttttgtaacaaactcttgtgcttgcgcgcaggaactaagcgacatgacggcaataaaagcagatgacatattgagcacgctacagagcctggacctaatccagtaccgcaaagggcagcacgtcatctgcgctgacccgaaggtcctcgaccgccacctcaaggcggcggggcggggcggcctggacgtcgacgttagcaagctcatatggactccctacaaggagcaaggctaaaaggcgaactgctccgtgtctcagatttagactcgctgaccgatgcgatgcagtccctgtacatagcatctccccacagctcacttgacttgacttgactcgtgtaccgtgaaactctacttgtaactttgaacatccacatcgttgtctcctcatttctccttgcattaaccatgctacctttttttttttcttggataagccagatcagagcgtgg

SEQ ID NO: 27391 - DNA, 1469 bp, Zea Mays
aaggtacgaaagcccaacgggccccaaacagtccagaaggggctctcacaccggatccgctctggctccaacaacgtgatgggctccatggaagcgtcgaccgcgccggagaacggctcctccgctgccggtggcggagccggcggcacggcgtgcaacggggcgggcgccgcgtctaacggaggaggcatggagaggcggctgaggtcctcggccgcgtccgcgtcgtgggcggcgcaccttcccctggaggtgggcacgcgcgtgatgtgccggtggcgcgaccagaagctccacccggtcaaggtgatcgagcgccgcaagggctccgcgtgctcttcccccgccgactacgagtattacgtccactacaccgagttcaatagaagacttgacgagtgggttaagcttgatcagcttgatcttgacactgtcgagaccgttgtcgatgagaaagtagaagataaggcaacaagcttaaagatgacacggcaccagaaacgtaaaattgatgaaacacatgtggagcaaggacatgaggagcttgatgcagccagcttgcgggaacatgaagaattcacaaaggtgaaaaatatcgcgaagatcgaactggggagatatgagatagacacatggtatttctctccttttccaccagagtataatgactgcccgaagctgtttttctgtgaattttgcctcaacttcatgaagcgcaaagaacagcttcagaggcacatgaagaagtgtgatcttaagcaccccccaggtgatgaaatctatagaagtggaactctatcaatgttcgaggaaaaacactccgaagaatcttataatttggcttgcattctcactctccccccataccaaagaaaaggatatgggaagttcctgattgctttctcatatgaactttccaagaaagaaggtaaagttgggacaccggagcgccctctctctgatcttggtctgctcagctatagaggttattggactagagtgcttctggaaattctaaagaaacataagggaaacatatctataaaggaactaagcgacatgacggcaataaaagcagatgacatattgagcacgctacagagcctggacctaatccagtaccgcaaagggcagcacgtcatctgcgctgacccgaaggtcctcgaccgccacctcaaggcggcggggcggggcggcctggacgtcgacgttagcaagctcatatggactccctacaaggagcaaggctaaaaggcgaactgctccgtgtctcagatttagactcgctgaccgatgcgatgcagtccctgtacatagcatctccccacagctcacttgacttgacttgactcgtgtaccgtgaaactctacttgtaactttgaacatccacatcgttgtctcctcatttctccttgcattaaccatgctacctttttttttttcttggataagccagatcagagcgtgg

SEQ ID NO: 27392 - DNA, 1921 bp, Zea Mays
aaggtacgaaagcccaacgggccccaaacagtccagaaggggctctcacaccggatccgctctggctccaacaacgtgatgggctccatggaagcgtcgaccgcgccggagaacggctcctccgctgccggtggcggagccggcggcacggcgtgcaacggggcgggcgccgcgtctaacggaggaggcatggagaggcggctgaggtcctcggccgcgtccgcgtcgtgggcggcgcaccttcccctggaggtgggcacgcgcgtgatgtgccggtggcgcgaccagaagctccacccggtcaaggtgatcgagcgccgcaagggctccgcgtgctcttcccccgccgactacgagtattacgtccactacaccgagttcaatagaagacttgacgagtgggttaagcttgatcagcttgatcttgacactgtcgagaccgttgtcgatgagaaagtagaagataaggcaacaagcttaaagatgacacggcaccagaaacgtaaaattgatgaaacacatgtggagcaaggacatgaggagcttgatgcagccagcttgcgggaacatgaagaattcacaaaggtgaaaaatatcgcgaagatcgaactggggagatatgagatagacacatggtatttctctccttttccaccagagtataatgactgcccgaagctgtttttctgtgaattttgcctcaacttcatgaagcgcaaagaacagcttcagaggcacatgaagaagtgtgatcttaagcaccccccaggtgatgaaatctatagaagtggaactctatcaatgttcgaggttgatgggaagaagaacaaggtttatggacagaacctttgttatctggctaagctatttcttgatcacaagacattgtactatgatgttgatttgttcttgttttatgtcctctgcgaatgtgatgatcggggatgtcatatggtgggatatttctctaaggtaaagttcacaatgatatgaatctatggtctattttgttaagctgcttcagtagtttctgtacaagatatgtttcgcgccagtggagtggatcatttaatgctagagaacatctgcattctgttgaatgtgtttttctcttttcaggaaaaacactccgaagaatcttataatttggcttgcattctcactctccccccataccaaagaaaaggatatgggaagttcctgattgctttctcatatgaactttccaagaaagaaggtaaagttgggacaccggagcgccctctctctgatcttggtctgctcagctatagaggttattggactagagtgcttctggaaattctaaagaaacataagggaaacatatctataaaggtaacacccttccatccagatatacctttttcgttgtacaaatttcgaaagctgattgaattatgatgcagcagttctagaaagaaactttctattggctcctcatattaccctacttaacccttgatctatgaccaaaaaaggaactaagcgacatgacggcaataaaagcagatgacatattgagcacgctacagagcctggacctaatccagtaccgcaaagggcagcacgtcatctgcgctgacccgaaggtcctcgaccgccacctcaaggcggcggggcggggcggcctggacgtcgacgttagcaagctcatatggactccctacaaggagcaaggctaaaaggcgaactgctccgtgtctcagatttagactcgctgaccgatgcgatgcagtccctgtacatagcatctccccacagctcacttgacttgacttgactcgtgtaccgtgaaactctacttgtaactttgaacatccacatcgttgtctcctcatttctccttgcattaaccatgctacctttttttttttcttggataagccagatcagagcgtgg

SEQ ID NO: 27393 - DNA, 3098 bp, Zea Mays
aaggtacgaaagcccaacgggccccaaacagtccagaaggggctctcacaccggatccgctctggctccaacaacgtgatgggctccatggaagcgtcgaccgcgccggagaacggctcctccgctgccggtggcggagccggcggcacggcgtgcaacggggcgggcgccgcgtctaacggaggaggcatggagaggcggctgaggtcctcggccgcgtccgcgtcgtgggcggcgcaccttcccctggaggtgggcacgcgcgtgatgtgccggtggcgcgaccagaagctccacccggtcaaggtgatcgagcgccgcaagggctccgcgtgctcttcccccgccgactacgagtattacgtccactacaccgagttcaatagaagacttgacgagtgggttaagcttgatcagcttgatcttgacactgtcgagaccgttgtcgatgagaaagtagaagataaggcaacaagcttaaagatgacacggcaccagaaacgtaaaattgatgaaacacatgtggaggacatgaggagcttgatgcagccagcttgcgggaacatgaagaattcacaaaggtgaaaaatatcgcgaagatcgaactggggagatatgagatagacacatggtatttctctccttttccaccagagtataatgactgcccgaagctgtttttctgtgaattttgcctcaacttcatgaagcgcaaagaacagcttcagaggcacatgaagaagtgtgatcttaagcaccccccaggtgatgaaatctatagaagtggaactctatcaatgttcgaggttgatgggaagaagaacaaggtttatggacagaacctttgttatctggctaagctatttcttgatcacaagacattgtactatgatgttgatttgttcttgttttatgtcctctgcgaatgtgatgatcggggatgtcatatggtgggatatttctctaaggtaaagttcacaatgatatgaatctatggtctattttgttaagctgcttcagtagtttctgtacaagatatgtttcgcgccagtggagtggatcatttaatgctagagaacatctgcattctgttgaatgtgtttttctcttttcaggaaaaacactccgaagaatcttataatttggcttgcattctcactctccccccataccaaagaaaaggatatgggaagttcctgattgctttctcatatgaactttccaagaaagaaggtaaagttgggacaccggagcgccctctctctgatcttggtctgctcagctatagaggttattggactagagtgcttctggaaattctaaagaaacataagggaaacatatctataaaggtaacacccttccatccagatatacctttttcgttgtacaaatttcgaaagctgattgaattatgatgcagcagttctagaaagaaactttctattggctcctcatattaccctacttaacccttgatctatgaccaaaaaaggttagcccctgtgtttcatagattacacttcaataaacaggtggattttctgtgctgcaattgcgtgttagtcaaacattccctgaataaggacatttagtagtcttctagaacataatgtatggtaatggtctttttggatgagaaagatcacctcaggaatgtttaggtttagtccagttccaacatcctctttccaaacatatcttaaaataccaggttacatgtggagtcagctttatattactcggtgctgttatctggtataaaaactggcttttcatcttagttatcctgctactgcatgtcttgcctgggccctgaaacttttgggtgcatgtgaagcgactagtttggtggtagatatcatcatctggaattctggatatttatgggatcgtagttgtcagcacagtgtactgtgtcgctattcggggaggtagtatgtacgggtggtagattgttatacctggcttcagctcttcaagcagtagatttttttttttaccgaaaaacaggtggatggagcagttagtcgatgttattcttttcactcctaggagaatcatgtttgttatcgaaagcactataacatcgcagaagagacaaaacatgtaaatagtaacatatatcatatcataggcagctgtaacttgtaacatcagatgtgcaaggattgtagcaaacaatatgctagacttcaaaccgagtagaagtgtactgaatagctttaattctataactgtgaagcccagtgcaatgttgacagggccacgtgcacccagtgaaatatgcagaaacttcctgcatggaaggacatttgatccatgtgctctgtgggtcttctgtctgtgccctcctgtccgtgttgctgctgcccttgaaaaaatttggacgtaggaagtatgcaaagcagatcatctgacgagagtacatggaacaattgtattctgaacgtcattgctgttgccttcttgtccttgatctgtaccagtgtttgttggtagagtgcacatgctcgtagtagaaccttttttttcatgaagacatgtacatgatcatagggtgcccctctagcattcatgagtgtttctgaatccaaaaggtagcataacactgttctaacaagctagttcgtacatgcatttttttttgtaacaaactcttgtgcttgcgcgcaggaactaagcgacatgacggcaataaaagcagatgacatattgagcacgctacagagcctggacctaatccagtaccgcaaagggcagcacgtcatctgcgctgacccgaaggtcctcgaccgccacctcaaggcggcggggcggggcggcctggacgtcgacgttagcaagctcatatggactccctacaaggagcaaggctaaaaggcgaactgctccgtgtctcagatttagactcgctgaccgatgcgatgcagtccctgtacatagcatctccccacagctcacttgacttgacttgactcgtgtaccgtgaaactctacttgtaactttgaacatccacatcgttgtctcctcatttctccttgcattaaccatgctacctttttttttttcttggataagccagatcagagcgtgg

SEQ ID NO: 27394 - DNA, 1602 bp, Zea Mays
gtatttgacttggcctgcctctccgcctcgcttcgtcttcacttcccgcccggcgaaagagcacaagcagccgccaccaatggctgcctgagaccttgcgggcgagagcggcggagaaagcagttccagccttccaaagctgccgccgatgcaagctccgcgtgagggctacgggctggccacgatggacttcgagtacgtccccgcgtcccccggcagcagcaggtgggcgggcgagtcagcggcgcggcggcggcagcgccgactctcttcgccgtcattgaggacctacctcacgccggccttcgacgccgtggccggcggggagggcggcgtgtctgggtactcttcatcgtcgtcctccggcggtctggaactcgggttcgacgcctcgctcctccgctaccgccgctcctgcttggcggcctccgcggacctggatagccgtgtcctcctctactccccgcagtcgttgccaccgccgccgccgcagatgagggcggcgtatatgccagcggatgacgaggtttgggcacctggcgtcagccactacggctccaagcatgagacggttaccgccttaacggttttctgtgccctggacccctggtggacaacacctcaactagcttttgctgtggcatttccgcttaacggcatgtacaatgctgcttgcaggcggttactgctttgccggttttatgtgccctggtggacaatgctgcctcaactagcttttgctgtggcattgctgcttaagggcatgtataagtacaacgacgatgcttgcttgggcgcttgcaggcagctaatgccttactggtttccatcactgcttgttcaagcaccatgcctgaggtcatttttcagcaaaacgactaacagtttgaggcttgaaaaagttggagattggcgtgaaaatttagatgttgccatcgtcaaattaggactcatatgcaggctggccggcttactggcgcaccaggttttcaggattcagaaaaccgcattgctttcgtctccccgtcacggacaagtagcaatcttcatactacagttctcggcgcctccacacccgtcaagctccctgctgaactccagttgcccgagggcagtgcagagctcccaacgccaaagccagaagctacgccttcagctctcaagttatctgctgatccagaaccagacgtggatgccgatgaaatcactgaagccctgtacggtggcagtggtcatcgcaggctccccattttcagggagatctgtccagaatgagtgtcagcctcagcattctcctcaacgtcgctgatggatgcatttcggctttagatgtatattctgtttatctatctcgtacccatagtcttggtagcagttactctggagggtcatttctagcttcctaaaggagaatctcttctattgatgtcttcattaagcgagaaagctatgatatacatgacttgattaagcaggcaattgacccgttttgcttggcgttggttggaggtgcacgtgcaccttcgaatatatatgaatttagcccctctcttttttttggccctatgtaattgagttgcagtgttttgcatacattcgatg

SEQ ID NO: 27395 - DNA, 2357 bp, Zea Mays
atggcgaccggggccgatctgacctccccaaccggcgccgctgcggcagcggccgccgccaggaaggaccgccacatcgtcagttggagctccgaggaggatggcgtgcttcgtgctcaaatcgctcttcatggcactgataactggacaattatagcggcacaattcaaggacaagacggccagacagtgcaggagaagatggtacaattatttgaactcagagtgcaagaaaggtggaacagacaatgcagtgaagaaccggttttctactctatgcaaaaggagggctaaggatgacgagctataccaagaaaatggtgtgccatgttccaacacaaatgcaaagaaggttctcactgaaacaggacgcctcacaccaggcggagctggctctttggtacatattaagcagacgaggtcttccagttataatttgaaggagaaccttgtaccaaatatgaaattatttgaactagagaagagcacacaagatgccaggcaacctcttgctaccatttcttcgaacaaccaagataacgtgaatacagttaaatctcaaaatcttgtcccaaccacaaaacaattgttaggtccagaacaacattgtgtgaagcgggagggtaattttctgaagaaggatgacccaaaagttgctactttattacagcaatctgactttctttgctcccttgcaacaaaaatcaaaagtgacaatacaagtaaaagcatggatgaagcatggcagcaactgcaagatcatttagtgaaaaaagagcacaacaaagtgccagaaaacagtgggtctgaaatagcttcacttttagaggagcttgatgatttaattgtagacccctatgagaggaaagatgaagatgaacagaagctaagcgagcacaatggacggaccgatgtggacaatgatcactgtaacggttcttcacaaactagcatagtagtaacgacaaatatggtcccagaggaaatgatgggagattgtccagtcgataactgcaatgaggatagtagtctttgtagaaaagtgctttctggaagtacagaaccttgcccaggtgcaaaaatgacaggatgtgggaatttgagcgaagaccaggttgctgaaggtagtgtgcttcaacgtgtagaatctatatctcctgttataacagatattgatgatttactcgtagacccgtatgagagtgaagcggaagatgaagaaaagtcaggggagcagaatggacagattgatgtgcatgctgagcagtgttttggttcttctcaaactatcatagaagtgatatcagacatggcccctgatgaagtcatggaaacttgttcagcagataaccgcgaagaacatagtagcatttgccgaaatgtgctttctggaagtatggcaccttgcccaggtgcagaaataccaacatctgaaaaaatgagtgaacttgctgaagatagcagacttcaatgtatggagtttgcatctcccgttctggcaaattttgcgagcaaggaatgtggagaaacaccagaaccacaagttcttaatgagattgttgaagatagcaggcttcaatgtattgaattcaactccccggctcacacaattctcccagataaaacaggcgccgaaaactttgcatccccaagttttgatgtggttgcaaaagatagtaagcctccgtctttggaattcacatcccctgctcatacagttgcaacattccaaccgtatgcagacggcatccctaccccaaaattcactgctagtgagaggagttttctgctgtcagttttagagctgacctcaccagggtcaaggcctgaaacttctcagcagccatcttgcaaaagggctcttcttaatagcctttgaaatgggtttgcataaaatcccaacaccaagcctgctatgcccctcagcataatttggctactcctatatgcatgaagtgtgcctaccctcaaagggtttcatagtatgttttgtttgttgtatagaatgatgcattggtgtagttgtattagcatacaggaacgaaagggtgatggtgtaagtgtttacagcttgtgttcaaaatatagaaaaagtaatattctttgtgtaattaactcttgtaattcttcccatgggtgcgagttattagattgttgcgtagtgtgatgtaatggctttcctttgttgagcttttggtatggaagaaccgactgcaggctatggctgtatgctttattgatttgtatggttggaacttggaaacatgatattcggttgatagactgcgttctctgcagctgatccggcactaagtttggtgtccattttcagaataaaattcatgtatttcccaggcc

SEQ ID NO: 27396 - DNA, 2652 bp, Zea Mays
ctcacccaccccggcccggcagccaatctgtcatccatcacgtcgcgtgccgtgcgtcaccccctcccttcgcctcgcttcaaaaatccctccgttggcgcccaagtaccaaaccctagcctcgtccgggcccgccccctctggccggccgggcggaacatgcgaatgcggccatggcgaccggggccgatctgacctccccaaccggcgccgctgcggcagcggccgccgccaggaaggaccgccacatcgtcagttggagctccgaggaggatggcgtgcttcgtgctcaaatcgctcttcatggcactgataactggacaattatagcggcacaattcaaggacaagacggccagacagtgcaggagaaggtgtgcacactgttctaatagaggaaacattgatggtacaattatttgaactcagagtgcaagaaaggtgggtggtccagggaagaggatatgcttttgtgtgaggctcaaaaagttcttggaaacaagtggactgaaattgcaaaagttgtttcaggaagaacagacaatgcagtgaagaaccggttttctactctatgcaaaaggagggctaaggatgacgagctataccaagaaaatggtgtgccatgttccaacacaaatgcaaagaaggttctcactgaaacaggacgcctcacaccaggcggagctggctctttggtacatattaagcagacgaggtcttccagttataatttgaaggagaaccttgtaccaaatatgaaattatttgaactagagaagagcacacaagatgccaggcaacctcttgctaccatttcttcgaacaaccaagataacgtgaatacagttaaatctcaaaatcttgtcccaaccacaaaacaattgttaggtccagaacaacattgtgtgaagcgggagggtaattttctgaagaaggatgacccaaaagttgctactttattacagcaatctgactttctttgctcccttgcaacaaaaatcaaaagtgacaatacaagtaaaagcatggatgaagcatggcagcaactgcaagatcatttagtgaaaaaagagcacaacaaagtgccagaaaacagtgggtctgaaatagcttcacttttagaggagcttgatgatttaattgtagacccctatgagaggaaagatgaagatgaacagaagctaagcgagcacaatggacggaccgatgtggacaatgatcactgtaacggttcttcacaaactagcatagtagtaacgacaaatatggtcccagaggaaatgatgggagattgtccagtcgataactgcaatgaggatagtagtctttgtagaaaagtgctttctggaagtacagaaccttgcccaggtgcaaaaatgacaggatgtgggaatttgagcgaagaccaggttgctgaaggtagtgtgcttcaacgtgtagaatctatatctcctgttataacagatattgatgatttactcgtagacccgtatgagagtgaagcggaagatgaagaaaagtcaggggagcagaatggacagattgatgtgcatgctgagcagtgttttggttcttctcaaactatcatagaagtgatatcagacatggcccctgatgaagtcatggaaacttgttcagcagataaccgcgaagaacatagtagcatttgccgaaatgtgctttctggaagtatggcaccttgcccaggtgcagaaataccaacatctgaaaaaatgagtgaacttgctgaagatagcagacttcaatgtatggagtttgcatctcccgttctggcaaattttgcgagcaaggaatgtggagaaacaccagaaccacaagttcttaatgagattgttgaagatagcaggcttcaatgtattgaattcaactccccggctcacacaattctcccagataaaacaggcgccgaaaactttgcatccccaagttttgatgtggttgcaaaagatagtaagcctccgtctttggaattcacatcccctgctcatacagttgcaacattccaaccgtatgcagacggcatccctaccccaaaattcactgctagtgagaggagttttctgctgtcagttttagagctgacctcaccagggtcaaggcctgaaacttctcagcagccatcttgcaaaagggctcttcttaatagcctttgaaatgggtttgcataaaatcccaacaccaagcctgctatgcccctcagcataatttggctactcctatatgcatgaagtgtgcctaccctcaaagggtttcatagtatgttttgtttgttgtatagaatgatgcattggtgtagttgtattagcatacaggaacgaaagggtgatggtgtaagtgtttacagcttgtgttcaaaatatagaaaaagtaatattctttgtgtaattaactcttgtaattcttcccatgggtgcgagttattagattgttgcgtagtgtgatgtaatggctttcctttgttgagcttttggtatggaagaaccgactgcaggctatggctgtatgctttattgatttgtatggttggaacttggaaacatgatattcggttgatagactgcgttctctgcagctgatccggcactaagtttggtgtccattttcagaataaaattcatgtatttcccaggcc

SEQ ID NO: 27397 - DNA, 2614 bp, Zea Mays
cttctcacccaccccggcccggcagccaatctgtcatccatcacgtcgcgtgccgtgcgtcaccccctcccttcgcctcgcttcaaaaatccctccgttggcgcccaagtaccaaaccctagcctcgtccgggcccgccccctctggccggccgggcggaacatgcgaatgcggccatggcgaccggggccgatctgacctccccaaccggcgccgctgcggcagcggccgccgccaggaaggaccgccacatcgtcagttggagctccgaggaggatggcgtgcttcgtgctcaaatcgctcttcatggcactgataactggacaattatagcggcacaattcaaggacaagacggccagacagtgcaggagaagatggtacaattatttgaactcagagtgcaagaaaggtgggtggtccagggaagaggatatgcttttgtgtgaggctcaaaaagttcttggaaacaagtggactgaaattgcaaaagttgtttcaggaagaacagacaatgcagtgaagaaccggttttctactctatgcaaaaggagggctaaggatgacgagctataccaagaaaatggtgtgccatgttccaacacaaatgcaaagaaggttctcactgaaacaggacgcctcacaccaggcggagctggctctttggtacatattaagcagacgagttataatttgaaggagaaccttgtaccaaatatgaaattatttgaactagagaagagcacacaagatgccaggcaacctcttgctaccatttcttcgaacaaccaagataacgtgaatacagttaaatctcaaaatcttgtcccaaccacaaaacaattgttaggtccagaacaacattgtgtgaagcgggagggtaattttctgaagaaggatgacccaaaagttgctactttattacagcaatctgactttctttgctcccttgcaacaaaaatcaaaagtgacaatacaagtaaaagcatggatgaagcatggcagcaactgcaagatcatttagtgaaaaaagagcacaacaaagtgccagaaaacagtgggtctgaaatagcttcacttttagaggagcttgatgatttaattgtagacccctatgagaggaaagatgaagatgaacagaagctaagcgagcacaatggacggaccgatgtggacaatgatcactgtaacggttcttcacaaactagcatagtagtaacgacaaatatggtcccagaggaaatgatgggagattgtccagtcgataactgcaatgaggatagtagtctttgtagaaaagtgctttctggaagtacagaaccttgcccaggtgcaaaaatgacaggatgtgggaatttgagcgaagaccaggttgctgaaggtagtgtgcttcaacgtgtagaatctatatctcctgttataacagatattgatgatttactcgtagacccgtatgagagtgaagcggaagatgaagaaaagtcaggggagcagaatggacagattgatgtgcatgctgagcagtgttttggttcttctcaaactatcatagaagtgatatcagacatggcccctgatgaagtcatggaaacttgttcagcagataaccgcgaagaacatagtagcatttgccgaaatgtgctttctggaagtatggcaccttgcccaggtgcagaaataccaacatctgaaaaaatgagtgaacttgctgaagatagcagacttcaatgtatggagtttgcatctcccgttctggcaaattttgcgagcaaggaatgtggagaaacaccagaaccacaagttcttaatgagattgttgaagatagcaggcttcaatgtattgaattcaactccccggctcacacaattctcccagataaaacaggcgccgaaaactttgcatccccaagttttgatgtggttgcaaaagatagtaagcctccgtctttggaattcacatcccctgctcatacagttgcaacattccaaccgtatgcagacggcatccctaccccaaaattcactgctagtgagaggagttttctgctgtcagttttagagctgacctcaccagggtcaaggcctgaaacttctcagcagccatcttgcaaaagggctcttcttaatagcctttgaaatgggtttgcataaaatcccaacaccaagcctgctatgcccctcagcataatttggctactcctatatgcatgaagtgtgcctaccctcaaagggtttcatagtatgttttgtttgttgtatagaatgatgcattggtgtagttgtattagcatacaggaacgaaagggtgatggtgtaagtgtttacagcttgtgttcaaaatatagaaaaagtaatattctttgtgtaattaactcttgtaattcttcccatgggtgcgagttattagattgttgcgtagtgtgatgtaatggctttcctttgttgagcttttggtatggaagaaccgactgcaggctatggctgtatgctttattgatttgtatggttggaacttggaaacatgatattcggttgatagactgcgttctctgcagctgatccggcactaagtttggtgtccattttcagaataaaattcatgtatttcccaggcc

SEQ ID NO: 27398 - DNA, 2798 bp, Zea Mays
cagcttctcacccaccccggcccggcagccaatctgtcatccatcacgtcgcgtgccgtgcgtcaccccctcccttcgcctcgcttcaaaaatccctccgttggcgcccaagtaccaaaccctagcctcgtccgggcccgccccctctggccggccgggcggaacatgcgaatgcggccatggcgaccggggccgatctgacctccccaaccggcgccgctgcggcagcggccgccgccaggaaggaccgccacatcgtcagttggagctccgaggaggatggcgtgcttcgtgctcaaatcgctcttcatggcactgataactggacaattatagcggcacaattcaaggacaagacggccagacagtgcaggagaagatggtacaattatttgaactcagagtgcaagaaaggtgggtggtccagggaagaggatatgcttttgtgtgaggctcaaaaagttcttggaaacaagtggactgaaattgcaaaagttgtttcaggaagacaatgcagtgaagaaccggttttctactctatgcaaaaggagggctaaggatgacgagctataccaagaaaatggtgtgccatgttccaacacaaatgcaaagaaggttctcactgaaacaggacgcctcacaccaggcggagctggctctttggtacatattaagcagacgaggtcttccagttataatttgaaggagaaccttgtaccaaatatgaaattatttgaactagagaagagcacacaagatgccaggcaacctcttgctaccatttcttcgaacaaccaagataacgtgaatacagttaaatctcaaaatcttgtcccaaccacaaaacaattgttaggtccagaacaacattgtgtgaagcgggagggtaattttctgaagaaggatgacccaaaagttgctactttattacagcaatctgactttctttgctcccttgcaacaaaaatcaaaagtgacaatacaagtaaaagcatggatgaagcatggcaggtatgtatggctacaccaactttatgttacaaacttctcagcttaaaactcttggcgctttattgataggtaactgtttttatcccggacattttcagcaactgcaagatcatttagtgaaaaaagagcacaacaaagtgccagaaaacagtgggtctgaaatagcttcacttttagaggagcttgatgatttaattgtagacccctatgagaggaaagatgaagatgaacagaagctaaggttatttatgaataaacactcaattttttgtcaaatatgtcgcttcagttgttgacccatcattatttccaatgcaaagcgagcacaatggacggaccgatgtggacaatgatcactgtaacggttcttcacaaactagcatagtagtaacgacaaatatggtcccagaggaaatgatgggagattgtccagtcgataactgcaatgaggatagtagtctttgtagaaaagtgctttctggaagtacagaaccttgcccaggtgcaaaaatgacaggatgtgggaatttgagcgaagaccaggttgctgaaggtagtgtgcttcaacgtgtagaatctatatctcctgttataacagatattgatgatttactcgtagacccgtatgagagtgaagcggaagatgaagaaaagtcaggggagcagaatggacagattgatgtgcatgctgagcagtgttttggttcttctcaaactatcatagaagtgatatcagacatggcccctgatgaagtcatggaaacttgttcagcagataaccgcgaagaacatagtagcatttgccgaaatgtgctttctggaagtatggcaccttgcccaggtgcagaaataccaacatctgaaaaaatgagtgaacttgctgaagatagcagacttcaatgtatggagtttgcatctcccgttctggcaaattttgcgagcaaggaatgtggagaaacaccagaaccacaagttcttaatgagattgttgaagatagcaggcttcaatgtattgaattcaactccccggctcacacaattctcccagataaaacaggcgccgaaaactttgcatccccaagttttgatgtggttgcaaaagatagtaagcctccgtctttggaattcacatcccctgctcatacagttgcaacattccaaccgtatgcagacggcatccctaccccaaaattcactgctagtgagaggagttttctgctgtcagttttagagctgacctcaccagggtcaaggcctgaaacttctcagcagccatcttgcaaaagggctcttcttaatagcctttgaaatgggtttgcataaaatcccaacaccaagcctgctatgcccctcagcataatttggctactcctatatgcatgaagtgtgcctaccctcaaagggtttcatagtatgttttgtttgttgtatagaatgatgcattggtgtagttgtattagcatacaggaacgaaagggtgatggtgtaagtgtttacagcttgtgttcaaaatatagaaaaagtaatattctttgtgtaattaactcttgtaattcttcccatgggtgcgagttattagattgttgcgtagtgtgatgtaatggctttcctttgttgagcttttggtatggaagaaccgactgcaggctatggctgtatgctttattgatttgtatggttggaacttggaaacatgatattcggttgatagactgcgttctctgcagctgatccggcactaagtttggtgtccattttcagaataaaattcatgtatttcccaggcc

SEQ ID NO: 27399 - DNA, 2451 bp, Zea Mays
ctcctcagttcctcagcttctcacccaccccggcccggcagccaatctgtcatccatcacgtcgcgtgccgtgcgtcaccccctcccttcgcctcgcttcaaaaatccctccgttggcgcccaagtaccaaaccctagcctcgtccgggcccgccccctctggccggccgggcggaacatgcgaatgcggccatggcgaccggggccgatctgacctccccaaccggcgccgctgcggcagcggccgccgccaggaaggaccgccacatcgtcagttggagctccgaggaggatggcgtgcttcgtgctcaaatcgctcttcatggcactgataactggacaattatagcggcacaattcaaggacaagacggccagacagtgcaggagaagatggtacaattatttgaactcagagtgcaagaaaggtgggtggtccagggaagaggatatgcttttgtgtgaggctcaaaaagttcttggaaacaagtggactgaaattgcaaaagttgtttcaggaagaacagacaatgcagtgaagaaccggttttctactctatgcaaaaggagggctaaggatgacgagctataccaagaaaatggtgtgccatgttccaacacaaatgcaaagaaggttctcactgaaacaggacgcctcacaccaggcggagctggctctttggtacatattaagcagacgaggtgtgaagcgggagggtaattttctgaagaaggatgacccaaaagttgctactttattacagcaatctgactttctttgctcccttgcaacaaaaatcaaaagtgacaatacaagtaaaagcatggatgaagcatggcagcaactgcaagatcatttagtgaaaaaagagcacaacaaagtgccagaaaacagtgggtctgaaatagcttcacttttagaggagcttgatgatttaattgtagacccctatgagaggaaagatgaagatgaacagaagctaagcgagcacaatggacggaccgatgtggacaatgatcactgtaacggttcttcacaaactagcatagtagtaacgacaaatatggtcccagaggaaatgatgggagattgtccagtcgataactgcaatgaggatagtagtctttgtagaaaagtgctttctggaagtacagaaccttgcccaggtgcaaaaatgacaggatgtgggaatttgagcgaagaccaggttgctgaaggtagtgtgcttcaacgtgtagaatctatatctcctgttataacagatattgatgatttactcgtagacccgtatgagagtgaagcggaagatgaagaaaagtcaggggagcagaatggacagattgatgtgcatgctgagcagtgttttggttcttctcaaactatcatagaagtgatatcagacatggcccctgatgaagtcatggaaacttgttcagcagataaccgcgaagaacatagtagcatttgccgaaatgtgctttctggaagtatggcaccttgcccaggtgcagaaataccaacatctgaaaaaatgagtgaacttgctgaagatagcagacttcaatgtatggagtttgcatctcccgttctggcaaattttgcgagcaaggaatgtggagaaacaccagaaccacaagttcttaatgagattgttgaagatagcaggcttcaatgtattgaattcaactccccggctcacacaattctcccagataaaacaggcgccgaaaactttgcatccccaagttttgatgtggttgcaaaagatagtaagcctccgtctttggaattcacatcccctgctcatacagttgcaacattccaaccgtatgcagacggcatccctaccccaaaattcactgctagtgagaggagttttctgctgtcagttttagagctgacctcaccagggtcaaggcctgaaacttctcagcagccatcttgcaaaagggctcttcttaatagcctttgaaatgggtttgcataaaatcccaacaccaagcctgctatgcccctcagcataatttggctactcctatatgcatgaagtgtgcctaccctcaaagggtttcatagtatgttttgtttgttgtatagaatgatgcattggtgtagttgtattagcatacaggaacgaaagggtgatggtgtaagtgtttacagcttgtgttcaaaatatagaaaaagtaatattctttgtgtaattaactcttgtaattcttcccatgggtgcgagttattagattgttgcgtagtgtgatgtaatggctttcctttgttgagcttttggtatggaagaaccgactgcaggctatggctgtatgctttattgatttgtatggttggaacttggaaacatgatattcggttgatagactgcgttctctgcagctgatccggcactaagtttggtgtccattttcagaataaaattcatgtatttcccaggcc

SEQ ID NO: 27400 - DNA, 2552 bp, Zea Mays
aaaaaattcctctcctcagttcctcagcttctcacccaccccggcccggcagccaatctgtcatccatcacgtcgcgtgccgtgcgtcaccccctcccttcgcctcgcttcaaaaatccctccgttggcgcccaagtaccaaaccctagcctcgtccgggcccgccccctctggccggccgggcggaacatgcgaatgcggccatggcgaccggggccgatctgacctccccaaccggcgccgctgcggcagcggccgccgccaggaaggaccgccacatcgtcagttggagctccgaggaggatggcgtgcttcgtgctcaaatcgctcttcatggcactgataactggacaattatagcggcacaattcaaggacaagacggccagacagtgcaggagaagatggtacaattatttgaactcagagtgcaagaaaggtgggtggtccagggaagaggatatgcttttgtgtgaggctcaaaaagttcttggaaacaagtggactgaaattgcaaaagttgtttcaggaagaacagacaatgcagtgaagaaccggttttctactctatgcaaaaggagggctaaggatgacgagctataccaagaaaatggtgtgccatgttccaacacaaatgcaaagaaggttctcactgaaacaggacgcctcacaccaggcggagctggctctttggtacatattaagcagacgaggtcttccagttataatttgaaggagaaccttgtaccaaatatgaaattatttgaactagagaagagcacacaagatgccaggcaacctcttgctaccatttcttcgaacaaccaagataacgtgaatacagttaaatctcaaaatcttgtcccaaccacaaaacaattgttaggtccagaacaacattgtgtgaagcgggagggtaattttctgaagaaggatgacccaaaagttgctactttattacagcaatctgactttctttgctcccttgcaacaaaaatcaaaagtgacaatacaagtaaaagcatggatgaagcatggcagcaactgcaagatcatttagtgaaaaaagagcacaacaaagtgccagaaaacagtgggtctgaaatagcttcacttttagaggagcttgatgatttaattgtagacccctatgagaggaaagatgaagatgaacagaagctaagcgagcacaatggacggaccgatgtggacaatgatcactgtaacggttcttcacaaactagcatagtagtaacgacaaatatggtcccagaggaaatgatgggagattgtccagtcgataactgcaatgaggatagtagtctttgtagaaaagtgctttctggaagtacagaaccttgcccaggtgcaaaaatgacaggatgtgggaatttgagcgaagaccaggttgctgaaggtagtgtgcttcaacgtgtagaatctatatctcctgttataacagatattgatgatttactcgtagacccgtatgagagtgaagcggaagatgaagaaaagtcaggggagcagaatggacagattgatgtgcatgctgagcagtgttttggttcttctcaaactatcatagaagtgatatcagacatggcccctgatgaagtcatggaaacttgttcagcagataaccgcgaagaacatagtagcatttgccgaaatgtgctttctggaagtatggcaccttgcccaggtgcagaaataccaacatctgaaaaaatgagtgaacttgctgaagatagcagacttcaatgtatggagtttgcatctcccgttctggcaaattttgcgagcaaggaatgtggagaaacaccagaaccacaagttcttaatgagattgttgaagatagcaggcttcaatgtattgaattcaactccccggctcacacaattctcccagataaaacaggcgccgaaaactttgcatccccaagttttgatgtggttgcaaaagatagagaggagttttctgctgtcagttttagagctgacctcaccagggtcaaggcctgaaacttctcagcagccatcttgcaaaagggctcttcttaatagcctttgaaatgggtttgcataaaatcccaacaccaagcctgctatgcccctcagcataatttggctactcctatatgcatgaagtgtgcctaccctcaaagggtttcatagtatgttttgtttgttgtatagaatgatgcattggtgtagttgtattagcatacaggaacgaaagggtgatggtgtaagtgtttacagcttgtgttcaaaatatagaaaaagtaatattctttgtgtaattaactcttgtaattcttcccatgggtgcgagttattagattgttgcgtagtgtgatgtaatggctttcctttgttgagcttttggtatggaagaaccgactgcaggctatggctgtatgctttattgatttgtatggttggaacttggaaacatgatattcggttgatagactgcgttctctgcagctgatccggcactaagtttggtgtccattttcagaataaaattcatgtatttcccaggcc

SEQ ID NO: 27401 - DNA, 2680 bp, Zea Mays
ccactgcaaaaaattcctctcctcagttcctcagcttctcacccaccccggcccggcagccaatctgtcatccatcacgtcgcgtgccgtgcgtcaccccctcccttcgcctcgcttcaaaaatccctccgttggcgcccaagtaccaaaccctagcctcgtccgggcccgccccctctggccggccgggcggaacatgcgaatgcggccatggcgaccggggccgatctgacctccccaaccggcgccgctgcggcagcggccgccgccaggaaggaccgccacatcgtcagttggagctccgaggaggatggcgtgcttcgtgctcaaatcgctcttcatggcactgataactggacaattatagcggcacaattcaaggacaagacggccagacagtgcaggagaaggtgtgcacactgttctaatagaggaaacattgatggtacaattatttgaactcagagtgcaagaaaggtgggtggtccagggaagaggatatgcttttgtgtgaggctcaaaaagttcttggaaacaagtggactgaaattgcaaaagttgtttcaggaagaacagacaatgcagtgaagaaccggttttctactctatgcaaaaggagggctaaggatgacgagctataccaagaaaatggtgtgccatgttccaacacaaatgcaaagaaggttctcactgaaacaggacgcctcacaccaggcggagctggctctttggtacatattaagcagacgagttataatttgaaggagaaccttgtaccaaatatgaaattatttgaactagagaagagcacacaagatgccaggcaacctcttgctaccatttcttcgaacaaccaagataacgtgaatacagttaaatctcaaaatcttgtcccaaccacaaaacaattgttaggtccagaacaacattgtgtgaagcgggagggtaattttctgaagaaggatgacccaaaagttgctactttattacagcaatctgactttctttgctcccttgcaacaaaaatcaaaagtgacaatacaagtaaaagcatggatgaagcatggcagcaactgcaagatcatttagtgaaaaaagagcacaacaaagtgccagaaaacagtgggtctgaaatagcttcacttttagaggagcttgatgatttaattgtagacccctatgagaggaaagatgaagatgaacagaagctaagcgagcacaatggacggaccgatgtggacaatgatcactgtaacggttcttcacaaactagcatagtagtaacgacaaatatggtcccagaggaaatgatgggagattgtccagtcgataactgcaatgaggatagtagtctttgtagaaaagtgctttctggaagtacagaaccttgcccaggtgcaaaaatgacaggatgtgggaatttgagcgaagaccaggttgctgaaggtagtgtgcttcaacgtgtagaatctatatctcctgttataacagatattgatgatttactcgtagacccgtatgagagtgaagcggaagatgaagaaaagtcaggggagcagaatggacagattgatgtgcatgctgagcagtgttttggttcttctcaaactatcatagaagtgatatcagacatggcccctgatgaagtcatggaaacttgttcagcagataaccgcgaagaacatagtagcatttgccgaaatgtgctttctggaagtatggcaccttgcccaggtgcagaaataccaacatctgaaaaaatgagtgaacttgctgaagatagcagacttcaatgtatggagtttgcatctcccgttctggcaaattttgcgagcaaggaatgtggagaaacaccagaaccacaagttcttaatgagattgttgaagatagcaggcttcaatgtattgaattcaactccccggctcacacaattctcccagataaaacaggcgccgaaaactttgcatccccaagttttgatgtggttgcaaaagatagtaagcctccgtctttggaattcacatcccctgctcatacagttgcaacattccaaccgtatgcagacggcatccctaccccaaaattcactgctagtgagaggagttttctgctgtcagttttagagctgacctcaccagggtcaaggcctgaaacttctcagcagccatcttgcaaaagggctcttcttaatagcctttgaaatgggtttgcataaaatcccaacaccaagcctgctatgcccctcagcataatttggctactcctatatgcatgaagtgtgcctaccctcaaagggtttcatagtatgttttgtttgttgtatagaatgatgcattggtgtagttgtattagcatacaggaacgaaagggtgatggtgtaagtgtttacagcttgtgttcaaaatatagaaaaagtaatattctttgtgtaattaactcttgtaattcttcccatgggtgcgagttattagattgttgcgtagtgtgatgtaatggctttcctttgttgagcttttggtatggaagaaccgactgcaggctatggctgtatgctttattgatttgtatggttggaacttggaaacatgatattcggttgatagactgcgttctctgcagctgatccggcactaagtttggtgtccattttcagaataaaattcatgtatttcccaggcc

SEQ ID NO: 27402 - DNA, 2543 bp, Zea Mays
cccactgcaaaaaattcctctcctcagttcctcagcttctcacccaccccggcccggcagccaatctgtcatccatcacgtcgcgtgccgtgcgtcaccccctcccttcgcctcgcttcaaaaatccctccgttggcgcccaagtaccaaaccctagcctcgtccgggcccgccccctctggccggccgggcggaacatgcgaatgcggccatggcgaccggggccgatctgacctccccaaccggcgccgctgcggcagcggccgccgccaggaaggaccgccacatcgtcagttggagctccgaggaggatggcgtgcttcgtgctcaaatcgctcttcatggcactgataactggacaattatagcggcacaattcaaggacaagacggccagacagtgcaggagaagatggtacaattatttgaactcagagtgcaagaaaggtgggtggtccagggaagaggatatgcttttgtgtgaggctcaaaaagttcttggaaacaagtggactgaaattgcaaaagttgtttcaggaagaacagacaatgcagtgaagaaccggttttctactctatgcaaaaggagggctaaggatgacgagctataccaagaaaatggtgtgccatgttccaacacaaatgcaaagaaggttctcactgaaacaggacgcctcacaccaggcggagctggctctttggtacatattaagcagacgagttataatttgaaggagaaccttgtaccaaatatgaaattatttgaactagagaagagcacacaagatgccaggcaacctcttgctaccatttcttcgaacaaccaagataacgtgaatacagttaaatctcaaaatcttgtcccaaccacaaaacaattgttaggtccagaacaacattgtgtgaagcgggagggtaattttctgaagaaggatgacccaaaagttgctactttattacagcaatctgactttctttgctcccttgcaacaaaaatcaaaagtgacaatacaagtaaaagcatggatgaagcatggcagcaactgcaagatcatttagtgaaaaaagagcacaacaaagtgccagaaaacagtgggtctgaaatagcttcacttttagaggagcttgatgatttaattgtagacccctatgagaggaaagatgaagatgaacagaagctaagcgagcacaatggacggaccgatgtggacaatgatcactgtaacggttcttcacaaactagcatagtagtaacgacaaatatggtcccagaggaaatgatgggagattgtccagtcgataactgcaatgaggatagtagtctttgtagaaaagtgctttctggaagtacagaaccttgcccaggtgcaaaaatgacaggatgtgggaatttgagcgaagaccaggttgctgaagggagcagaatggacagattgatgtgcatgctgagcagtgttttggttcttctcaaactatcatagaagtgatatcagacatggcccctgatgaagtcatggaaacttgttcagcagataaccgcgaagaacatagtagcatttgccgaaatgtgctttctggaagtatggcaccttgcccaggtgcagaaataccaacatctgaaaaaatgagtgaacttgctgaagatagcagacttcaatgtatggagtttgcatctcccgttctggcaaattttgcgagcaaggaatgtggagaaacaccagaaccacaagttcttaatgagattgttgaagatagcaggcttcaatgtattgaattcaactccccggctcacacaattctcccagataaaacaggcgccgaaaactttgcatccccaagttttgatgtggttgcaaaagatagtaagcctccgtctttggaattcacatcccctgctcatacagttgcaacattccaaccgtatgcagacggcatccctaccccaaaattcactgctagtgagaggagttttctgctgtcagttttagagctgacctcaccagggtcaaggcctgaaacttctcagcagccatcttgcaaaagggctcttcttaatagcctttgaaatgggtttgcataaaatcccaacaccaagcctgctatgcccctcagcataatttggctactcctatatgcatgaagtgtgcctaccctcaaagggtttcatagtatgttttgtttgttgtatagaatgatgcattggtgtagttgtattagcatacaggaacgaaagggtgatggtgtaagtgtttacagcttgtgttcaaaatatagaaaaagtaatattctttgtgtaattaactcttgtaattcttcccatgggtgcgagttattagattgttgcgtagtgtgatgtaatggctttcctttgttgagcttttggtatggaagaaccgactgcaggctatggctgtatgctttattgatttgtatggttggaacttggaaacatgatattcggttgatagactgcgttctctgcagctgatccggcactaagtttggtgtccattttcagaataaaattcatgtatttcccaggcc

SEQ ID NO: 27403 - DNA, 2612 bp, Zea Mays
caccttttaaaacccaccaccccactgcaaaaaattcctctcctcagttcctcagcttctcacccaccccggcccggcagccaatctgtcatccatcacgtcgcgtgccgtgcgtcaccccctcccttcgcctcgcttcaaaaatccctccgttggcgcccaagtaccaaaccctagcctcgtccgggcccgccccctctggccggccgggcggaacatgcgaatgcggccatggcgaccggggccgatctgacctccccaaccggcgccgctgcggcagcggccgccgccaggaaggaccgccacatcgtcagttggagctccgaggaggatggcgtgcttcgtgctcaaatcgctcttcatggcactgataactggacaattatagcggcacaattcaaggacaagacggccagacagtgcaggagaagatggtacaattatttgaactcagagtgcaagaaaggtgggtggtccagggaagaggatatgcttttgtgtgaggctcaaaaagttcttggaaacaagtggactgaaattgcaaaagttgtttcaggaagaacagacaatgcagtgaagaaccggttttctactctatgcaaaaggagggctaaggatgacgagctataccaagaaaatggtgtgccatgttccaacacaaatgcaaagaaggttctcactgaaacaggacgcctcacaccaggcggagctggctctttggtacatattaagcagacgaggtcttccagttataatttgaaggagaaccttgtaccaaatatgaaattatttgaactagagaagagcacacaagatgccaggcaacctcttgctaccatttcttcgaacaaccaagataacgtgaatacagttaaatctcaaaatcttgtcccaaccacaaaacaattgttaggtccagaacaacattgtgtgaagcgggagggtaattttctgaagaaggatgacccaaaagttgctactttattacagcaatctgactttctttgctcccttgcaacaaaaatcaaaagtgacaatacaagtaaaagcatggatgaagcatggcagcaactgcaagatcatttagtgaaaaaagagcacaacaaagtgccagaaaacagtgggtctgaaatagcttcacttttagaggagcttgatgatttaattgtagacccctatgagaggaaagatgaagatgaacagaagctaagcgagcacaatggacggaccgatgtggacaatgatcactgtaacggttcttcacaaactagcatagtagtaacgacaaatatggtcccagaggaaatgatgggagattgtccagtcgataactgcaatgaggatagtagtctttgtagaaaagtgctttctggaagtacagaaccttgcccaggtgcaaaaatgacaggatgtgggaatttgagcgaagaccaggttgctgaagacccgtatgagagtgaagcggaagatgaagaaaagtcaggggagcagaatggacagattgatgtgcatgctgagcagtgttttggttcttctcaaactatcatagaagtgatatcagacatggcccctgatgaagtcatggaaacttgttcagcagataaccgcgaagaacatagtagcatttgccgaaatgtgctttctggaagtatggcaccttgcccaggtgcagaaataccaacatctgaaaaaatgagtgaacttgctgaagatagcagacttcaatgtatggagtttgcatctcccgttctggcaaattttgcgagcaaggaatgtggagaaacaccagaaccacaagttcttaatgagattgttgaagatagcaggcttcaatgtattgaattcaactccccggctcacacaattctcccagataaaacaggcgccgaaaactttgcatccccaagttttgatgtggttgcaaaagatagtaagcctccgtctttggaattcacatcccctgctcatacagttgcaacattccaaccgtatgcagacggcatccctaccccaaaattcactgctagtgagaggagttttctgctgtcagttttagagctgacctcaccagggtcaaggcctgaaacttctcagcagccatcttgcaaaagggctcttcttaatagcctttgaaatgggtttgcataaaatcccaacaccaagcctgctatgcccctcagcataatttggctactcctatatgcatgaagtgtgcctaccctcaaagggtttcatagtatgttttgtttgttgtatagaatgatgcattggtgtagttgtattagcatacaggaacgaaagggtgatggtgtaagtgtttacagcttgtgttcaaaatatagaaaaagtaatattctttgtgtaattaactcttgtaattcttcccatgggtgcgagttattagattgttgcgtagtgtgatgtaatggctttcctttgttgagcttttggtatggaagaaccgactgcaggctatggctgtatgctttattgatttgtatggttggaacttggaaacatgatattcggttgatagactgcgttctctgcagctgatccggcactaagtttggtgtccattttcagaataaaattcatgtatttcccaggcc

SEQ ID NO: 27404 - DNA, 943 bp, Zea Mays
ctagggtttacatcccttataaaatctcgtcttccacccccgcctcgctcagtcgcacttcctccggcggcggcaactcgacggccaaccgcgccaccctgccgcggcagccatggtgcatgttaacttctaccgcaactatgggaagactttcaagaagccaaggcggccgtatgagaaggagcgcctagatgctgagctgaagctggttgccagggagttgctcaccctggatgagaagaacccacgccgtatctttgagggcgaggcgctcctccgtcgcatgaacagatatggtcttcttggcgagggacagaacaagcttgattacgtgcttgccctcactgttgagaacttcctccagcgccgcctccagaccatcgtcttcaagaatggcatggccaagtccatccaccatgctcgtgtcctgatcaggcagcgccacatcagggtgggaaggcagctcgtcaacatcccctcgttcatggtcagggtcgaatcagagaagcacatcgacttctccctcaccagccctctgggtggtggtcctgccggaagggtgaagcggaagaaccagaagaaggcctcagggggcggcgacgctgaggaggacgaggagtagagggccacgtagggattctgcgaccgcaattggttgaaatgtgaggtggacactttagttgttgtgcctgagtgtgtttgttcattgtaatgaattcagaaattctactgtggtagacaattttgcacccccactactgacactcctgtttaaatttaaacattggcatcgtgtctagacaggatgaattgtattctggtttggccgtttgggtggctatttgctagtttggtctttaggccaatgtttaagactgaaacaaattggtagccaactttactttattatgctctgctggtctgtttggtgatttttttttac

SEQ ID NO: 27405 - DNA, 1865 bp, Zea Mays
agcaattgttctcaccctcgccctcttcctcgtatccactcgcgaaaatagccaaagagcacattcccttacctgccatggcgatccatccccggaccaccggcggtcgcaggcagccgctgccgctacccctgaagggggccctcctagccgccatcgctgtcgcgacggctctctccgtcctgttcgtcctgtccttcacggacacgctgaccttcacggacacgctgccctacctggggttccggccccgggacgtcgacaagagggacggcaaccggaggtacctctactggggaagccgcgtagactgccccggcaagcactgcggctcctgcgcgggcctcgggcaccaggagtccagcctccgctgcgccctcgaggaggccctcttcctcgacagggtgcttgtcatgcctgcaaagatgtgtctcagttcagtgcacaatacaaagggggtccttcaatcaagcaatgcaacttcacaacaaaggtgggaaacaggttcttgtgcaatggaatccttatacgatattgacctcatatcaagaaccgtacctgttattttggataatccacggtcatggtacgagataatatcaagaagtacaaaactcggtgaggatggcttggtggtgcatgtgcaaggggttagcagagctgaactcaaacaaaattcaaattactctggtgctctcctcataaaccgcacagcaagtcctcttgcttgttcaggtttatggagtgcaaggaccggaccaagcggagttctgtgatgttgccatacacttttctgccaacaatggcaacaaggaaactgagggatgcagcaaacaagatgaaagagatacttggtgactatgatgctattcatgtgagacgaggtgacctactgaagaataggaaagatagatttggagttgagcgaagtcttcatcctcatcttgacagagatactcgccctgagtttatcaagaaaagaatcgcaaagtggattcgaccaggtcgcactcttttcatttcctcaaatgaaaggaccccaggcttcttttcatctctatcagacaagctggcatattcatctaacttcagcagcatattgaatccgatagtcaagaacaactatcagctgttcatggtggaaaggttgataatgcaaggtgcgaggacgtttgtgaagacaatgaaagagttcgatgaagatcttgctctctgcgacgatccaaaaaagaataccaaagactggcgggaaccagtttatacagatgactgacggcagctgttttgtattcatagatgcttaggtccaactatatcaacgacatcaacaactaaactttttagtcccaagcaagttgggtctaactgtatcactgatcttaaaggtttcacaaagatgaccaattacatgccatttatgagatgacataatagcttgagatggatgcatgaactatatatggcatgacaggagaggaacagagaaagcgaatgttgtctgaagtctaagcttgaacatcagatgtgactgctcttttgttcagctacagtgttcaattggattgttttacttcatttgttttaaaaaaagtttactaggtggtgggagactgtcgtgtatgtatagcatgtaactgctgttggaggagctatcaactggaatactggatgagatacattacttgctgcttctgttgctatttgtacttgtgttaacagcatcagttatactagctctgtcattcctagaaaaagagagaatgtggagcatcttgtcttatttctagtgatgtagaaattcgtgttagcgacacagtgatatatgtaatgtataatcaataagctataggatatttagcagggag

SEQ ID NO: 27406 - DNA, 2424 bp, Zea Mays
agcaattgttctcaccctcgccctcttcctcgtatccactcgcgaaaatagccaaagagcacattcccttacctgccatggcgatccatccccggaccaccggcggtcgcaggcagccgctgccgctacccctgaagggggccctcctagccgccatcgctgtcgcgacggctctctccgtcctgttcgtcctgtccttcacggacacgctgaccttcacggacacgctgccctacctggggttccggccccgggacgtcgacaagagggacggcaaccggaggtacctctactggggaagccgcgtagactgccccggcaagcactgcggctcctgcgcgggcctcgggcaccaggagtccagcctccgctgcgccctcgaggaggccctcttcctcgacagggtgcttgtcatgcctgcaaagatgtgtctcagttcagtgcacaatacaaagggggtccttcaatcaagcaatgcaacttcacaacaaaggtgggaaacaggttcttgtgcaatggaatccttatacgatattgacctcatatcaagaaccgtacctgttattttggataatccacggtcatggtacgagataatatcaagaagtacaaaactcggtgaggatggcttggtggtgcatgtgcaaggggttagcagagctgaactcaaacaaaattcaaattactctggtgctctcctcataaaccgcacagcaagtcctcttgcttggtttatggagtgcaaggaccggaccaagcggagttctgtgatgttgccatacacttttctgccaacaatggcaacaaggaaactgagggatgcagcaaacaagatgaaagagatacttggtgactatgatgctattcatgtgagacgaggtgacctactgaagaataggaaagatagatttggagttgagcgaagtcttcatcctcatcttgacagagatactcgccctgagtttatcaagaaaagaatcgcaaagtggattcgaccaggtcgcactcttttcatttcctcaaatgaaaggaccccaggcttcttttcatctctatcagacaagtaagactgataccgtgtacctactctttttgcacatgttggcttcttttcatctctgacagacaaataatattggcaccccacacctactcttcttgcacctgtatcccatacatcaataaaaatttgaggacgtcgctccattggtgtatatacgccccgtagctgtcttaatagatggaaataccagaccctctggagtttgggcaacttgtgagcgtcctggtttgagcctgggagagctgtctctcaactagatgttgtaccaaactatgctttggttctagtatgtattactgcttgaccaatgcttaatgatttctattattttcaggaactgtattcctgaatgattacctaagtaatatatttcaaatgtttaaaatatcccctgagtgatggatggtttcatctttcccaagtaactatcaccatggactgctaatataaaagtaatatttgcacagcagtcagcaatgcagcattatatttgcatgtgctctcttgagacaagctatgacattgtttgtctcttatggtggcacgttgtgcatgcaggtacaggctggcatattcatctaacttcagcagcatattgaatccgatagtcaagaacaactatcagctgttcatggtggaaaggttgataatgcaaggtgcgaggacgtttgtgaagacaatgaaagagttcgatgaagatcttgctctctgcgacgatccaaaaaagaataccaaagactggcgggaaccagtttatacagatgactgacggcagctgttttgtattcatagatgcttaggtccaactatatcaacgacatcaacaactaaactttttagtcccaagcaagttgggtctaactgtatcactgatcttaaaggtttcacaaagatgaccaattacatgccatttatgagatgacataatagcttgagatggatgcatgaactatatatggcatgacaggagaggaacagagaaagcgaatgttgtctgaagtctaagcttgaacatcagatgtgactgctcttttgttcagctacagtgttcaattggattgttttacttcatttgttttaaaaaaagtttactaggtggtgggagactgtcgtgtatgtatagcatgtaactgctgttggaggagctatcaactggaatactggatgagatacattacttgctgcttctgttgctatttgtacttgtgttaacagcatcagttatactagctctgtcattcctagaaaaagagagaatgtggagcatcttgtcttatttctagtgatgtagaaattcgtgttagcgacacagtgatatatgtaatgtataatcaataagctataggatatttagcagggag

SEQ ID NO: 27407 - DNA, 2429 bp, Zea Mays
agcaattgttctcaccctcgccctcttcctcgtatccactcgcgaaaatagccaaagagcacattcccttacctgccatggcgatccatccccggaccaccggcggtcgcaggcagccgctgccgctacccctgaagggggccctcctagccgccatcgctgtcgcgacggctctctccgtcctgttcgtcctgtccttcacggacacgctgaccttcacggacacgctgccctacctggggttccggccccgggacgtcgacaagagggacggcaaccggaggtacctctactggggaagccgcgtagactgccccggcaagcactgcggctcctgcgcgggcctcgggcaccaggagtccagcctccgctgcgccctcgaggaggccctcttcctcgacagggtgcttgtcatgcctgcaaagatgtgtctcagttcagtgcacaatacaaagggggtccttcaatcaagcaatgcaacttcacaacaaaggtgggaaacaggttcttgtgcaatggaatccttatacgatattgacctcatatcaagaaccgtacctgttattttggataatccacggtcatggtacgagataatatcaagaagtacaaaactcggtgaggatggcttggtggtgcatgtgcaaggggttagcagagctgaactcaaacaaaattcaaattactctggtgctctcctcataaaccgcacagcaagtcctcttgcttgttcaggtttatggagtgcaaggaccggaccaagcggagttctgtgatgttgccatacacttttctgccaacaatggcaacaaggaaactgagggatgcagcaaacaagatgaaagagatacttggtgactatgatgctattcatgtgagacgaggtgacctactgaagaataggaaagatagatttggagttgagcgaagtcttcatcctcatcttgacagagatactcgccctgagtttatcaagaaaagaatcgcaaagtggattcgaccaggtcgcactcttttcatttcctcaaatgaaaggaccccaggcttcttttcatctctatcagacaagtaagactgataccgtgtacctactctttttgcacatgttggcttcttttcatctctgacagacaaataatattggcaccccacacctactcttcttgcacctgtatcccatacatcaataaaaatttgaggacgtcgctccattggtgtatatacgccccgtagctgtcttaatagatggaaataccagaccctctggagtttgggcaacttgtgagcgtcctggtttgagcctgggagagctgtctctcaactagatgttgtaccaaactatgctttggttctagtatgtattactgcttgaccaatgcttaatgatttctattattttcaggaactgtattcctgaatgattacctaagtaatatatttcaaatgtttaaaatatcccctgagtgatggatggtttcatctttcccaagtaactatcaccatggactgctaatataaaagtaatatttgcacagcagtcagcaatgcagcattatatttgcatgtgctctcttgagacaagctatgacattgtttgtctcttatggtggcacgttgtgcatgcaggtacaggctggcatattcatctaacttcagcagcatattgaatccgatagtcaagaacaactatcagctgttcatggtggaaaggttgataatgcaaggtgcgaggacgtttgtgaagacaatgaaagagttcgatgaagatcttgctctctgcgacgatccaaaaaagaataccaaagactggcgggaaccagtttatacagatgactgacggcagctgttttgtattcatagatgcttaggtccaactatatcaacgacatcaacaactaaactttttagtcccaagcaagttgggtctaactgtatcactgatcttaaaggtttcacaaagatgaccaattacatgccatttatgagatgacataatagcttgagatggatgcatgaactatatatggcatgacaggagaggaacagagaaagcgaatgttgtctgaagtctaagcttgaacatcagatgtgactgctcttttgttcagctacagtgttcaattggattgttttacttcatttgttttaaaaaaagtttactaggtggtgggagactgtcgtgtatgtatagcatgtaactgctgttggaggagctatcaactggaatactggatgagatacattacttgctgcttctgttgctatttgtacttgtgttaacagcatcagttatactagctctgtcattcctagaaaaagagagaatgtggagcatcttgtcttatttctagtgatgtagaaattcgtgttagcgacacagtgatatatgtaatgtataatcaataagctataggatatttagcagggag

SEQ ID NO: 27408 - DNA, 2021 bp, Zea Mays
gacggttttaattaaaatcaaagacactagagaaatttaatcaatatgacaagagatataaattctctagctatgacaactaagcaaactatgatgaacaattatggcaatgctagaaatgatagacaatacacaaattactaactacttgcaagtaatagatatataaattgtgaattgtgaggcggattataaatagaagtggagctcgtgtgtgaggactctcttggccattcctagcacacattgagctcatttgtgatcctctaactcattctctcatactctttgtttgggattgcattctaatgagagattgagtgttcctagtgtaattgcatccattggtgatcattgaggcactaggtggtacatcgagcaagcgtcattggcttgttactcttggagattgtcgcctcctagacggctcgggtgttgtctccgtcaagctctccgtgaagattgtggaggagctacgatgttgattgtgaggagttcgcgcctacctcgccagagcggcaaaggcggcgctagtggaatcgaggtattgagtgatttcttgtccacttggctcaaagatcaagccgtgtcttgatagaggagcaactgagagcttgaagccgacctcaacgtggattaggggtgatcagcaaatcaccgataccacgggataaaactcggtgtcattctcttcactctttacttattactttgcaagtagttagtaatttgtgtattgtatctcatttctagcattgccataattgttcatcgtagtttgcttggttgtcatagctaaagaatttatatcttatcgtattgattaaatttctctagtgtctttgattttagttaaaaccgtctattcacccccctctagccggtgtcctagatcctacagctagtgatgtcgccattgtatactgcgcagttcccattggggccaacacataggaggggattggggatggtgacgctggcatcagcaataggtgcaagggcatgcctagcgtggtggtgggtgaaaggctatagagtggtggtgatgggacaatggtggaaggtgggtatggtaatcgtgatgccgtcaggaaggcctgcatggtcgccataaatcttgccagctcctggactgcatcagctatggattcaattgtgagggccggtgtggacgaggatggtggtggcagcgccgtggtggtggttgacactgggacgatggaggctggtggccggtgggtggttgatgtttgaggatcgctggccatctcggtaccaggttgataggatcacagatcctacctggaaggttgcgcaggttgtagggatgggagaaggaggaggccgagaagaacctcccggggccgttcgacagcctcgacgacctccagaagagcttcgcggcccagggcctcggcttcaacgatatggtcacgctctccggtgcgcacagcatcggcgtggcccgctgcaggttcttcaccaaccgcctgccgcctaacccctcggacatggaccgcgacctcgccaggagcctaaaggcgacctgcgaccaaaacggactcgactccaaggtggtacaggaccccgtgacgccagttgccctggacaaccagtactataagaacgtgcacaacggcaaggtgctcttcacgtcggacgccgcgctcaactccacggacgacgcaaggaaggtggtggacggcttcgccaacaacgcggtagactggtaccgcgcgttcgccgatgccatggtgaagatgggcaacatcagggataggaccatcaacagacccaagcccgagatcagggagaagtgcttcatttacaatacctactgatcgacacgatatcaacattaagacgtaccacgagatcctggaggagtctgtttgttttgatattttcctcttgcattcattatcatgcgattgatttccttttatttgcatccaaatgtcatgctgatatttttgttgtaaaaggactttgaattcaagcaatacattttatttgttcac

SEQ ID NO: 27409 - DNA, 1067 bp, Zea Mays
cccgctccagtcgcagccaattcctttatatacagctgaacgggttccagaagatggacaagatcaaggactccagcaggcagtccaagcagctggaggatctcaccgccaagatgagagagtgcaaacgcttgatcaaagaatttgaccgtatactcaaggatgaggagaaaaaggacactcctgaggccaacaagcagctcaatgacaagaaacagttcatgatcaaagaactcaactcctacgtaaccctgaggaaaacgtaccagagcagcctaggtaacaagaggatcgaactattcgatactggtaccgaccaagtggccgacaaatctccagttcaaatggcatcagaaatgtcaaatcaagagctcattagcgccggaaggaaacaaatggaccaaactgaccaagccattgagcgctcaaagatggttgtagcacaaactgttgaagttggagctcagactgctgcaactctgtcacaacaaacagagcaaatgaagagaatcggcaatgagttagattctgttcacttctcactgaagaaggccagtcaaatggtgaaagagattggccgtcaggttgctactgacaaatgcattatggcgttcctgtttctgattgtctgtggcgttattgcaataattgttgttaagatcgtcaacccacataacaagaacatcagagatattccggggctggcacctcccgccatgaacaggaggctgctgtccatcgacgccttaggactatgagcgctgtgaatggctgctcccctgcagcacagcgctgcgcagcgcatcagagttctcttaacgagccacgatatatgatttcacgattcttttgtgcctgtatattgtgtttatgttgtttgcgtccgcccattccttccctattgcattggtaagtagtagcttcaggttcctagcaccggcgttctgattgtctgtgtatacgcggtactggttgtggatgtgagatattcttcatggttgttagtaaaaatagaaacggctgtgggagaagaaacagtaaatgaatccatgtttctttattcttta

SEQ ID NO: 27410 - DNA, 1337 bp, Zea Mays
acagagtaccgctgcgcgagtcgtgaccttcccgacgtgcgtgacgcctaaccaagccccgcaccgccccgcccgcccccgcccccgccccgccgcaggagacggggtcggcacggggcgatgaggagcagcgaggccatggagctcctgggcttccctccctactccaggccctccccttccgaggtgaaggctgcgtatagaagaatggtgatggagtcccatcctgatcgtgtcccaacgcatctgaaatcgcaggctgagtcaaaattcaaggagatagcagaagcatattcttgtttgaaggacggaagaagatcagggagtaggatggaaggtgaactagattccatgatggacatgattcacacaatctttgtttgtagctaattacatgtatcatcgttcacgcagttcatgttatgcgttctggtgttccaactagccacggaagatcaaatagaacgttggttaaagccccgtttctactcataatgtttgcagcagtttcttttggcgccttcagcgcatcaaggcaacatggcaaccagaacaattggcaggatcagcaaccagtaagatttacaagaagcaccacaatagtttgataactgtcagcattacaggaaacatcccacagtctaagatgggagcaaagatgctgaaaggtgctttagatggaactccaaacctttcccaacggagacaagaggtaaccaaactataggtaaccttgcagccaacagcatgactgtctttaatgcagtttgcttgcatttcagactctctcgtcatgcttcaaaagtggatacacttaacttcacagccatacttgctgcaagtagaaactgggaatacaatatgaatagctcgagtcttcaatcagtagcaacagctatgaaactataccaatactacagaaaatttcctcgatgtcaactcatatttcatggaagccttttaagccatctgggtacaatgagagcagatcataaccaccagcatcaggcatcactgtactgcgtactgcctgaacaaaatgccatagtccttctgaaccgctttatgccttgattgcataatcatcttaccaccacaactattaccgataggaataaccacagccagggctacgggtggagttcttttaacattaccgatagttggcacagtgagtccaactaaaatgtaacaggttaaggctacctactgtttcactcttgctaagatatcttgtgtgtaaaactacttaatccccaacttggcaaaatgcagagcattgtgctaggtaggatacaccaggaccacaaatgttcaattgatacaagaagaaaatg

SEQ ID NO: 27411 - DNA, 703 bp, Zea Mays
acagagtaccgctgcgcgagtcgtgaccttcccgacgtgcgtgacgcctaaccaagccccgcaccgccccgcccgcccccgcccccgccccgccgcaggagacggggtcggcacggggcgatgaggagcagcgaggccatggagctcctgggcttccctccctactccaggccctccccttccgaggtgaaggctgcgtatagaagaatggtgatggagtcccatcctgatcgtgtcccaacgcatctgaaatcgcaggctgagtcaaaattcaaggaggaagaagatcagggagtaggatggaagttcatgttatgcgttctggtgttccaactagccacggaagatcaaatagaacgttggttaaagccccgtttctactcataatgtttgcagcagtttcttttggcgccttcagcgcatcaagagcgtatcaacggcaaaaggaactgtgttcctctcagaacccatttctaccatagaggaagacggtgggctctgtccatgttcataggcgagaagagcttcttgctacgttgtatacagatgtaaaacaatcacaccatcctgaataaacgtgccaacctgtgccttctaactttgttgtttcagactttccaaacatgtaaaatcacttttgtattggtttcctgatttcgtctgccttgttgctactacgttcagttagctttgctttaaaact

SEQ ID NO: 27412 - DNA, 816 bp, Zea Mays
ttcgacggctgggggtttgccaccgaggcgtccaaagggagcaagcgcgtcgaccagctcttcgccgctcgatgcctacagagtaccgctgcgcgagtcgtgaccttcccgacgtgcgtgacgcctaaccaagccccgcaccgccccgcccgcccccgcccccgccccgccgcaggagacggggtcggcacggggcgatgaggagcagcgaggccatggagctcctgggcttccctccctactccaggccctccccttccgaggtgaaggctgcgtatagaagaatggtgatggagtcccatcctgatcgtgtcccaacgcatctgaaatcgcaggctgagtcaaaattcaaggaggtaagatagcagaagcatattcttgtttgaaggacggaagaagatcagggagtaggatggaagttcatgttatgcgttctggtgttccaactagccacggaagatcaaatagaacgttggttaaagccccgtttctactcataatgtttgcagcagtttcttttggcgccttcagcgcatcaagagcgtatcaacggcaaaaggaactgtgttcctctcagaacccatttctaccatagaggaagacggtgggctctgtccatgttcataggcgagaagagcttcttgctacgttgtatacagatgtaaaacaatcacaccatcctgaataaacgtgccaacctgtgccttctaactttgttgtttcagactttccaaacatgtaaaatcacttttgtattggtttcctgatttcgtctgccttgttgctactacgttcagttagctttgctttaaaact

SEQ ID NO: 27413 - DNA, 1706 bp, Zea Mays
gtcactactgctagaaaagtacatttcttttccactgcccacttgacagttcacaaatcacaaacacaacccagggtttccgcaagcaagaccaaaatatacatggtgcttgagtacgtcaatggaggagagctgtttgacaagatcgcgttgaagggtaagctgacggagaaggaagggaggaaactgttccagcagctcatagatgccgtgggatactgccacgagaagggggtttatcacagggacctcaagccagagaatgtccttgttgatgcaaaaggaaacataaaagtttctgatttcggattaagtgcccttccacagaaccaacaaaaagatggtttgttgcataccacatgtggcagccctaactacatagcccctgagggaatcttccattcgacgaccaaaatgtggttgtcctttaccagaagattctcaaggggaatgctcacattccaaagtggctctcccaaggtgcccaagatatactgagaaaaatcctggatcctaacccggttacacgcatagatgtggatggaataagggcacatgattggttcaagcaaggctatgctccagctatgccatttagcgatgatgaagaagatatcagcatggatgaagacagcctaaacatcaccgagcataatgacatccaagacaagatagcaatcaaccaaatcaatgctttccagctcattggaatgtcctcctgccttgatctatccggattttttgagaaagaggatgtttctgaaaggaaaatcagatttgcatcaaattattccccagcttatttatttgagaagattgagagcattgtcagaaaaatggggttccaggtacataagagcaacggcaagctaaaagtgatccaagactgcaagggactagcaaattcaagagggcaagagtcattattaatttctgctgaggtgtttgagatcaatgaatatctttatgttgtcgaactaaagaagtcatctggagactgctccctgtacagaaagttgtgtgagacgctctcagaggacttgggcacatgcaaaagccagcaatttttaaagcaggactctatcagacaagatataggtagatataatagtagcttttaacaaagagacacttactaaatagcctatagacacaaactaacacaaacaatatactgaatttaaaacagtatattgtccatgcacctattttaaatgtgctctcttatgccttttgtcatgaaacctcaagaatcttagtttatgacaaattggcatctgacgatgtattgagctcctaagggataatatgatgtaaacaagtaaactacacatataagagattcagagttacctggtctctatgtttctctagcctaccccaacttgcttgggataaaaggctttgttgttgttgttggaatgtaagattgtttgtttttgaagcccctggttgacttccatgactcaagaaaaattgtgatatgttgttcgttgaaagaagtcctttcagatgcatgttcagctaaaagaaaacctgtgaagaccatggaaataagataacaactcctacacggtgcatttggtacaagtttgaaactttgccaatcaccagtagtccttgcatgagcaccgtccttcactgaaatggtggaaacggttacggtctctaataatcaacttgcgctcgtataacagggcaataag

SEQ ID NO: 27414 - DNA, 2029 bp, Zea Mays
agcgctgctctgcttccctccctccgctccgcccccacctcctctaacgttacgtcagcctctagtcgtccaccagccggagcagagcctcttgttggtagcggatcggaatgcggatgggcaagtacgagatggggcggacgctcggggagggccacttcggcaaggtgaggctggcgcggcacgcggacacgggccggcccttcgccatcaagatcctcgaccgccagcgcatcctcgccatgaagatccacgaccagatcaagagggagatcgcgacgctgaagctgctcaagcaccccaacgtcgtccgcctctacgaggtttccgcaagcaagaccaaaatatacatggtgcttgagtacgtcaatggaggagagctgtttgacaagatcgcgttgaagggtaagctgacggagaaggaagggaggaaactgttccagcagctcatagatgccgtgggatactgccacgagaagggggtttatcacagggacctcaagccagagaatgtccttgttgatgcaaaaggaaacataaaagtttctgatttcggattaagtgcccttccacagaaccaacaaatggtttgttgcataccacatgtggcagccctaactacatagcccctgaggtccttctgaacaaaggttatgacggctcgatatctgacgtatggtcctgtggtgttattctatatgtaatgcttacagggaatcttccattcgacgaccaaaatgtggttgtcctttaccagaagattctcaaggggaatgctcacattccaaagtggctctcccaaggtgcccaagatatactgagaaaaatcctggatcctaacccggttacacgcatagatgtggatggaataagggcacatgattggttcaagcaaggctatgctccagctatgccatttagcgatgatgaagaagatatcagcatggatgaagacagcctaaacatcaccgagcataatgacatccaagacaagatagcaatcaaccaaatcaatgctttccagctcattggaatgtcctcctgccttgatctatccggattttttgagaaagaggatgtttctgaaaggaaaatcagatttgcatcaaattattccccagcttatttatttgagaagattgagagcattgtcagaaaaatggggttccaggtacataagagcaacggcaagctaaaagtgatccaagactgcaagggactagcaaattcaagagggcaagagtcattattaatttctgctgaggtgtttgagatcaatgaatatctttatgttgtcgaactaaagaagtcatctggagactgctccctgtacagaaagttgtgtgagacgctctcagaggacttgggcacatgcaaaagccagcaatttttaaagcaggactctatcagacaagatataggtagatataatagtagcttttaacaaagagacacttactaaatagcctatagacacaaactaacacaaacaatatactgaatttaaaacagtatattgtccatgcacctattttaaatgtgctctcttatgccttttgtcatgaaacctcaagaatcttagtttatgacaaattggcatctgacgatgtattgagctcctaagggataatatgatgtaaacaagtaaactacacatataagagattcagagttacctggtctctatgtttctctagcctaccccaacttgcttgggataaaaggctttgttgttgttgttggaatgtaagattgtttgtttttgaagcccctggttgacttccatgactcaagaaaaattgtgatatgttgttcgttgaaagaagtcctttcagatgcatgttcagctaaaagaaaacctgtgaagaccatggaaataagataacaactcctacacggtgcatttggtacaagtttgaaactttgccaatcaccagtagtccttgcatgagcaccgtccttcactgaaatggtggaaacggttacggtctctaataatcaacttgcgctcgtataacagggcaataag

SEQ ID NO: 27415 - DNA, 2042 bp, Zea Mays
agcgctgctctgcttccctccctccgctccgcccccacctcctctaacgttacgtcagcctctagtcgtccaccagccggagcagagcctcttgttggtagcggatcggaatgcggatgggcaagtacgagatggggcggacgctcggggagggccacttcggcaaggtgaggctggcgcggcacgcggacacgggccggcccttcgccatcaagatcctcgaccgccagcgcatcctcgccatgaagatccacgaccagatcaagagggagatcgcgacgctgaagctgctcaagcaccccaacgtcgtccgcctctacgaggtttccgcaagcaagaccaaaatatacatggtgcttgagtacgtcaatggaggagagctgtttgacaagatcgcgttgaagggtaagctgacggagaaggaagggaggaaactgttccagcagctcatagatgccgtgggatactgccacgagaagggggtttatcacagggacctcaagccagagaatgtccttgttgatgcaaaaggaaacataaaagtttctgatttcggattaagtgcccttccacagaaccaacaaaaagatggtttgttgcataccacatgtggcagccctaactacatagcccctgaggtccttctgaacaaaggttatgacggctcgatatctgacgtatggtcctgtggtgttattctatatgtaatgcttacagggaatcttccattcgacgaccaaaatgtggttgtcctttaccagaagattctcaaggggaatgctcacattccaaagtggctctcccaaggtgcccaagatatactgagaaaaatcctggatcctaacccggttacacgcatagatgtggatggaataagggcacatgattggttcaagcaaggctatgctccagctatgccatttagcgatgatgaagaagatatcagcatggatgaagacagcctaaacatcaccgaggtaacctatcataatgacatccaagacaagatagcaatcaaccaaatcaatgctttccagctcattggaatgtcctcctgccttgatctatccggattttttgagaaagaggatgtttctgaaaggaaaatcagatttgcatcaaattattccccagcttatttatttgagaagattgagagcattgtcagaaaaatggggttccaggtacataagagcaacggcaagctaaaagtgatccaagactgcaagggactagcaaattcaagagggcaagagtcattattaatttctgctgaggtgtttgagatcaatgaatatctttatgttgtcgaactaaagaagtcatctggagactgctccctgtacagaaagttgtgtgagacgctctcagaggacttgggcacatgcaaaagccagcaatttttaaagcaggactctatcagacaagatataggtagatataatagtagcttttaacaaagagacacttactaaatagcctatagacacaaactaacacaaacaatatactgaatttaaaacagtatattgtccatgcacctattttaaatgtgctctcttatgccttttgtcatgaaacctcaagaatcttagtttatgacaaattggcatctgacgatgtattgagctcctaagggataatatgatgtaaacaagtaaactacacatataagagattcagagttacctggtctctatgtttctctagcctaccccaacttgcttgggataaaaggctttgttgttgttgttggaatgtaagattgtttgtttttgaagcccctggttgacttccatgactcaagaaaaattgtgatatgttgttcgttgaaagaagtcctttcagatgcatgttcagctaaaagaaaacctgtgaagaccatggaaataagataacaactcctacacggtgcatttggtacaagtttgaaactttgccaatcaccagtagtccttgcatgagcaccgtccttcactgaaatggtggaaacggttacggtctctaataatcaacttgcgctcgtataacagggcaataag

SEQ ID NO: 27416 - DNA, 2038 bp, Zea Mays
agcgctgctctgcttccctccctccgctccgcccccacctcctctaacgttacgtcagcctctagtcgtccaccagccggagcagagcctcttgttggtagcggatcggaatgcggatgggcaagtacgagatggggcggacgctcggggagggccacttcggcaaggtgaggctggcgcggcacgcggacacgggccggcccttcgccatcaagatcctcgaccgccagcgcatcctcgccatgaagatccacgaccagatcaagagggagatcgcgacgctgaagctgctcaagcaccccaacgtcgtccgcctctacgaggtttccgcaagcaagaccaaaatatacatggtgcttgagtacgtcaatggaggagagctgtttgacaagatctatatgcaggcgttgaagggtaagctgacggagaaggaagggaggaaactgttccagcagctcatagatgccgtgggatactgccacgagaagggggtttatcacagggacctcaagccagagaatgtccttgttgatgcaaaaggaaacataaaagtttctgatttcggattaagtgcccttccacagaaccaacaaatggtttgttgcataccacatgtggcagccctaactacatagcccctgaggtccttctgaacaaaggttatgacggctcgatatctgacgtatggtcctgtggtgttattctatatgtaatgcttacagggaatcttccattcgacgaccaaaatgtggttgtcctttaccagaagattctcaaggggaatgctcacattccaaagtggctctcccaaggtgcccaagatatactgagaaaaatcctggatcctaacccggttacacgcatagatgtggatggaataagggcacatgattggttcaagcaaggctatgctccagctatgccatttagcgatgatgaagaagatatcagcatggatgaagacagcctaaacatcaccgagcataatgacatccaagacaagatagcaatcaaccaaatcaatgctttccagctcattggaatgtcctcctgccttgatctatccggattttttgagaaagaggatgtttctgaaaggaaaatcagatttgcatcaaattattccccagcttatttatttgagaagattgagagcattgtcagaaaaatggggttccaggtacataagagcaacggcaagctaaaagtgatccaagactgcaagggactagcaaattcaagagggcaagagtcattattaatttctgctgaggtgtttgagatcaatgaatatctttatgttgtcgaactaaagaagtcatctggagactgctccctgtacagaaagttgtgtgagacgctctcagaggacttgggcacatgcaaaagccagcaatttttaaagcaggactctatcagacaagatataggtagatataatagtagcttttaacaaagagacacttactaaatagcctatagacacaaactaacacaaacaatatactgaatttaaaacagtatattgtccatgcacctattttaaatgtgctctcttatgccttttgtcatgaaacctcaagaatcttagtttatgacaaattggcatctgacgatgtattgagctcctaagggataatatgatgtaaacaagtaaactacacatataagagattcagagttacctggtctctatgtttctctagcctaccccaacttgcttgggataaaaggctttgttgttgttgttggaatgtaagattgtttgtttttgaagcccctggttgacttccatgactcaagaaaaattgtgatatgttgttcgttgaaagaagtcctttcagatgcatgttcagctaaaagaaaacctgtgaagaccatggaaataagataacaactcctacacggtgcatttggtacaagtttgaaactttgccaatcaccagtagtccttgcatgagcaccgtccttcactgaaatggtggaaacggttacggtctctaataatcaacttgcgctcgtataacagggcaataag

SEQ ID NO: 27417 - DNA, 2042 bp, Zea Mays
agcgctgctctgcttccctccctccgctccgcccccacctcctctaacgttacgtcagcctctagtcgtccaccagccggagcagagcctcttgttggtagcggatcggaatgcggatgggcaagtacgagatggggcggacgctcggggagggccacttcggcaaggtgaggctggcgcggcacgcggacacgggccggcccttcgccatcaagatcctcgaccgccagcgcatcctcgccatgaagatccacgaccagatcaagagggagatcgcgacgctgaagctgctcaagcaccccaacgtcgtccgcctctacgaggtttccgcaagcaagaccaaaatatacatggtgcttgagtacgtcaatggaggagagctgtttgacaagatctatatgcaggcgttgaagggtaagctgacggagaaggaagggaggaaactgttccagcagctcatagatgccgtgggatactgccacgagaagggggtttatcacagggacctcaagccagagaatgtccttgttgatgcaaaaggaaacataaaagtttctgatttcggattaagtgcccttccacagaaccaacaaaaagatggtttgttgcataccacatgtggcagccctaactacatagcccctgaggtccttctgaacaaaggttatgacggctcgatatctgacgtatggtcctgtggtgttattctatatgtaatgcttacagggaatcttccattcgacgaccaaaatgtggttgtcctttaccagaagattctcaaggggaatgctcacattccaaagtggctctcccaaggtgcccaagatatactgagaaaaatcctggatcctaacccggttacacgcatagatgtggatggaataagggcacatgattggttcaagcaaggctatgctccagctatgccatttagcgatgatgaagaagatatcagcatggatgaagacagcctaaacatcaccgagcataatgacatccaagacaagatagcaatcaaccaaatcaatgctttccagctcattggaatgtcctcctgccttgatctatccggattttttgagaaagaggatgtttctgaaaggaaaatcagatttgcatcaaattattccccagcttatttatttgagaagattgagagcattgtcagaaaaatggggttccaggtacataagagcaacggcaagctaaaagtgatccaagactgcaagggactagcaaattcaagagggcaagagtcattattaatttctgctgaggtgtttgagatcaatgaatatctttatgttgtcgaactaaagaagtcatctggagactgctccctgtacagaaagttgtgtgagacgctctcagaggacttgggcacatgcaaaagccagcaatttttaaagcaggactctatcagacaagatataggtagatataatagtagcttttaacaaagagacacttactaaatagcctatagacacaaactaacacaaacaatatactgaatttaaaacagtatattgtccatgcacctattttaaatgtgctctcttatgccttttgtcatgaaacctcaagaatcttagtttatgacaaattggcatctgacgatgtattgagctcctaagggataatatgatgtaaacaagtaaactacacatataagagattcagagttacctggtctctatgtttctctagcctaccccaacttgcttgggataaaaggctttgttgttgttgttggaatgtaagattgtttgtttttgaagcccctggttgacttccatgactcaagaaaaattgtgatatgttgttcgttgaaagaagtcctttcagatgcatgttcagctaaaagaaaacctgtgaagaccatggaaataagataacaactcctacacggtgcatttggtacaagtttgaaactttgccaatcaccagtagtccttgcatgagcaccgtccttcactgaaatggtggaaacggttacggtctctaataatcaacttgcgctcgtataacagggcaataag

SEQ ID NO: 27418 - DNA, 347 bp, Zea Mays
aattaagcacgtacagccccagctcatggcattcaccacgcaccccccacctgccttgtgctctctgtccatatcttccggcggccgtcgatcgactttacaagcagcagcaaagagatgtcggacggcacggccacctgcgtcgacatcatcctcgccatcatcctgccgccgctcggggtcttcttcaagttcggctgcggggtgggcagggtcctgtagtcagcagctctttggtgtctcttgaagccactgcatcaaatccttctgcttctccacagcccatatgaccgtcagtaaacctgaagcatgcagtcacagatccatggtgcaccatcttctacagc

SEQ ID NO: 27419 - DNA, 2477 bp, Zea Mays
aattaagcacgtacagccccagctcatggcattcaccacgcaccccccacctgccttgtgctctctgtccatatcttccggcggccgtcgatcgactttacaagcagcagcaaagagatgtcggacggcacggccacctgcgtcgacatcatcctcgccatcatcctgccgccgctcggggtcttcttcaagttcggctgcggggctgagttctggatctgcctcatcctcaccttcttcggctacctcccaggcatcatctacgctgtctgggtcatcaccatgtagccggccggccgagaggaaccacggttccctgccactgccaggcagacatgcagctggccgtgctgtcttattaattgctagcttctgtttccgctgaagaatcatcaggacgcatgtacttggatcgatcgatggatcattaatgagctgtttctttctttctttgtttaaccgatcgaccagttcggccttttctaccttggatttgcgttaactgttgggttacgttcagatcagtacttggtttgtttgggtcgttgggagatgggaatcgatgcatatcctctgccgttgtttgcactacgagagggcagctctcatggctaccttctaactttcagtagagacggcagacggcagagcagctcaaagatggcacagccgccacaatctgatggtacagggaatcggccaactgttgtgtagaaacaactgcagctctgcaggtgaagaggaaggtatttttaaaaccaacaatatagatatgctaacagaaacacattgtgttgtctcatatgcatatgctaacaggaaaaaaaaagtacagccaaccgcattcaatagctgcaaagaaaaaaaaaccgaaaaaatatcaccacctcccctcaattcaaacattttagggctagtttaaaaacttagatcttcttcggggtttccggagattgaatgaaaaattaacttttttctctcaatctccggaaataccggagtagatttaagtttccaaaagagcttccaaccagaactaaagggtacgtggtacctttagttatagcccttagaactaccaatcgggaccaaaggtattttctatgtactaattgttgaatctgaactaataactagcattagtcctaggctctaagacgatcgaaattaatggtctaccctaaaattttattctctactagtgtttcctttatcattttttacgtgaggaaaaataagaagatatatactaggcaaattttagcttggtcataaccaaacacaattttattagccccatttagacatgaacctaacttgataatggttaaagttaggcatggtttcttagaccacaaaccaaacatgcctaagcattttgtgctctaattttttttttgataggactccttatttgtatacctagcaaacatatgcatgagccataggctctgagttttcgccttgttcgctattcccttggccttataggagtcaaacattcttaactttaattaggttttataaaaaatagtgtcaaaatttatatctctaaatagatatactaaagaaatatataatgtgattaacttaataatgtttttctatgacaaatgctataatatttttttgatatatacatttgatcagaattaagattgtttgtactttaaaatgcgatgtagagatttttgctgagaaatagtataccataaaaagtgcatcaagagaagtgatgccccccatagacttgcttggatggtttgacatggagaggctatgcaagatttatctcatgttggcttgtgtttggtgtctatcatgacaatatttacccttattcttgcttggtgcaaagactaggattttttttctctatctctagtcttcttaataaagacatcatgttataaaatactatattaccgtggcatagtttcattgctttatcactacatgtatgtttagcggttgaaactgatggcacaatagttatattaattgtcagacacagttagcctagctattcatagatcaattcaagataaccattgtgaataaaaacataaactagaaaccgttgatgtactttcaacactttaatctcaccaaccctagtctcccaaaaaaaccatggtattaaatatcagtttggaataggttaattttctcatatataagttgcaattgttagagggtgtcagttaaaagatttttatagactagactgtttggatcagctaaagacactgtttggcacaaatgttgcttgtcgagaaagttgcttatttgagaaactgatgaaatccagtttatgctttttgcctgtttttagtttattatgagactgaactgataatttgttgtacacgcatcaatatggctcagattttgtttaaacatgtgaaaaaaaaactatacaataagttgtatcaaacaagacaaagtttgttttagctactaataatttattttac

SEQ ID NO: 27420 - DNA, 858 bp, Zea Mays
agcgtgtcatcgccttcccctccctacaagccaaacgcgaataccacccccgtgacttcccgatctccggcgatggccgcgcggcgcctcggatcccccgcatctaggtggctgcgcccgtccgcgctgctcctcctggtcgcctctgctctcctctcggccccgtcgccggcccgggccctccggttcgacctcgagtccggccacaccaagtgcgtctccgacgagatcaaggtcaacgccatggccgtcggaaagtaccacttcgccttcacggcggcggaggccggcgactacctggcctgcttctgggctcccgaccacaagccgccggtcaccatcgggttcgagttcgactggaggagcggcgtctccgccaaggactatcccagcgtcgccaagaagggcaaggtcgatatgatggaattggagctgaagaagctagaggaaactataaaaaatatacatgaagagatgctttatctgcgtgaaagggaagaggaaatgcaggacgtgaacaggcgaacgaactcaaggatggcttggctagggttcctctcccttggcgtctgcttatcagtggcaggtttgcagctgtggcacctgaagaccttctttgaaaggaagaagttgttgtagactgtagttggcccatggttcacggtagacctcagcgcaggtgtaacctatttttgggtgaactgccgatctgttacggagcttgaaatcccatgtaacaaacgttatgtcgtacttgagaaaatatgctttagcctgtccagttgaaattataagaaacttgaaatagatactaaattgtcttccattcaatagttcgtgttgcaatttggacttctg

SEQ ID NO: 27421 - DNA, 1880 bp, Zea Mays
cattatgcgcctccctgcaattatacgaggggtcattcaattaagaccctgtagaggctcagtatccccagccaggccgttgcttttatgagcaaagctgccagtcctccttgcatatatgacaacagctatcgccattgaagatgtgagaagagaagtgagaatattgagttctctgacaggccacagtaatttagtgcagttctacgatgctttcgaggatgaagataacgtgtatatagttatggaattatgtaaaggaggtgaactgctggacaggatattggctagaggtggaaagtactctgaagaggatgcgaaggtcgttatggtacaaattttgagtgttgtatcattttgccatcttcaaggtgttgttcaccgtgatctgaaaccagagaatttccttttctcttcaaaggatgaaaactctcccttgaaggtcatagattttggcttgtctgactttgtgaagccagatgaaagactaaacgacattgttggaagcgcatactatgttgctccagaggtcctccacagatcttatgccaccgaggcagatatgtggagcattggagtaattgcctacatcttgctctgtgggagtaggcctttctgggcgcgcacggagtcgggaatcttccgagctgtcttgaaggcggaaccgagttttgatgaggccccatggcccactctcacggctgaagctaaagattttgtaaaaaggcttcttaacaaggattaccgcaagagaatgacggctgcacaagctctcagtcatccatggatccgtaattctcaacaagtgaaggttcctttggatatgataatctataagctaatgagagcgtacatcagctcgtcttcgctgcggaagtctgctttgagggccctagccaagacgctgacgacggaccaactcttttatgtgagggagcagtttgaattgctgggcccgaacaagaatggttacatctcattgcaaaatctgaaatcggctctagcgaagaactccacggatgcaatgaaggactccagggttgtcgattttgttaacaccgtgtgcgctcttcagtacaggaaactggatttcgaagagttcgccgcttccgccatcagcgtctaccagatggaagccctggagacctgggagcagcacgcgaggcgcgcgtacgagctgttcgacaaggaaggaaaccggcccattgtgatcgaggaacttgcgtcggagctcggacttggcccgtcagtgcctctccacgttgtcctccaagactgggtcagacacgccgacgggaagctgagcttcctggggttcatcaagctcttgcacggggtctcgtcgcgctcgatcccaaaggcctagcattgtacaccatccatccatcgtcgttgttgttgtagttgtactgaagtaaagctgttgtgtagacgagtgtacagatgaggatagggaaaagaaatgaacatgatggaagactggaagggccgtaagatttgcggctgctgtttgtcaatgccaaattgccattgcctgcagctgcagtagctgtgtctggctctcctttgtccgcgccatcagagaacaggagcgtcgcagcgtgctggtggacttgcttgcttgctcgtggtgtgtacgagtacggtgccgtggatgcagcggtgtcgccaccgcgcgtggttcgggagggggcacggcgctggtcccggaccgacgtgcgtatggcggaggcggagcaggtccgatcaagatcagacgccgggtccggccggtggggtgggggcactgacagccagagcggcaggaggaggaccacacggccgggcacccaacctctccccgtgctagagaaaagagtcgaactaccccctagatagaa

SEQ ID NO: 27422 - DNA, 1834 bp, Zea Mays
gacctgccattttccctcctcctgccgtgactaaccaccaccttccaatcttctctcatgttgcatccacagatgacaacagctatcgccattgaagatgtgagaagagaagtgagaatattgagttctctgacaggccacagtaatttagtgcagttctacgatgctttcgaggatgaagataacgtgtatatagttatggaattatgtaaaggaggtgaactgctggacaggatattggctagaggtggaaagtactctgaagaggatgcgaaggtcgttatggtacaaattttgagtgttgtatcattttgccatcttcaaggtgttgttcaccgtgatctgaaaccagagaatttccttttctcttcaaaggatgaaaactctcccttgaaggtcatagattttggcttgtctgactttgtgaagccagatgaaagactaaacgacattgttggaagcgcatactatgttgctccagaggtcctccacagatcttatgccaccgaggcagatatgtggagcattggagtaattgcctacatcttgctctgtgggagtaggcctttctgggcgcgcacggagtcgggaatcttccgagctgtcttgaaggcggaaccgagttttgatgaggccccatggcccactctcacggctgaagctaaagattttgtaaaaaggcttcttaacaaggattaccgcaagagaatgacggctgcacaagctctcagtcatccatggatccgtaattctcaacaagtgaaggttcctttggatatgataatctataagctaatgagagcgtacatcagctcgtcttcgctgcggaagtctgctttgagggccctagccaagacgctgacgacggaccaactcttttatgtgagggagcagtttgaattgctgggcccgaacaagaatggttacatctcattgcaaaatctgaaatcggctctagcgaagaactccacggatgcaatgaaggactccagggttgtcgattttgttaacaccgtgtgcgctcttcagtacaggaaactggatttcgaagagttcgccgcttccgccatcagcgtctaccagatggaagccctggagacctgggagcagcacgcgaggcgcgcgtacgagctgttcgacaaggaaggaaaccggcccattgtgatcgaggaacttgcgtcggagctcggacttggcccgtcagtgcctctccacgttgtcctccaagactgggtcagacacgccgacgggaagctgagcttcctggggttcatcaagctcttgcacggggtctcgtcgcgctcgatcccaaaggcctagcattgtacaccatccatccatcgtcgttgttgttgtagttgtactgaagtaaagctgttgtgtagacgagtgtacagatgaggatagggaaaagaaatgaacatgatggaagactggaagggccgtaagatttgcggctgctgtttgtcaatgccaaattgccattgcctgcagctgcagtagctgtgtctggctctcctttgtccgcgccatcagagaacaggagcgtcgcagcgtgctggtggacttgcttgcttgctcgtggtgtgtacgagtacggtgccgtggatgcagcggtgtcgccaccgcgcgtggttcgggagggggcacggcgctggtcccggaccgacgtgcgtatggcggaggcggagcaggtccgatcaagatcagacgccgggtccggccggtggggtgggggcactgacagccagagcggcaggaggaggaccacacggccgggcacccaacctctccccgtgctagagaaaagagtcgaactaccccctagatagaa

SEQ ID NO: 27423 - DNA, 1826 bp, Zea Mays
tcgcagggctcctagaaaagagaaagtagacgaccaaaagaaactggagaaaaagagaggagctcaaaagcaagctatcgccattgaagatgtgagaagagaagtgagaatattgagttctctgacaggccacagtaatttagtgcagttctacgatgctttcgaggatgaagataacgtgtatatagttatggaattatgtaaaggaggtgaactgctggacaggatattggctagaggtggaaagtactctgaagaggatgcgaaggtcgttatggtacaaattttgagtgttgtatcattttgccatcttcaaggtgttgttcaccgtgatctgaaaccagagaatttccttttctcttcaaaggatgaaaactctcccttgaaggtcatagattttggcttgtctgactttgtgaagccagatgaaagactaaacgacattgttggaagcgcatactatgttgctccagaggtcctccacagatcttatgccaccgaggcagatatgtggagcattggagtaattgcctacatcttgctctgtgggagtaggcctttctgggcgcgcacggagtcgggaatcttccgagctgtcttgaaggcggaaccgagttttgatgaggccccatggcccactctcacggctgaagctaaagattttgtaaaaaggcttcttaacaaggattaccgcaagagaatgacggctgcacaagctctcagtcatccatggatccgtaattctcaacaagtgaaggttcctttggatatgataatctataagctaatgagagcgtacatcagctcgtcttcgctgcggaagtctgctttgagggccctagccaagacgctgacgacggaccaactcttttatgtgagggagcagtttgaattgctgggcccgaacaagaatggttacatctcattgcaaaatctgaaatcggctctagcgaagaactccacggatgcaatgaaggactccagggttgtcgattttgttaacaccgtgtgcgctcttcagtacaggaaactggatttcgaagagttcgccgcttccgccatcagcgtctaccagatggaagccctggagacctgggagcagcacgcgaggcgcgcgtacgagctgttcgacaaggaaggaaaccggcccattgtgatcgaggaacttgcgtcggagctcggacttggcccgtcagtgcctctccacgttgtcctccaagactgggtcagacacgccgacgggaagctgagcttcctggggttcatcaagctcttgcacggggtctcgtcgcgctcgatcccaaaggcctagcattgtacaccatccatccatcgtcgttgttgttgtagttgtactgaagtaaagctgttgtgtagacgagtgtacagatgaggatagggaaaagaaatgaacatgatggaagactggaagggccgtaagatttgcggctgctgtttgtcaatgccaaattgccattgcctgcagctgcagtagctgtgtctggctctcctttgtccgcgccatcagagaacaggagcgtcgcagcgtgctggtggacttgcttgcttgctcgtggtgtgtacgagtacggtgccgtggatgcagcggtgtcgccaccgcgcgtggttcgggagggggcacggcgctggtcccggaccgacgtgcgtatggcggaggcggagcaggtccgatcaagatcagacgccgggtccggccggtggggtgggggcactgacagccagagcggcaggaggaggaccacacggccgggcacccaacctctccccgtgctagagaaaagagtcgaactaccccctagatagaa

SEQ ID NO: 27424 - DNA, 1816 bp, Zea Mays
tcgcagggctcctagaaaagagaaagtagacgaccaaaagaaactggagaaaaagagaggagctcaaaagcaagatgacaacagctatcgccattgaagatgtgagaagagaagtgagaatattgagttctctgacaggccacagtaatttagtgcagttctacgatgctttcgaggatgaagataacgtgtatatagttatggaattatgtaaaggaggtgaactgctggacaggatattggctagaggtggaaagtactctgaagaggatgcgaaggtcgttatggtacaaattttgagtgttgtatcattttgccatcttcaaggtgttgttcaccgtgatctgaaaccagagaatttccttttctcttcaaaggatgaaaactctcccttgaaggtcatagattttggcttgtctgactttgtgaagccagatgaaagactaaacgacattgttggaagcgcatactatgttgctccagaggtcctccacagatcttatgccaccgaggcagatatgtggagcattggagtaattgcctacatcttgctctgtgggagtaggcctttctgggcgcgcacggagtcgggaatcttccgagctgtcttgaaggcggaaccgagttttgatgaggccccatggcccactctcacggctgaagctaaagattttgtaaaaaggcttcttaacaaggattaccgcaagagaatgacggctgcacaagctctcagtcatccatggatccgtaattctcaacaagtgaaggttcctttggatatgataatctataagctaatgagagcgtacatcagctcgtcttcgctgcggaagtctgctttgagggccctagccaagacgctgacgacggaccaactcttttatgtgagggagcagtttgaattgctgggcccgaacaagaatggttacatctcattgcaaaatctgaaatcggctctagcgaagaactccacggatgcaatgaaggactccagggttgtcgattttgttaacaccgaaactggatttcgaagagttcgccgcttccgccatcagcgtctaccagatggaagccctggagacctgggagcagcacgcgaggcgcgcgtacgagctgttcgacaaggaaggaaaccggcccattgtgatcgaggaacttgcgtcggagctcggacttggcccgtcagtgcctctccacgttgtcctccaagactgggtcagacacgccgacgggaagctgagcttcctggggttcatcaagctcttgcacggggtctcgtcgcgctcgatcccaaaggcctagcattgtacaccatccatccatcgtcgttgttgttgtagttgtactgaagtaaagctgttgtgtagacgagtgtacagatgaggatagggaaaagaaatgaacatgatggaagactggaagggccgtaagatttgcggctgctgtttgtcaatgccaaattgccattgcctgcagctgcagtagctgtgtctggctctcctttgtccgcgccatcagagaacaggagcgtcgcagcgtgctggtggacttgcttgcttgctcgtggtgtgtacgagtacggtgccgtggatgcagcggtgtcgccaccgcgcgtggttcgggagggggcacggcgctggtcccggaccgacgtgcgtatggcggaggcggagcaggtccgatcaagatcagacgccgggtccggccggtggggtgggggcactgacagccagagcggcaggaggaggaccacacggccgggcacccaacctctccccgtgctagagaaaagagtcgaactaccccctagatagaa

SEQ ID NO: 27425 - DNA, 1836 bp, Zea Mays
tcgcagggctcctagaaaagagaaagtagacgaccaaaagaaactggagaaaaagagaggagctcaaaagcaagatgacaacagctatcgccattgaagatgtgagaagagaagtgagaatattgagttctctgacaggccacagtaatttagtgcagttctacgatgctttcgaggatgaagataacgtgtatatagttatggaattatgtaaaggaggtgaactgctggacaggatattggctagaggtggaaagtactctgaagaggatgcgaaggtcgttatggtacaaattttgagtgttgtatcattttgccatcttcaaggtgttgttcaccgtgatctgaaaccagagaatttccttttctcttcaaaggatgaaaactctcccttgaaggtcatagattttggcttgtctgactttgtgaagccagatgaaagactaaacgacattgttggaagcgcatactatgttgctccagaggtcctccacagatcttatgccaccgaggcagatatgtggagcattggagtaattgcctacatcttgctctgtgggagtaggcctttctgggcgcgcacggagtcgggaatcttccgagctgtcttgaaggcggaaccgagttttgatgaggccccatggcccactctcacggctgaagctaaagattttgtaaaaaggcttcttaacaaggattaccgcaagagaatgacggctgcacaagctctcagtcatccatggatccgtaattctcaacaagtgaaggttcctttggatatgataatctataagctaatgagagcgtacatcagctcgtcttcgctgcggaagtctgctttgagggccctagccaagacgctgacgacggaccaactcttttatgtgagggagcagtttgaattgctgggcccgaacaagaatggttacatctcattgcaaaatctgaaatcggctctagcgaagaactccacggatgcaatgaaggactccagggttgtcgattttgttaacaccgtgtgcgctcttcagtacaggaaactggatttcgaagagttcgccgcttccgccatcagcgtctaccagatggaagccctggagacctgggagcagcacgcgaggcgcgcgtacgagctgttcgacaaggaaggaaaccggcccattgtgatcgaggaacttgcgtcggagctcggacttggcccgtcagtgcctctccacgttgtcctccaagactgggtcagacacgccgacgggaagctgagcttcctggggttcatcaagctcttgcacggggtctcgtcgcgctcgatcccaaaggcctagcattgtacaccatccatccatcgtcgttgttgttgtagttgtactgaagtaaagctgttgtgtagacgagtgtacagatgaggatagggaaaagaaatgaacatgatggaagactggaagggccgtaagatttgcggctgctgtttgtcaatgccaaattgccattgcctgcagctgcagtagctgtgtctggctctcctttgtccgcgccatcagagaacaggagcgtcgcagcgtgctggtggacttgcttgcttgctcgtggtgtgtacgagtacggtgccgtggatgcagcggtgtcgccaccgcgcgtggttcgggagggggcacggcgctggtcccggaccgacgtgcgtatggcggaggcggagcaggtccgatcaagatcagacgccgggtccggccggtggggtgggggcactgacagccagagcggcaggaggaggaccacacggccgggcacccaacctctccccgtgctagagaaaagagtcgaactaccccctagatagaa

SEQ ID NO: 27426 - DNA, 2146 bp, Zea Mays
aggaaaggtggtggcgtactggcttattgagcaagcagcattgatgcctccattactcacccctgttcagttctttagggcttgaacagcatggagatttcttcttatgaatccctccatttctcagtgcaccaaaccagcccttagtaggttggaggagccgaggaggagctcacaaagacagcctgttctcgtggccttttcggggatggaggtttgaggggtgacagactggtgagactacagtgacagtgagatcagacagcaccacagattctcaccctgtacatttctgtaacaaacaagcaatgacacaagagaacattactaggattcagaaccatcatttacaagttttggcattcttgctgaaattttgtagtgatgacaacagctatcgccattgaagatgtgagaagagaagtgagaatattgagttctctgacaggccacagtaatttagtgcagttctacgatgctttcgaggatgaagataacgtgtatatagttatggaattatgtaaaggaggtgaactgctggacaggatattggctagaggtggaaagtactctgaagaggatgcgaaggtcgttatggtacaaattttgagtgttgtatcattttgccatcttcaaggtgttgttcaccgtgatctgaaaccagagaatttccttttctcttcaaaggatgaaaactctcccttgaaggtcatagattttggcttgtctgactttgtgaagccagatgaaagactaaacgacattgttggaagcgcatactatgttgctccagaggtcctccacagatcttatgccaccgaggcagatatgtggagcattggagtaattgcctacatcttgctctgtgggagtaggcctttctgggcgcgcacggagtcgggaatcttccgagctgtcttgaaggcggaaccgagttttgatgaggccccatggcccactctcacggctgaagctaaagattttgtaaaaaggcttcttaacaaggattaccgcaagagaatgacggctgcacaagctctcagtcatccatggatccgtaattctcaacaagtgaaggttcctttggatatgataatctataagctaatgagagcgtacatcagctcgtcttcgctgcggaagtctgctttgagggccctagccaagacgctgacgacggaccaactcttttatgtgagggagcagtttgaattgctgggcccgaacaagaatggttacatctcattgcaaaatctgaaatcggctctagcgaagaactccacggatgcaatgaaggactccagggttgtcgattttgttaacaccgtgtgcgctcttcagtacaggaaactggatttcgaagagttcgccgcttccgccatcagcgtctaccagatggaagccctggagacctgggagcagcacgcgaggcgcgcgtacgagctgttcgacaaggaaggaaaccggcccattgtgatcgaggaacttgcgtcggagctcggacttggcccgtcagtgcctctccacgttgtcctccaagactgggtcagacacgccgacgggaagctgagcttcctggggttcatcaagctcttgcacggggtctcgtcgcgctcgatcccaaaggcctagcattgtacaccatccatccatcgtcgttgttgttgtagttgtactgaagtaaagctgttgtgtagacgagtgtacagatgaggatagggaaaagaaatgaacatgatggaagactggaagggccgtaagatttgcggctgctgtttgtcaatgccaaattgccattgcctgcagctgcagtagctgtgtctggctctcctttgtccgcgccatcagagaacaggagcgtcgcagcgtgctggtggacttgcttgcttgctcgtggtgtgtacgagtacggtgccgtggatgcagcggtgtcgccaccgcgcgtggttcgggagggggcacggcgctggtcccggaccgacgtgcgtatggcggaggcggagcaggtccgatcaagatcagacgccgggtccggccggtggggtgggggcactgacagccagagcggcaggaggaggaccacacggccgggcacccaacctctccccgtgctagagaaaagagtcgaactaccccctagatagaa

SEQ ID NO: 27427 - DNA, 1808 bp, Zea Mays
attgtggcaaattgatggagcaatttggttgagcagttagtgggtgatgaaagcaatgttgatgacaacagctatcgccattgaagatgtgagaagagaagtgagaatattgagttctctgacaggccacagtaatttagtgcagttctacgatgctttcgaggatgaagataacgtgtatatagttatggaattatgtaaaggaggtgaactgctggacaggatattggctagaggtggaaagtactctgaagaggatgcgaaggtcgttatggtacaaattttgagtgttgtatcattttgccatcttcaaggtgttgttcaccgtgatctgaaaccagagaatttccttttctcttcaaaggatgaaaactctcccttgaaggtcatagattttggcttgtctgactttgtgaagccagatgaaagactaaacgacattgttggaagcgcatactatgttgctccagaggtcctccacagatcttatgccaccgaggcagatatgtggagcattggagtaattgcctacatcttgctctgtgggagtaggcctttctgggcgcgcacggagtcgggaatcttccgagctgtcttgaaggcggaaccgagttttgatgaggccccatggcccactctcacggctgaagctaaagattttgtaaaaaggcttcttaacaaggattaccgcaagagaatgacggctgcacaagctctcagtcatccatggatccgtaattctcaacaagtgaaggttcctttggatatgataatctataagctaatgagagcgtacatcagctcgtcttcgctgcggaagtctgctttgagggccctagccaagacgctgacgacggaccaactcttttatgtgagggagcagtttgaattgctgggcccgaacaagaatggttacatctcattgcaaaatctgaaatcggctctagcgaagaactccacggatgcaatgaaggactccagggttgtcgattttgttaacacctacaggaaactggatttcgaagagttcgccgcttccgccatcagcgtctaccagatggaagccctggagacctgggagcagcacgcgaggcgcgcgtacgagctgttcgacaaggaaggaaaccggcccattgtgatcgaggaacttgcgtcggagctcggacttggcccgtcagtgcctctccacgttgtcctccaagactgggtcagacacgccgacgggaagctgagcttcctggggttcatcaagctcttgcacggggtctcgtcgcgctcgatcccaaaggcctagcattgtacaccatccatccatcgtcgttgttgttgtagttgtactgaagtaaagctgttgtgtagacgagtgtacagatgaggatagggaaaagaaatgaacatgatggaagactggaagggccgtaagatttgcggctgctgtttgtcaatgccaaattgccattgcctgcagctgcagtagctgtgtctggctctcctttgtccgcgccatcagagaacaggagcgtcgcagcgtgctggtggacttgcttgcttgctcgtggtgtgtacgagtacggtgccgtggatgcagcggtgtcgccaccgcgcgtggttcgggagggggcacggcgctggtcccggaccgacgtgcgtatggcggaggcggagcaggtccgatcaagatcagacgccgggtccggccggtggggtgggggcactgacagccagagcggcaggaggaggaccacacggccgggcacccaacctctccccgtgctagagaaaagagtcgaactaccccctagatagaa

SEQ ID NO: 27428 - DNA, 3066 bp, Zea Mays
caatatgttcgcttttttttatatcgctacctgcaacacaagtgttctctttgatcctgcagtgcttgtacagtggatgcagttatcggtgataaattctgtgcttgctctttcatttgctgaatcagctgttactggagtctgtagtatgtgtgtgcttcatgccttgctgccttgttttactagatgcagtggcgctccagattgttgtgacaggtgtttttgttcattttcttattttggccttatagcagcaacactggatgttcattacacattcatgtgacataggaccacttttgccttatcttatatgagaatctttcctgtcattctagttcctcgtgaccaaacaaatgaagggccttgttataaattcttgtcactagatgactgttatgtcttattcaatcccttcatgttgtcttttatagccaactgtcaacataaagataaatattggcttctaaagttctgtaccaccagttctgtgatgatatggatgattttatttaagcctcaatgccacagcattagttctgttggtggattcctcacagtatgcctgttcctattgagatcttgccatgtcagcgacacttacaggcattttaatgattggtgcagcttattttgatcctactgaacagttagtgtgtccaggggcagtcctgatgaacaactacctactcaacaccctgaaattgttaagggatgttcagtaattgagctaggatctgggattggcattactggcatattgtgcagccgtttctgcaaggaggttgtcttgactgatcacaatgatgaagttctggaggtaaatgcatacagtttacaacagatagaaaaggacatttggcaatctgtatggcaatagtcgctgcgtacctttctgtccactgtactgtctatgtcttgaatgaagcgccagaagagtgattataagggaaaatatagagttgcagtcatgttctgagaatgcacatgcagtgttgacatccgagaaactagagtggggaaactcagatcatttaagcggtattattgaaaaacgtcctggtggatttgatcttgatccttgaaatttccatacttaactgtttttttattttattttaaggctctggcctttgtcttctattcatttgttatatagcaatccttgcagcttgtggaccttgactcgcagaaagcttccaacaatctagcatttcctgcctctttgatactccagagaggatttttcgtattcaagctggtaaatgcaaattcatattggcttatgtatcccgaactaaagtatgacaacagctatcgccattgaagatgtgagaagagaagtgagaatattgagttctctgacaggccacagtaatttagtgcagttctacgatgctttcgaggatgaagataacgtgtatatagttatggaattatgtaaaggaggtgaactgctggacaggatattggctagaggtggaaagtactctgaagaggatgcgaaggtcgttatggtacaaattttgagtgttgtatcattttgccatcttcaaggtgttgttcaccgtgatctgaaaccagagaatttccttttctcttcaaaggatgaaaactctcccttgaaggtcatagattttggcttgtctgactttgtgaagccagatgaaagactaaacgacattgttggaagcgcatactatgttgctccagaggtcctccacagatcttatgccaccgaggcagatatgtggagcattggagtaattgcctacatcttgctctgtgggagtaggcctttctgggcgcgcacggagtcgggaatcttccgagctgtcttgaaggcggaaccgagttttgatgaggccccatggcccactctcacggctgaagctaaagattttgtaaaaaggcttcttaacaaggattaccgcaagagaatgacggctgcacaagctctcagtcatccatggatccgtaattctcaacaagtgaaggttcctttggatatgataatctataagctaatgagagcgtacatcagctcgtcttcgctgcggaagtctgctttgagggccctagccaagacgctgacgacggaccaactcttttatgtgagggagcagtttgaattgctgggcccgaacaagaatggttacatctcattgcaaaatctgaaatcggctctagcgaagaactccacggatgcaatgaaggactccagggttgtcgattttgttaacaccgtgtgcgctcttcagtacaggaaactggatttcgaagagttcgccgcttccgccatcagcgtctaccagatggaagccctggagacctgggagcagcacgcgaggcgcgcgtacgagctgttcgacaaggaaggaaaccggcccattgtgatcgaggaacttgcgtcggagctcggacttggcccgtcagtgcctctccacgttgtcctccaagactgggtcagacacgccgacgggaagctgagcttcctggggttcatcaagctcttgcacggggtctcgtcgcgctcgatcccaaaggcctagcattgtacaccatccatccatcgtcgttgttgttgtagttgtactgaagtaaagctgttgtgtagacgagtgtacagatgaggatagggaaaagaaatgaacatgatggaagactggaagggccgtaagatttgcggctgctgtttgtcaatgccaaattgccattgcctgcagctgcagtagctgtgtctggctctcctttgtccgcgccatcagagaacaggagcgtcgcagcgtgctggtggacttgcttgcttgctcgtggtgtgtacgagtacggtgccgtggatgcagcggtgtcgccaccgcgcgtggttcgggagggggcacggcgctggtcccggaccgacgtgcgtatggcggaggcggagcaggtccgatcaagatcagacgccgggtccggccggtggggtgggggcactgacagccagagcggcaggaggaggaccacacggccgggcacccaacctctccccgtgctagagaaaagagtcgaactaccccctagatagaa

SEQ ID NO: 27429 - DNA, 4005 bp, Zea Mays
ccttcaccttcgggtcccacgagctgcgcctcctctgcctccgtgccgcttccagttagtgcttcttgctcgtcataggcttctttcctttgagattaatggatttgtgttccggaaaatgggtgatgcagttgtttttctggtaaattgttactttcttgaactagggtgcttgtaaattttcagcttcgagagttttgcactcaaccattcattattacaaaaaattcagcctccggctgatgaagaggaactgaggatttagtacaaagggtactggggagtggggacctagcataaggatcgccgggcatggttgattgaatgcagtattttactgctcaatatgttcgcttttttttatatcgctacctgcaacacaagtgttctctttgatcctgcagtgcttgtacagtggatgcagttatcggtgataaattctgtgcttgctctttcatttgctgaatcagctgttactggagtctgtagtatgtgtgtgcttcatgccttgctgccttgttttactagatgcagtggcgctccagattgttgtgacaggtgtttttgttcattttcttattttggccttatagcagcaacactggatgttcattacacattcatgtgacataggaccacttttgccttatcttatatgagaatctttcctgtcattctagttcctcgtgaccaaacaaatgaagggccttgttataaattcttgtcactagatgactgttatgtcttattcaatcccttcatgttgtcttttatagccaactgtcaacataaagataaatattggcttctaaagttctgtaccaccagttctgtgatgatatggatgattttatttaagcctcaatgccacagcattagttctgttggtggattcctcacagtatgcctgttcctattgagatcttgccatgtcagcgacacttacaggcattttaatgattggtgcagcttattttgatcctactgaacagttagtgtgtccaggggcagtcctgatgaacaactacctactcaacaccctgaaattgttaagggatgttcagtaattgagctaggatctgggattggcattactggcatattgtgcagccgtttctgcaaggaggttgtcttgactgatcacaatgatgaagttctggagatagaaaaggacatttggcaatctgtatggcaatagtcgctgcgtacctttctgtccactgtactgtctatgtcttgaatgaagcgccagaagagtgattataagggaaaatatagagttgcagtcatgttctgagaatgcacatgcagtgttgacatccgagaaactagagtggggaaactcagatcatttaagcggtattattgaaaaacgtcctggtggatttgatcttgatccttgaaatttccatacttaactgtttttttattttattttaaggctctggcctttgtcttctattcatttgttatatagcaatccttgcagcttgtggaccttgactcgcagaaagcttccaacaatctagcatttcctgcctctttgatactccagagaggatttttcgtattcaagctggtaaatgcaaattcatattggcttatgtatcccgaactaaagtaaaatgaaaatgaaagcaggtaatgtcacacagatggtgataggtattgaaatagttgcaaccaaaggcaaaggaggaccttatgtgtaatcgagaaggattgcatggctcatctgcaaaagggattaattgcaatgtgatggaagtagcccttggtccatgttagcccatgttcctgtatatctttattatatccttggccaactaccttgttttctgaaagggggagaggggatatcctttcctgacacctttgcttctcttgcaaggtctttcatacggtagaaaaaaatctatactgaaaacagtggcggagcacccgttatggctaactatggcttgagcaatacctaaaaatcatgtttggtgtaatggtgtgacaaaattgagaggaattacagatacatgcaagcaaaatgatagcagccgcagatgcaagtctcctgccgcgctattcaaacaaaaatgttatgaaagctgaagggatgggaagcaccattgcagggtttccaaaagtttccagtcggcaattccgaggtggatgtccagaaataaagtgcattgtggcaaattgatggagcaatttggttgagcagttagtgggtgatgaaagcaatgttgatgacaacagctatcgccattgaagatgtgagaagagaagtgagaatattgagttctctgacaggccacagtaatttagtgcagttctacgatgctttcgaggatgaagataacgtgtatatagttatggaattatgtaaaggaggtgaactgctggacaggatattggctagaggtggaaagtactctgaagaggatgcgaaggtcgttatggtacaaattttgagtgttgtatcattttgccatcttcaaggtgttgttcaccgtgatctgaaaccagagaatttccttttctcttcaaaggatgaaaactctcccttgaaggtcatagattttggcttgtctgactttgtgaagccagatgaaagactaaacgacattgttggaagcgcatactatgttgctccagaggtcctccacagatcttatgccaccgaggcagatatgtggagcattggagtaattgcctacatcttgctctgtgggagtaggcctttctgggcgcgcacggagtcgggaatcttccgagctgtcttgaaggcggaaccgagttttgatgaggccccatggcccactctcacggctgaagctaaagattttgtaaaaaggcttcttaacaaggattaccgcaagagaatgacggctgcacaagctctcagtcatccatggatccgtaattctcaacaagtgaaggttcctttggatatgataatctataagctaatgagagcgtacatcagctcgtcttcgctgcggaagtctgctttgagggccctagccaagacgctgacgacggaccaactcttttatgtgagggagcagtttgaattgctgggcccgaacaagaatggttacatctcattgcaaaatctgaaatcggctctagcgaagaactccacggatgcaatgaaggactccagggttgtcgattttgttaacaccgtgtgcgctcttcagtacaggaaactggatttcgaagagttcgccgcttccgccatcagcgtctaccagatggaagccctggagacctgggagcagcacgcgaggcgcgcgtacgagctgttcgacaaggaaggaaaccggcccattgtgatcgaggaacttgcgtcggagctcggacttggcccgtcagtgcctctccacgttgtcctccaagactgggtcagacacgccgacgggaagctgagcttcctggggttcatcaagctcttgcacggggtctcgtcgcgctcgatcccaaaggcctagcattgtacaccatccatccatcgtcgttgttgttgtagttgtactgaagtaaagctgttgtgtagacgagtgtacagatgaggatagggaaaagaaatgaacatgatggaagactggaagggccgtaagatttgcggctgctgtttgtcaatgccaaattgccattgcctgcagctgcagtagctgtgtctggctctcctttgtccgcgccatcagagaacaggagcgtcgcagcgtgctggtggacttgcttgcttgctcgtggtgtgtacgagtacggtgccgtggatgcagcggtgtcgccaccgcgcgtggttcgggagggggcacggcgctggtcccggaccgacgtgcgtatggcggaggcggagcaggtccgatcaagatcagacgccgggtccggccggtggggtgggggcactgacagccagagcggcaggaggaggaccacacggccgggcacccaacctctccccgtgctagagaaaagagtcgaactaccccctagatagaa

SEQ ID NO: 27430 - DNA, 315 bp, Zea Mays
agcttttccctccgtaaaaatagccgcaccccctacccaaaccaccggcgcgcacgccaagcggtgaagcagcatcggccatggaggagaccaagccagcgccagaggccatgctccgctgcgccagggccgcgctcctcctcgcctccctccgccggccacgcgcgccgacgccgacacaggatcgccgccggacctcctactctccctcctcggccgccgcagcgaaagctgtgcgtcctggactccggtctccgggagatgttgcatgtttcgtcgatgcacattggtcagattcagaacgggacgatgcag

SEQ ID NO: 27431 - DNA, 1484 bp, Zea Mays
tcaatcgaatcgaattggaaaaaaaaaaaggaacgtaaaattaatctgctactaggagaggcacaagtgcgtgcgtgcgtgcgttcgtccggggctccgggctgtgccggccgggcgatcgatcggcgatggcgccgccgtcgagggactactggctcggcttcttccgcggcgcgggggacaacatcttcgacgccatcgaggcggccatcaccgtcgccgcatccgaccacccggccgccctccgggagcgccgcgacggcatcgccgagcgcctcttcaccgcgctcctggtcaccagcgccgcggcagcggccgcgggggcggcggcggcggccccgggaggaggagcagcggggggaacccccgtggctggggcgcccactccggcacagctccaccccgagggcgccgccagcgtgcccagcctctgcagctccgaccgcgccgaggccatcgccgacgacgccgcgccgcgctgcgacgatcctgtcctcgccgagacggagcgcatcaaggccgtcctcctcagcgaccaagagaagccggaggccgagttgctggagctactccggcggctgcaggagctggacctcgcgttcgacaccttggatgccaccgcgattggcaaagcagttgccaacttccggaagcacagctccaagcagattcggaatctcgtgagatcgctcatcgaagactggaaacacacagttgacgtgtggattgctcaccgcagagatgctgttgtagatcaaacacctcagtccatgggtccttcaagcttggagcaggaggatcgaggggcggcttccacccacatggatgaaggcgacctcttcgcaacgccgagcactacaattcggctgtccgaggagaacatggatggcgatggaagcatcatgaccaatgacagtagggactgtgggcagcggtacccgatgatgaaccaagaaccggctagaaggcctccgccaatgggccagcggtacgacccagagccatgctggaggcagtctcggccgcaggaactgagcaacgggcagacaaaggagcagttcgtcgcggagatgcttgccagaccctcgagcgtggagtcgggccccgggagaccgcaggcgaggcctaggcagcagcaccaggacaccccagcagctcaagccaggccgcagccggctgcgtccgagaaaccggcggctcaactcgacgcgaactctgtgcgagcgaagctggagctcgcgaagaacgccaagctcgaggcgaccaagaggaagctccaggaagggtaccaagaatccgataacggacgctgcctgtcatcggaatgaggatgttctctgcttgctttgtcgcgctgctgcacccggctttttcaggcgcgggcgccttttgggagtagggccttttcgctgaattcagcgtagcttgtctcctgcagaggctgaagaattacgatggcaatataccatcatggcctgcaactg

SEQ ID NO: 27432 - DNA, 902 bp, Zea Mays
cttcaagcttggagcaggaggatcgaggggcggcttccacccacatggatgaaggcgacctcttcgcaacgccgagcactacaattcggctgtccgaggcatcatgaccaatgacagtagggactgtgggcagcggtacccgatgatgaaccaagaaccggctagaaggcctccgccaatgggccagcggtacgacccagagccatgctggaggcagtctcggccgcaggaactgagcaacgggcagacaaaggagcagttcgtcgcggagatgcttgccagaccctcgagcgtggagtcgggccccgggagaccgcaggcgaggcctaggcagcagcaccaggacaccccagcagctcaagccaggccgcagccggctgcgtccgagaaaccggcggctcaactcgacgcgaactctgtgcgagcgaagctggagctcgcgaagaacgccaagctcgaggcgaccaagaggaagctccaggaagggtaccaagaatccgataacgcgaagaagcagaggaacgtacagatggtgggtccgcagaacctgcccaagcaagggaacacgaacaacaaccgtagtttccagcctagcggtagcggcaggccaaggagtagcggcaacgtcaatagcaacaggaactggtcaagatgagaggcaccgattccaattccgattccaattccttcaagagcggcaggatcccttttctttttctttttctttttacatcggctacaacaatttttagtctaggccagtagtacataaacagcaataaggcttgttttcggaattgcatgtttggcatgtcacaatgctcggctggctggtctttgccgatgaaacctgtaaagataacactaccaaattctgatcttgagcttactatccatgctag

SEQ ID NO: 27433 - DNA, 1822 bp, Zea Mays
aatcaatcgaatcgaattggaaaaaaaaaaaggaacgtaaaattaatctgctactaggagaggcacaagtgcgtgcgtgcgtgcgttcgtccggggctccgggctgtgccggccgggcgatcgatcggcgatggcgccgccgtcgagggactactggctcggcttcttccgcggcgcgggggacaacatcttcgacgccatcgaggcggccatcaccgtcgccgcatccgaccacccggccgccctccgggagcgccgcgacggcatcgccgagcgcctcttcaccgcgctcctggtcaccagcgccgcggcagcggccgcgggggcggcggcggcggccccgggaggaggagcagcggggggaacccccgtggctggggcgcccactccggcacagctccaccccgagggcgccgccagcgtgcccagcctctgcagctccgaccgcgccgaggccatcgccgacgacgccgcgccgcgctgcgacgatcctgtcctcgccgagacggagcgcatcaaggccgtcctcctcagcgaccaagagaagccggaggccgagttgctggagctactccggcggctgcaggagctggacctcgcgttcgacaccttggatgccaccgcgattggcaaagcagttgccaacttccggaagcacagctccaagcagattcggaatctcgtgagatcgctcatcgaagactggaaacacacagttgacgtgtggattgctcaccgcagagatgctgttgtagatcaaacacctcagtccatgggtccttcaagcttggagcaggaggatcgaggggcggcttccacccacatggatgaaggcgacctcttcgcaacgccgagcactacaattcggctgtccgaggagaacatggatggcgatggaagcatcatgaccaatgacagtagggactgtgggcagcggtacccgatgatgaaccaagaaccggctagaaggcctccgccaatgggccagcggtacgacccagagccatgctggaggcagtctcggccgcaggaactgagcaacgggcagacaaaggagcagttcgtcgcggagatgcttgccagaccctcgagcgtggagtcgggccccgggagaccgcaggcgaggcctaggcagcagcaccaggacaccccagcagctcaagccaggccgcagccggctgcgtccgagaaaccggcggctcaactcgacgcgaactctgtgcgagcgaagctggagctcgcgaagaacgccaacagcaccaggacaccccagcagctcaagccaggccgcagccggctgcgtccgagaaaccggcggctcaactcgacgcgaactctgtgcgagcgaagctggagctcgcgaagaacgccaagctcgaggcgaccaagaggaagctccaggaagggtaccaagaatccgataacgcgaagaagcagaggaacgtacagatggtgggtccgcagaacctgcccaagcaagggaacacgaacaacaaccgtagtttccagcctagcggtagcggcaggccaaggagtagcggcaacgtcaatagcaacaggaactggtcaagatgagaggcaccgattccaattccgattccaattccttcaagagcggcaggatcccttttctttttctttttctttttacatcggctacaacaatttttagtctaggccagtagtacataaacagcaataaggcttgttttcggaattgcatgtttggcatgtcacaatgctcggctggctggtctttgccgatgaaacctgtaaagataacactaccaaattctgatcttgagcttactatccatgctag

SEQ ID NO: 27434 - DNA, 1844 bp, Zea Mays
agaagacccccaatcaatcgaatcgaattggaaaaaaaaaaaggaacgtaaaattaatctgctactaggagaggcacaagtgcgtgcgtgcgtgcgttcgtccggggctccgggctgtgccggccgggcgatcgatcggcgatggcgccgccgtcgagggactactggctcggcttcttccgcggcgcgggggacaacatcttcgacgccatcgaggcggccatcaccgtcgccgcatccgaccacccggccgccctccgggagcgccgcgacggcatcgccgagcgcctcttcaccgcgctcctggtcaccagcgccgcggcagcggccgcgggggcggcggcggcggccccgggaggaggagcagcggggggaacccccgtggctggggcgcccactccggcacagctccaccccgagggcgccgccagcgtgcccagcctctgcagctccgaccgcgccgaggccatcgccgacgacgccgcgccgcgctgcgacgatcctgtcctcgccgagacggagcgcatcaaggccgtcctcctcagcgaccaagagaagccggaggccgagttgctggagctactccggcggctgcaggagctggacctcgcgttcgacaccttggatgccaccgcgattggcaaagcagttgccaacttccggaagcacagctccaagcagattcggaatctcgtgagatcgctcatcgaagactggaaacacacagttgacgtgtggattgctcaccgcagagatgctgttgtagatcaaacacctcagtccatgggtccttcaagcttggagcaggaggatcgaggggcggcttccacccacatggatgaaggcgacctcttcgcaacgccgagcactacaattcggctgtccgaggagaacatggatggcgatggaagcatcatgaccaatgacagtagggactgtgggcagcggtacccgatgatgaaccaagaaccggctagaaggcctccgccaatgggccagcggtacgacccagagccatgctggaggcagtctcggccgcaggaactgagcaacgggcagacaaaggagcagttcgtcgcggagatgcttgccagaccctcgagcgtggagtcgggccccgggagaccgcaggcgaggcctaggcagcagcaccaggacaccccagcagctcaagccaggccgcagccggctgcgtccgagaaaccggcggctcaactcgacgcgaactctgtgcgagcgaagctggagctcgcgaagaacgccaagctcgaggcagcagcaccaggacaccccagcagctcaagccaggccgcagccggctgcgtccgagaaaccggcggctcaactcgacgcgaactctgtgcgagcgaagctggagctcgcgaagaacgccaagctcgaggcgaccaagaggaagctccaggaagggtaccaagaatccgataacgcgaagaagcagaggaacgtacagatggtgggtccgcagaacctgcccaagcaagggaacacgaacaacaaccgtagtttccagcctagcggtagcggcaggccaaggagtagcggcaacgtcaatagcaacaggaactggtcaagatgagaggcaccgattccaattccgattccaattccttcaagagcggcaggatcccttttctttttctttttctttttacatcggctacaacaatttttagtctaggccagtagtacataaacagcaataaggcttgttttcggaattgcatgtttggcatgtcacaatgctcggctggctggtctttgccgatgaaacctgtaaagataacactaccaaattctgatcttgagcttactatccatgctag

SEQ ID NO: 27435 - DNA, 1864 bp, Zea Mays
agaagacccccaatcaatcgaatcgaattggaaaaaaaaaaaggaacgtaaaattaatctgctactaggagaggcacaagtgcgtgcgtgcgtgcgttcgtccggggctccgggctgtgccggccgggcgatcgatcggcgatggcgccgccgtcgagggactactggctcggcttcttccgcggcgcgggggacaacatcttcgacgccatcgaggcggccatcaccgtcgccgcatccgaccacccggccgccctccgggagcgccgcgacggcatcgccgagcgcctcttcaccgcgctcctggtcaccagcgccgcggcagcggccgcgggggcggcggcggcggccccgggaggaggagcagcggggggaacccccgtggctggggcgcccactccggcacagctccaccccgagggcgccgccagcgtgcccagcctctgcagctccgaccgcgccgaggccatcgccgacgacgccgcgccgcgctgcgacgatcctgtcctcgccgagacggagcgcatcaaggccgtcctcctcagcgaccaagagaagccggaggccgagttgctggagctactccggcggctgcaggagctggacctcgcgttcgacaccttggatgccaccgcgattggcaaagcagttgccaacttccggaagcacagctccaagcagattcggaatctcgtgagatcgctcatcgaagactggaaacacacagttgacgtgtggattgctcaccgcagagatgctgttgtagatcaaacacctcagtccatgggtccttcaagcttggagcaggaggatcgaggggcggcttccacccacatggatgaaggcgacctcttcgcaacgccgagcactacaattcggctgtccgaggagaacatggatggcgatggaagcatcatgaccaatgacagtagggactgtgggcagcggtacccgatgatgaaccaagaaccggctagaaggcctccgccaatgggccagcggtacgacccagagccatgctggaggcagtctcggccgcaggaactgagcaacgggcagacaaaggagcagttcgtcgcggagatgcttgccagaccctcgagcgtggagtcgggccccgggagaccgcaggcgaggcctaggcagcagcaccaggacaccccagcagctcaagccaggccgcagccggctgcgtccgagaaaccggcggctcaactcgacgcgaactctgtgcgagcgaagctggagctcgcgaagaacgccaagctcgaggcgaccaagaggaagcctaggcagcagcaccaggacaccccagcagctcaagccaggccgcagccggctgcgtccgagaaaccggcggctcaactcgacgcgaactctgtgcgagcgaagctggagctcgcgaagaacgccaagctcgaggcgaccaagaggaagctccaggaagggtaccaagaatccgataacgcgaagaagcagaggaacgtacagatggtgggtccgcagaacctgcccaagcaagggaacacgaacaacaaccgtagtttccagcctagcggtagcggcaggccaaggagtagcggcaacgtcaatagcaacaggaactggtcaagatgagaggcaccgattccaattccgattccaattccttcaagagcggcaggatcccttttctttttctttttctttttacatcggctacaacaatttttagtctaggccagtagtacataaacagcaataaggcttgttttcggaattgcatgtttggcatgtcacaatgctcggctggctggtctttgccgatgaaacctgtaaagataacactaccaaattctgatcttgagcttactatccatgctag

SEQ ID NO: 27436 - DNA, 1693 bp, Zea Mays
aagaagacccccaatcaatcgaatcgaattggaaaaaaaaaaaggaacgtaaaattaatctgctactaggagaggcacaagtgcgtgcgtgcgtgcgttcgtccggggctccgggctgtgccggccgggcgatcgatcggcgatggcgccgccgtcgagggactactggctcggcttcttccgcggcgcgggggacaacatcttcgacgccatcgaggcggccatcaccgtcgccgcatccgaccacccggccgccctccgggagcgccgcgacggcatcgccgagcgcctcttcaccgcgctcctggtcaccagcgccgcggcagcggccgcgggggcggcggcggcggccccgggaggaggagcagcggggggaacccccgtggctggggcgcccactccggcacagctccaccccgagggcgccgccagcgtgcccagcctctgcagctccgaccgcgccgaggccatcgccgacgacgccgcgccgcgctgcgacgatcctgtcctcgccgagacggagcgcatcaaggccgtcctcctcagcgaccaagagaagccggaggccgagttgctggagctactccggcggctgcaggagctggacctcgcgttcgacaccttggatgccaccgcgattggcaaagcagttgccaacttccggaagcacagctccaagcagattcggaatctcgtgagatcgctcatcgaagactggaaacacacagttgacgtgtggattgctcaccgcagagatgctgttgtagatcaaacacctcagtccatgggtccttcaagcttggagcaggaggatcgaggggcggcttccacccacatggatgaaggcgacctcttcgcaacgccgagcactacaattcggctgtccgaggcatcatgaccaatgacagtagggactgtgggcagcggtacccgatgatgaaccaagaaccggctagaaggcctccgccaatgggccagcggtacgacccagagccatgctggaggcagtctcggccgcaggaactgagcaacgggcagacaaaggagcagttcgtcgcggagatgcttgccagaccctcgagcgtggagtcgggccccgggagaccgcaggcgaggcctaggcagcagcaccaggacaccccagcagctcaagccaggccgcagccggctgcgtccgagaaaccggcggctcaactcgacgcgaactctgtgcgagcgaagctggagctcgcgaagaacgccaagctcgaggcgaccaagaggaagctccaggaagggtaccaagaatccgataacgcgaagaagcagaggaacgtacagatggtgggtccgcagaacctgcccaagcaagggaacacgaacaacaaccgtagtttccagcctagcggtagcggcaggccaaggagtagcggcaacgtcaatagcaacaggaactggtcaagatgagaggcaccgattccaattccgattccaattccttcaagagcggcaggatcccttttctttttctttttctttttacatcggctacaacaatttttagtctaggccagtagtacataaacagcaataaggcttgttttcggaattgcatgtttggcatgtcacaatgctcggctggctggtctttgccgatgaaacctgtaaagataacactaccaaattctgatcttgagcttactatccatgctag

SEQ ID NO: 27437 - DNA, 1880 bp, Zea Mays
tgaaccaatcaacccactccacagagttactagcactgcaaaacttgtgacattgtgctctctgttttcgaaacaagagggtgaaactctttgaaaaggatcctgcaaggcaagtagcgacatatgttgaggccgtgaaaactgtagacccgatgaaggcagtcgggaagccccatactctgtgggtggcatttgcaaagatgtacgagaaacacaatcgtctagatagtgctgaagatatcttcaaacgggctactcaagtgaattataaggcagttgaccacttagccagtatctggtgtgagtgggcagagatggagctacgccacaacaattttgacaaggctattgagctgatgaggcaagcaacagcagagccctctgttgaactgctgctgagggggatgagcctgtccaaatgaaagtgcacaaatctttgaaactgtggagcttttatgttgatctggaggagagccttggaaccttagactctacacgtgtagtttatgagagaatactggatttacgaattgccactccacagataattctcaattatgcatatcttcttgaggagcacaagtatttcgaagatgcatttaaagtgtatgaaaggggcgtgaaaatattcaagtatccccatgttaaggccatttgggtaacctaccttacaaagtttgtacatagatacaagagaagcaagttagaacgagcaagagaacttttccatgaagctgtccaacaggctcctccagaggaaaagaagcccctatatttacaatgggcaaaactggaagaggactatggtcttgcaaaacgtgctatgaatgtatatgatgaatctgtaagagctgttcctggcagtgaaaaaatggccatgtatgaaatctatatagcacgtgctgccgaactctttggtgttccaaggacaagacaaatatacgagcaagcaattgaatctggcctcccagacaaagatgttctgacaatgtgcatgaagttcgctgaactagagagaagccttggtgaaattgatcgtttcgcgtgccatctatgtgcatgcatccaactatgctgatccaaataatcctgacttttggaagaagtggaatgactttgagattcagcacggtaacgaagacacattcagggagatgcttcgtatcaaacggacagtggctgctagccgtagtcagacacatttcatactaccggagtacttgatgcagaaggatcataggttaaacctggacgaagccgttgacactctgaaacgtgctggcgtccctgaggacgagatggcagccttggaaaggcaactggctcctggaccatccactgcaccagcagcaacaccaactgccccagcctctgctaacaggacgatgaattttgtcagtgctggagtagaggcgcaggcagacagcagcaggcaacaggctggtaacaacgaggacattgagctgcccgacgagagtgacgacgaggaacccgatgtccaaattgcggagaagagtgttcctgctgcggtatttggtgagctcggcaagagagctgccgagaagaacgaggaaagctcaggtgcccaaggaaatgagcagctgggcgccctcgagaggataaagagacgacgccaatagtaagccgttgctaagattgtgcagccgtggtatcagcacgagctttatttaacgatgttgtacttgttacgtgtaaacaatttctttgtacaaacattgaagggagttgatcggcgtggccatttctgtgtagtcttgggtttgtttcttctccctcgaaagaacatgacaccaaaacatcatttctttggttcgtttctagattttattcgtccaaagcattagacgtgaagaaagcca

SEQ ID NO: 27438 - DNA, 1865 bp, Zea Mays
ggaaaatttgtgatgaaccaatcaacccactccacagagttactagcactgcaaaacttgtgacattgtgctctctgttttcgaaacaagagggtgaaactctttgaaaaggatcctgcaaggcaagtagcgacatatgttgaggccgtgaaaactgtagacccgatgaaggcagtcgggaagccccatactctgtgggtggcatttgcaaagatgtacgagaaacacaatcgtctagatagtgctgaagatatcttcaaacgggctactcaagtgaattataaggcagttgaccacttagccagtatctggtgtgagtgggcagagatggagctacgccacaacaattttgacaaggctattgagctgatgagctgctgctgagggggatgagcctgtccaaatgaaagtgcacaaatctttgaaactgtggagcttttatgttgatctggaggagagccttggaaccttagactctacacgtgtagtttatgagagaatactggatttacgaattgccactccacagataattctcaattatgcatatcttcttgaggagcacaagtatttcgaagatgcatttaaagtgtatgaaaggggcgtgaaaatattcaagtatccccatgttaaggccatttgggtaacctaccttacaaagtttgtacatagatacaagagaagcaagttagaacgagcaagagaacttttccatgaagctgtccaacaggctcctccagaggaaaagaagcccctatatttacaatgggcaaaactggaagaggactatggtcttgcaaaacgtgctatgaatgtatatgatgaatctgtaagagctgttcctggcagtgaaaaaatggccatgtatgaaatctatatagcacgtgctgccgaactctttggtgttccaaggacaagacaaatatacgagcaagcaattgaatctggcctcccagacaaagatgttctgacaatgtgcatgaagttcgctgaactagagagaagccttggtgaaattgatcgtttcgcgtgccatctatgtgcatgcatccaactatgctgatccaaataatcctgacttttggaagaagtggaatgactttgagattcagcacggtaacgaagacacattcagggagatgcttcgtatcaaacggacagtggctgctagccgtagtcagacacatttcatactaccggagtacttgatgcagaaggatcataggttaaacctggacgaagccgttgacactctgaaacgtgctggcgtccctgaggacgagatggcagccttggaaaggcaactggctcctggaccatccactgcaccagcagcaacaccaactgccccagcctctgctaacaggacgatgaattttgtcagtgctggagtagaggcgcaggcagacagcagcaggcaacaggctggtaacaacgaggacattgagctgcccgacgagagtgacgacgaggaacccgatgtccaaattgcggagaagagtgttcctgctgcggtatttggtgagctcggcaagagagctgccgagaagaacgaggaaagctcaggtgcccaaggaaatgagcagctgggcgccctcgagaggataaagagacgacgccaatagtaagccgttgctaagattgtgcagccgtggtatcagcacgagctttatttaacgatgttgtacttgttacgtgtaaacaatttctttgtacaaacattgaagggagttgatcggcgtggccatttctgtgtagtcttgggtttgtttcttctccctcgaaagaacatgacaccaaaacatcatttctttggttcgtttctagattttattcgtccaaagcattagacgtgaagaaagcca

SEQ ID NO: 27439 - DNA, 1924 bp, Zea Mays
actacatcattttttgttggaaaatttgtgatgaaccaatcaacccactccacagagttactagcactgcaaaacttgtgacattgtgctctctgttttcgaaacaagagggtgaaactctttgaaaaggatcctgcaaggcaagtagcgacatatgttgaggccgtgaaaactgtagacccgatgaaggcagtcgggaagccccatactctgtgggtggcatttgcaaagatgtacgagaaacacaatcgtctagatagtgctgaagatatcttcaaacgggctactcaagtgaattataaggcagttgaccacttagccagtatctggtgtgagtgggcagagatggagctacgccacaacaattttgacaaggctattgagctgatgaggcaagcaacagcagagccctctgttgaagttaagcggcgggctgctgctgagggggatgagcctgtccaaatgaaagtgcacaaatctttgaaactgtggagcttttatgttgatctggaggagagccttggaaccttagactctacacgtgtagtttatgagagaatactggatttacgaattgccactccacagataattctcaattatgcatatcttcttgaggagcacaagtatttcgaagatgcatttaaagtgtatgaaaggggcgtgaaaatattcaagtatccccatgttaaggccatttgggtaacctaccttacaaagtttgtacatagatacaagagaagcaagttagaacgagcaagagaacttttccatgaagctgtccaacaggctcctccagaggaaaagaagcccctatatttacaatgggcaaaactggaagaggactatggtcttgcaaaacgtgctatgaatgtatatgatgaatctgtaagagctgttcctggcagtgaaaaaatggccatgtatgaaatctatatagcacgtgctgccgaactctttggtgttccaaggacaagacaaatatacgagcaagcaattgaatctggcctcccagacaaagatgttctgacaatgtgcatgaagttcgctgaactagagagaagccttggtgaaattgatcgtttcgcgtgccatctatgtgcatgcatccaactatgctgatccaaataatcctgacttttggaagaagtggaatgactttgagattcagcacggtaacgaagacacattcagggagatgcttcgtatcaaacggacagtggctgctagccgtagtcagacacatttcatactaccggagtacttgatgcagaaggatcataggttaaacctggacgaagccgttgacactctgaaacgtgctggcgtccctgaggacgagatggcagccttggaaaggcaactggctcctggaccatccactgcaccagcagcaacaccaactgccccagcctctgctaacaggacgatgaattttgtcagtgctggagtagaggcgcaggcagacagcagcaggcaacaggctggtaacaacgaggacattgagctgcccgacgagagtgacgacgaggaacccgatgtccaaattgcggagaagagtgttcctgctgcggtatttggtgagctcggcaagagagctgccgagaagaacgaggaaagctcaggtgcccaaggaaatgagcagctgggcgccctcgagaggataaagagacgacgccaatagtaagccgttgctaagattgtgcagccgtggtatcagcacgagctttatttaacgatgttgtacttgttacgtgtaaacaatttctttgtacaaacattgaagggagttgatcggcgtggccatttctgtgtagtcttgggtttgtttcttctccctcgaaagaacatgacaccaaaacatcatttctttggttcgtttctagattttattcgtccaaagcattagacgtgaagaaagcca

SEQ ID NO: 27440 - DNA, 3135 bp, Zea Mays
gacgccgcgccgccaatcgccgcccagctgccggtcttccccgcgcgacctaccccgtcgcctgctaccatgccaggccgggctcttaaatcctagctaggctcagccaatccccgcgccaggatgccgtcaacctcgggtccggttgccgtggcgtcggcttcggcgtcggcgaaagccgcgccgtccccggacgtcgggatctcgccggacctgtacccgtcggaggacgacctggcctacgaggaggagatcctgcgcgagcccttcaagctcaaggggtggtggcgctacctcgtggcccgcgccgccgcgccgttcgccaagcgcgccgtcatctacgagcgcgcgctcaaggcgctcccggggagctacaagctctggcacgcctacctccgcgaccgcctcgaccacgcgcgcccgcaccccatcgatcaccccgcctactcctccctcaacaacaccttcgagcgggcgctagccaccatgcacaagatgccgcgcgtctgggtcctctacctcacctcactcctcgaccagcgcctgctcacgcgcgcgcgccgcgccttcgaccgcgccctccgcgcgctccccgtcacgcagcacgaccgcatctggccgctgtaccttcgcctcgcttcgctcccggcctgccccgtagagacgtcgctccgagtcttccgccgatatctccaattcgacccctcccacgccgaggacttcatcaacttccttgtatccaccaaccactggcaggaggctgctaaccgtctagcttccgtgctcaacgacgatgggttccgctccgtcaaggggaaaacaaggcaccagctctggctcgagctctgcgatatcctcaccaaacatgctgatgaggttgccggcctcaaggtagacgccatactgcgtggtgggatacgcaagttcaccgatgaggtcggcaagctgtggacctcactggctgattactatgttaggagaggcctttttgaaaaagctagggatgtattcgaggagggtgtttcttcagtggttaccgtcaaggagttcagcgtggtatttgaggcatatacacagtttgagcagagtatgcttgcggcaaagctcgaggctgctgaggaagaaggggctgaggatgtgaacgagggagggggcaagaagagcgggatcgataatttatcgaagaaattcctcgatggattctggttgaacgacgaagatgatactgatttgaggatggcaaggtttgagcggctgttggatcgcagaccagagcttcttagcagcgtgctgttgcgacagaatccacacaatgtggaggagtggcacaggagggtgaaactctttgaaaaggatcctgcaaggcaagtagcgacatatgttgaggccgtgaaaactgtagacccgatgaaggcagtcgggaagccccatactctgtgggtggcatttgcaaagatgtacgagaaacacaatcgtctagatagtgctgaagatatcttcaaacgggctactcaagtgaattataaggcagttgaccacttagccagtatctggtgtgagtgggcagagatggagctacgccacaacaattttgacaaggctattgagctgatgaggcaagcaacagcagagccctctgttgaactgctgctgagggggatgagcctgtccaaatgaaagtgcacaaatctttgaaactgtggagcttttatgttgatctggaggagagccttggaaccttagactctacacgtgtagtttatgagagaatactggatttacgaattgccactccacagataattctcaattatgcatatcttcttgaggagcacaagtatttcgaagatgcatttaaagtgtatgaaaggggcgtgaaaatattcaagtatccccatgttaaggccatttgggtaacctaccttacaaagtttgtacatagatacaagagaagcaagttagaacgagcaagagaacttttccatgaagctgtccaacaggctcctccagaggaaaagaagcccctatatttacaatgggcaaaactggaagaggactatggtcttgcaaaacgtgctatgaatgtatatgatgaatctgtaagagctgttcctggcagtgaaaaaatggccatgtatgaaatctatatagcacgtgctgccgaactctttggtgttccaaggacaagacaaatatacgagcaagcaattgaatctggcctcccagacaaagatgttctgacaatgtgcatgaagttcgctgaactagagagaagccttggtgaaattgatcgtttcgcgtgccatctatgtgcatgcatccaactatgctgatccaaataatcctgacttttggaagaagtggaatgactttgagattcagcacggtaacgaagacacattcagggagatgcttcgtatcaaacggacagtggctgctagccgtagtcagacacatttcatactaccggagtacttgatgcagaaggatcataggttaaacctggacgaagccgttgacactctgaaacgtgctggcgtccctgaggacgagatggcagccttggaaaggcaactggctcctggaccatccactgcaccagcagcaacaccaactgccccagcctctgctaacaggacgatgaattttgtcagtgctggagtagaggcgcaggcagacagcagcaggcaacaggctggtaacaacgaggacattgagctgcccgacgagagtgacgacgaggaacccgatgtccaaattgcggagaagagtgttcctgctgcggtatttggtgagctcggcaagagagctgccgagaagaacgaggaaagctcaggtgcccaaggaaatgagcagctgggcgccctcgagaggataaagagacgacgccaatagtaagccgttgctaagattgtgcagccgtggtatcagcacgagctttatttaacgatgttgtacttgttacgtgtaaacaatttctttgtacaaacattgaagggagttgatcggcgtggccatttctgtgtagtcttgggtttgtttcttctccctcgaaagaacatgacaccaaaacatcatttctttggttcgtttctagattttattcgtccaaagcattagacgtgaagaaagcca

SEQ ID NO: 27441 - DNA, 3121 bp, Zea Mays
cccatcgcgtcgaggacgccgcgccgccaatcgccgcccagctgccggtcttccccgcgcgacctaccccgtcgcctgctaccatgccaggccgggctcttaaatcctagctaggctcagccaatccccgcgccaggatgccgtcaacctcgggtccggttgccgtggcgtcggcttcggcgtcggcgaaagccgcgccgtccccggacgtcgggatctcgccggacctgtacccgtcggaggacgacctggcctacgaggaggagatcctgcgcgagcccttcaagctcaaggggtggtggcgctacctcgtggcccgcgccgccgcgccgttcgccaagcgcgccgtcatctacgagcgcgcgctcaaggcgctcccggggagctacaagctctggcacgcctacctccgcgaccgcctcgaccacgcgcgcccgcaccccatcgatcaccccgcctactcctccctcaacaacaccttcgagcgggcgctagccaccatgcacaagatgccgcgcgtctgggtcctctacctcacctcactcctcgaccagcgcctgctcacgcgcgcgcgccgcgccttcgaccgcgccctccgcgcgctccccgtcacgcagcacgaccgcatctggccgctgtaccttcgcctcgcttcgctcccggcctgccccgtagagacgtcgctccgagtcttccgccgatatctccaattcgacccctcccacgccgaggacttcatcaacttccttgtatccaccaaccactggcaggaggctgctaaccgtctagcttccgtgctcaacgacgatgggttccgctccgtcaaggggaaaacaaggcaccagctctggctcgagctctgcgatatcctcaccaaacatgctgatgaggttgccggcctcaaggtagacgccatactgcgtggtgggatacgcaagttcaccgatgaggtcggcaagctgtggacctcactggctgattactatgttaggagaggcctttttgaaaaagctagggatgtattcgaggagggtgtttcttcagtggttaccgtcaaggagttcagcgtggtatttgaggcatatacacagtttgagcagagtatgcttgcggcaaagctcgaggctgctgaggaagaaggggctgaggatgtgaacgagggagggggcaagaagagcgggatcgataatttatcgaagaaattcctcgatggattctggttgaacgacgaagatgatactgatttgaggatggcaaggtttgagcggctgttggatcgcagaccagagcttcttagcagcgtgctgttgcgacagaatccacacaatgtggaggagtggcacaggagggtgaaactctttgaaaaggatcctgcaaggcaagtagcgacatatgttgaggccgtgaaaactgtagacccgatgaaggcagtcgggaagccccatactctgtgggtggcatttgcaaagatgtacgagaaacacaatcgtctagatagtgctgaagatatcttcaaacgggctactcaagtgaattataaggcagttgaccacttagccagtatctggtgtgagtgggcagagatggagctacgccacaacaattttgacaaggctattgagctgatgagctgctgctgagggggatgagcctgtccaaatgaaagtgcacaaatctttgaaactgtggagcttttatgttgatctggaggagagccttggaaccttagactctacacgtgtagtttatgagagaatactggatttacgaattgccactccacagataattctcaattatgcatatcttcttgaggagcacaagtatttcgaagatgcatttaaagtgtatgaaaggggcgtgaaaatattcaagtatccccatgttaaggccatttgggtaacctaccttacaaagtttgtacatagatacaagagaagcaagttagaacgagcaagagaacttttccatgaagctgtccaacaggctcctccagaggaaaagaagcccctatatttacaatgggcaaaactggaagaggactatggtcttgcaaaacgtgctatgaatgtatatgatgaatctgtaagagctgttcctggcagtgaaaaaatggccatgtatgaaatctatatagcacgtgctgccgaactctttggtgttccaaggacaagacaaatatacgagcaagcaattgaatctggcctcccagacaaagatgttctgacaatgtgcatgaagttcgctgaactagagagaagccttggtgaaattgatcgtttcgcgtgccatctatgtgcatgcatccaactatgctgatccaaataatcctgacttttggaagaagtggaatgactttgagattcagcacggtaacgaagacacattcagggagatgcttcgtatcaaacggacagtggctgctagccgtagtcagacacatttcatactaccggagtacttgatgcagaaggatcataggttaaacctggacgaagccgttgacactctgaaacgtgctggcgtccctgaggacgagatggcagccttggaaaggcaactggctcctggaccatccactgcaccagcagcaacaccaactgccccagcctctgctaacaggacgatgaattttgtcagtgctggagtagaggcgcaggcagacagcagcaggcaacaggctggtaacaacgaggacattgagctgcccgacgagagtgacgacgaggaacccgatgtccaaattgcggagaagagtgttcctgctgcggtatttggtgagctcggcaagagagctgccgagaagaacgaggaaagctcaggtgcccaaggaaatgagcagctgggcgccctcgagaggataaagagacgacgccaatagtaagccgttgctaagattgtgcagccgtggtatcagcacgagctttatttaacgatgttgtacttgttacgtgtaaacaatttctttgtacaaacattgaagggagttgatcggcgtggccatttctgtgtagtcttgggtttgtttcttctccctcgaaagaacatgacaccaaaacatcatttctttggttcgtttctagattttattcgtccaaagcattagacgtgaagaaagcca

SEQ ID NO: 27442 - DNA, 1289 bp, Zea Mays
gttcgagttcctctccagccaggaagttgttgacagggttgccatgtatcaagatcctcgggatgcctgctcagcaatcgctgctgagtcatacaaactatggcttgagcatgaaaacaggacagatgatataacaataatcattgtgcatattcgagacatggaaaatgcaggtcaggtcctgcagggagtgacaaagcggactatggtagcatcggagcatcaatagctgggcagacaatacagtcagagatacctgtatttgtacaaccagaagcaagtaacatgaacagatctgctgctaccggaatgcgatcaccgtcttttggctctccaactgaacggagcctctcatgtgttgctccttctcctacggatcctttgttgatacatggcagagtatcagatgcttccaagcctgggcaaagtgagcagcgagctgcatcacaaccaccggtacaaacttggcatcaaatagacggggttactactgagctggagcggtctatgcagcaaagcatccttccaacctcctgctgaaagtagagaatgcgagttgaatgacaaaaagaggcctcgagataacccaccgccatcttggagctactaaccgtaccatggatgcgatgtttgccagcagcaaatctcgtgctgttgctcgtgttttggtagagcacctgctgctgccgacgatgcgaggttcctgatcctgtgtgggatcatctaaccatgggctgagtggaattgagttattctccgtttcatttgtactttgtttacttttcacaagatatagattaattctaagttgatgcctgtcgaggtatcagtatcatttgagacgcaactgtgcattgtcgtccttccacagaattaggatctggaattgaaatgcgagtgccgtacagaacagatcagctgggtggcttttcagatgcaaagaagaatattggatttagcctgtaagctgacctgagagctctgtcaaccctttaaaagtgtgctacgcatatacgataccgtcagcgagctctgccaagaaacaaaggggcctgtttggttcagcttttttctaaccagtttttctgaaaatctggttgtggggagaatctggctgtggggagaatctgagtatcattactattacgtgtgaagtaagataaatttgtttatagtgctcatgatctagaaagtgacgaattcctactattacaacgactctaccgattatgtgtttatgttgattttggatgattttttgtcccaacgaattttatagaagctggctg

SEQ ID NO: 27443 - DNA, 2232 bp, Zea Mays
cccatttcttaactccccgagcccccaaaatcacgcacccagagaggggagaggcggagtgacgggggagaggcggaggccacgccccaaacccaaaccctagccacacgcgacgccgatgggatgcgcgcagggcaagtgctgcctgccgcggcacccgaggaggggctccgccgccgtcggcgggcgcggcggcgccacgcttggccgcgccgcggtgcccggggccgggctggtgctggagtacgccgcgttggccgtggcggggctctacccagactccccggccagggagtcccaggacacgcacctcgtcgccacgcgcttcgcgggggatcctgacctccacctcttcgccgtcttcgacggccacggcgctgccggagcctcctgcgccgggttcgcgcgggacgcgctcccgcgcctcctcctcgcctcgctcgccgcgggcccagccgccgcgttccgggacgccatgctggccgccaacgccgagatgcatgcggcgcccggcgtcgacgactccatgagcgggaccaccgccgtggccgccctcgtcgccggcggcgcgctccacgttgccaacgtcggcgactcgcgcgccgtcgccggtgtctggcgcgccggccggctcgtcgccgaggacctctcctgggaccagaccccgttccgcgccgacgagcgcgcgcgcgtcaaagcctgtggcgcccgcgtcatgtccgtcgagcaggtggagggcatgcgcgatcccgaggacgtgggctggacgcccaacgagggggacccgccacgcgtctgggcgcgcgacgcactctacccaggcaccgccttcacccgcagcctcggggacctcgccgccgaggccgtcggggtcatcgccgagccggaggtgaagagcgtcgagatcactccatcgcacctcttcttcgttgtcgccagcgatggcgtgttcgagttcctctccagccaggaagttgttgacagggttgccatgtatcaagatcctcgggatgcctgctcagcaatcgctgctgagtcatacaaactatggcttgagcatgaaaacaggacagatgatataacaataatcattgtgcatattcgagacatggaaaattcaggtcctgcagggagtgacaaagcggactatggtagcatcggagcatcaatagctgggcagacaatacagtcagagatacctgtatttgtacaaccagaagcaagtaacatgaacagatctgctgctaccggaatgcgatcaccgtcttttggctctccaactgaacggagcctctcatgtgttgctccttctcctacggatcctttgttgatacatggcagagtatcagatgcttccaagcctgggcaaagtgagcagcgagctgcatcacaaccaccggtacaaacttggcatcaaatagacggggttactactgagctggagcggtctatgcagcaaagcatccttccaacctcctgctgaaagtagagaatgcgagttgaatgacaaaaagaggcctcgagataacccaccgccatcttggagctactaaccgtaccatggatgcgatgtttgccagcagcaaatctcgtgctgttgctcgtgttttggtagagcacctgctgctgccgacgatgcgaggttcctgatcctgtgtgggatcatctaaccatgggctgagtggaattgagttattctccgtttcatttgtactttgtttacttttcacaagatatagattaattctaagttgatgcctgtcgaggtatcagtatcatttgagacgcaactgtgcattgtcgtccttccacagaattaggatctggaattgaaatgcgagtgccgtacagaacagatcagctgggtggcttttcagatgcaaagaagaatattggatttagcctgtaagctgacctgagagctctgtcaaccctttaaaagtgtgctacgcatatacgataccgtcagcgagctctgccaagaaacaaaggggcctgtttggttcagcttttttctaaccagtttttctgaaaatctggttgtggggagaatctggctgtggggagaatctgagtatcattactattacgtgtgaagtaagataaatttgtttatagtgctcatgatctagaaagtgacgaattcctactattacaacgactctaccgattatgtgtttatgttgattttggatgattttttgtcccaacgaattttatagaagctggctg

SEQ ID NO: 27444 - DNA, 2460 bp, Zea Mays
tccacttcttctccccgtcccatttcttaactccccgagcccccaaaatcacgcacccagagaggggagaggcggagtgacgggggagaggcggaggccacgccccaaacccaaaccctagccacacgcgacgccgatgggatgcgcgcagggcaagtgctgcctgccgcggcacccgaggaggggctccgccgccgtcggcgggcgcggcggcgccacgcttggccgcgccgcggtgcccggggccgggctggtgctggagtacgccgcgttggccgtggcggggctctacccagactccccggccagggagtcccaggacacgcacctcgtcgccacgcgcttcgcgggggatcctgacctccacctcttcgccgtcttcgacggccacggcgctgccggagcctcctgcgccgggttcgcgcgggacgcgctcccgcgcctcctcctcgcctcgctcgccgcgggcccagccgccgcgttccgggacgccatgctggccgccaacgccgagatgcatgcggcgcccggcgtcgacgactccatgagcgggaccaccgccgtggccgccctcgtcgccggcggcgcgctccacgttgccaacgtcggcgactcgcgcgccgtcgccggtgtctggcgcgccggccggctcgtcgccgaggacctctcctgggaccagaccccgttccgcgccgacgagcgcgcgcgcgtcaaagcctgtggcgcccgcgtcatgtccgtcgagcaggtggagggcatgcgcgatcccgaggacgtgggctggacgcccaacgagggggacccgccacgcgtctgggcgcgcgacgcactctacccaggcaccgccttcacccgcagcctcggggacctcgccgccgaggccgtcggggtcatcgccgagccggaggtgaagagcgtcgagatcactccatcgcacctcttcttcgttgtcgccagcgatggcgtgttcgagttcctctccagccaggaagttgttgacagggttgccatgtatcaagatcctcgggatgcctgctcagcaatcgctgctgagtcatacaaactatggcttgagcatgaaaacaggacagatgatataacaataatcattgtgcatattcgagacatggaaaatgcagtcaggtcctgcagggagtgacaaagcggactatggtagcatcggagcatcaatagctgggcagacaatacagtcagagatacctgtatttgtacaaccagaagcaagtaacatgaacagatctgctgctaccggaatgcgatcaccgtcttttggctctccaactgaacggagcctctcatgtgttgctccttctcctacggatcctttgttgatacatggcagagtatcagatgcttccaagcctgggcaaagtgagcagcgagctgcatcacaaccaccggtacaaacttggcatcaaatagacggggttactactgagctggagcggtctatgcagcaaagcatccttccaacctcctgctgaaagtagagaatgcgagttgaatgacaaaaagaggcctcgagataacccaccgccatcttgtaagattcgtctagatttagaggtatttgtttaggattataatctgtctagattatataatccaacaaattttgagctaagtattagtttaaaatttgttggattatacaatctggtcagattataattccaaacaaatatccccttagtcttttgtgccagatttttgtaggaaccgttattgagaggccgctgtcttctgcagggagctactaaccgtaccatggatgcgatgtttgccagcagcaaatctcgtgctgttgctcgtgttttggtagagcacctgctgctgccgacgatgcgaggttcctgatcctgtgtgggatcatctaaccatgggctgagtggaattgagttattctccgtttcatttgtactttgtttacttttcacaagatatagattaattctaagttgatgcctgtcgaggtatcagtatcatttgagacgcaactgtgcattgtcgtccttccacagaattaggatctggaattgaaatgcgagtgccgtacagaacagatcagctgggtggcttttcagatgcaaagaagaatattggatttagcctgtaagctgacctgagagctctgtcaaccctttaaaagtgtgctacgcatatacgataccgtcagcgagctctgccaagaaacaaaggggcctgtttggttcagcttttttctaaccagtttttctgaaaatctggttgtggggagaatctggctgtggggagaatctgagtatcattactattacgtgtgaagtaagataaatttgtttatagtgctcatgatctagaaagtgacgaattcctactattacaacgactctaccgattatgtgtttatgttgattttggatgattttttgtcccaacgaattttatagaagctggctg

SEQ ID NO: 27445 - DNA, 2349 bp, Zea Mays
cctcttcaatgcgcgcagcgtgccgtattgcgcctttctctctcgcatttggcgtttgaatcattccattttccagtctgcactctccagtctcctccacttcttctccccgtcccatttcttaactccccgagcccccaaaatcacgcacccagagaggggagaggcggagtgacgggggagaggcggaggccacgccccaaacccaaaccctagccacacgcgacgccgatgggatgcgcgcagggcaagtgctgcctgccgcggcacccgaggaggggctccgccgccgtcggcgggcgcggcggcgccacgcttggccgcgccgcggtgcccggggccgggctggtgctggagtacgccgcgttggccgtggcggggctctacccagactccccggccagggagtcccaggacacgcacctcgtcgccacgcgcttcgcgggggatcctgacctccacctcttcgccgtcttcgacggccacggcgctgccggagcctcctgcgccgggttcgcgcgggacgcgctcccgcgcctcctcctcgcctcgctcgccgcgggcccagccgccgcgttccgggacgccatgctggccgccaacgccgagatgcatgcggcgcccggcgtcgacgactccatgagcgggaccaccgccgtggccgccctcgtcgccggcggcgcgctccacgttgccaacgtcggcgactcgcgcgccgtcgccggtgtctggcgcgccggccggctcgtcgccgaggacctctcctgggaccagaccccgttccgcgccgacgagcgcgcgcgcgtcaaagcctgtggcgcccgcgtcatgtccgtcgagcaggtggagggcatgcgcgatcccgaggacgtgggctggacgcccaacgagggggacccgccacgcgtctgggcgcgcgacgcactctacccaggcaccgccttcacccgcagcctcggggacctcgccgccgaggccgtcggggtcatcgccgagccggaggtgaagagcgtcgagatcactccatcgcacctcttcttcgttgtcgccagcgatggcgtgttcgagttcctctccagccaggaagttgttgacagggttgccatgtatcaagatcctcgggatgcctgctcagcaatcgctgctgagtcatacaaactatggcttgagcatgaaaacaggacagatgatataacaataatcattgtgcatattcgagacatggaaaatgcagtcaggtcctgcagggagtgacaaagcggactatggtagcatcggagcatcaatagctgggcagacaatacagtcagagatacctgtatttgtacaaccagaagcaagtaacatgaacagatctgctgctaccggaatgcgatcaccgtcttttggctctccaactgaacggagcctctcatgtgttgctccttctcctacggatcctttgttgatacatggcagagtatcagatgcttccaagcctgggcaaagtgagcagcgagctgcatcacaaccaccggtacaaacttggcatcaaatagacggggttactactgagctggagcggtctatgcagcaaagcatccttccaacctcctgctgaaagtagagaatgcgagttgaatgacaaaaagaggcctcgagataacccaccgccatcttggagctactaaccgtaccatggatgcgatgtttgccagcagcaaatctcgtgctgttgctcgtgttttggtagagcacctgctgctgccgacgatgcgaggttcctgatcctgtgtgggatcatctaaccatgggctgagtggaattgagttattctccgtttcatttgtactttgtttacttttcacaagatatagattaattctaagttgatgcctgtcgaggtatcagtatcatttgagacgcaactgtgcattgtcgtccttccacagaattaggatctggaattgaaatgcgagtgccgtacagaacagatcagctgggtggcttttcagatgcaaagaagaatattggatttagcctgtaagctgacctgagagctctgtcaaccctttaaaagtgtgctacgcatatacgataccgtcagcgagctctgccaagaaacaaaggggcctgtttggttcagcttttttctaaccagtttttctgaaaatctggttgtggggagaatctggctgtggggagaatctgagtatcattactattacgtgtgaagtaagataaatttgtttatagtgctcatgatctagaaagtgacgaattcctactattacaacgactctaccgattatgtgtttatgttgattttggatgattttttgtcccaacgaattttatagaagctggctg

SEQ ID NO: 27446 - DNA, 2448 bp, Zea Mays
agcggcccatcgaatttggttgacgctgccactgggcatgtggggcactcctcttccggtcttcccagcgaacaacccgtgcgccacggcgcggcctcgggcccctcttcaatgcgcgcagcgtgccgtattgcgcctttctctctcgcatttggcgtttgaatcattccattttccagtctgcactctccagtctcctccacttcttctccccgtcccatttcttaactccccgagcccccaaaatcacgcacccagagaggggagaggcggagtgacgggggagaggcggaggccacgccccaaacccaaaccctagccacacgcgacgccgatgggatgcgcgcagggcaagtgctgcctgccgcggcacccgaggaggggctccgccgccgtcggcgggcgcggcggcgccacgcttggccgcgccgcggtgcccggggccgggctggtgctggagtacgccgcgttggccgtggcggggctctacccagactccccggccagggagtcccaggacacgcacctcgtcgccacgcgcttcgcgggggatcctgacctccacctcttcgccgtcttcgacggccacggcgctgccggagcctcctgcgccgggttcgcgcgggacgcgctcccgcgcctcctcctcgcctcgctcgccgcgggcccagccgccgcgttccgggacgccatgctggccgccaacgccgagatgcatgcggcgcccggcgtcgacgactccatgagcgggaccaccgccgtggccgccctcgtcgccggcggcgcgctccacgttgccaacgtcggcgactcgcgcgccgtcgccggtgtctggcgcgccggccggctcgtcgccgaggacctctcctgggaccagaccccgttccgcgccgacgagcgcgcgcgcgtcaaagcctgtggcgcccgcgtcatgtccgtcgagcaggtggagggcatgcgcgatcccgaggacgtgggctggacgcccaacgagggggacccgccacgcgtctgggcgcgcgacgcactctacccaggcaccgccttcacccgcagcctcggggacctcgccgccgaggccgtcggggtcatcgccgagccggaggtgaagagcgtcgagatcactccatcgcacctcttcttcgttgtcgccagcgatggcgtgttcgagttcctctccagccaggaagttgttgacagggttgccatgtatcaagatcctcgggatgcctgctcagcaatcgctgctgagtcatacaaactatggcttgagcatgaaaacaggacagatgatataacaataatcattgtgcatattcgagacatggaaaatgcaggtcctgcagggagtgacaaagcggactatggtagcatcggagcatcaatagctgggcagacaatacagtcagagatacctgtatttgtacaaccagaagcaagtaacatgaacagatctgctgctaccggaatgcgatcaccgtcttttggctctccaactgaacggagcctctcatgtgttgctccttctcctacggatcctttgttgatacatggcagagtatcagatgcttccaagcctgggcaaagtgagcagcgagctgcatcacaaccaccggtacaaacttggcatcaaatagacggggttactactgagctggagcggtctatgcagcaaagcatccttccaacctcctgctgaaagtagagaatgcgagttgaatgacaaaaagaggcctcgagataacccaccgccatcttggagctactaaccgtaccatggatgcgatgtttgccagcagcaaatctcgtgctgttgctcgtgttttggtagagcacctgctgctgccgacgatgcgaggttcctgatcctgtgtgggatcatctaaccatgggctgagtggaattgagttattctccgtttcatttgtactttgtttacttttcacaagatatagattaattctaagttgatgcctgtcgaggtatcagtatcatttgagacgcaactgtgcattgtcgtccttccacagaattaggatctggaattgaaatgcgagtgccgtacagaacagatcagctgggtggcttttcagatgcaaagaagaatattggatttagcctgtaagctgacctgagagctctgtcaaccctttaaaagtgtgctacgcatatacgataccgtcagcgagctctgccaagaaacaaaggggcctgtttggttcagcttttttctaaccagtttttctgaaaatctggttgtggggagaatctggctgtggggagaatctgagtatcattactattacgtgtgaagtaagataaatttgtttatagtgctcatgatctagaaagtgacgaattcctactattacaacgactctaccgattatgtgtttatgttgattttggatgattttttgtcccaacgaattttatagaagctggctg

SEQ ID NO: 27447 - DNA, 2439 bp, Zea Mays
agcggcccatcgaatttggttgacgctgccactgggcatgtggggcactcctcttccggtcttcccagcgaacaacccgtgcgccacggcgcggcctcgggcccctcttcaatgcgcgcagcgtgccgtattgcgcctttctctctcgcatttggcgtttgaatcattccattttccagtctgcactctccagtctcctccacttcttctccccgtcccatttcttaactccccgagcccccaaaatcacgcacccagagaggggagaggcggagtgacgggggagaggcggaggccacgccccaaacccaaaccctagccacacgcgacgccgatgggatgcgcgcagggcaagtgctgcctgccgcggcacccgaggaggggctccgccgccgtcggcgggcgcggcggcgccacgcttggccgcgccgcggtgcccggggccgggctggtgctggagtacgccgcgttggccgtggcggggctctacccagactccccggccagggagtcccaggacacgcacctcgtcgccacgcgcttcgcgggggatcctgacctccacctcttcgccgtcttcgacggccacggcgctgccggagcctcctgcgccgggttcgcgcgggacgcgctcccgcgcctcctcctcgcctcgctcgccgcgggcccagccgccgcgttccgggacgccatgctggccgccaacgccgagatgcatgcggcgcccggcgtcgacgactccatgagcgggaccaccgccgtggccgccctcgtcgccggcggcgcgctccacgttgccaacgtcggcgactcgcgcgccgtcgccggtgtctggcgcgccggccggctcgtcgccgaggacctctcctgggaccagaccccgttccgcgccgacgagcgcgcgcgcgtcaaagcctgtggcgcccgcgtcatgtccgtcgagcaggtggagggcatgcgcgatcccgaggacgtgggctggacgcccaacgagggggacccgccacgcgtctgggcgcgcgacgcactctacccaggcaccgccttcacccgcagcctcggggacctcgccgccgaggccgtcggggtcatcgccgagccggaggtgaagagcgtcgagatcactccatcgcacctcttcttcgttgtcgccagcgatggcgtgttcgagttcctctccagccaggaagttgttgacagggttgccatgtatcaagatcctcgggatgcctgctcagcaatcgctgctgagtcatacaaactatggcttgagcatgaaaacaggacagatgatataacaataatcattgtgcatattcgagacatggaaaatgcagggagtgacaaagcggactatggtagcatcggagcatcaatagctgggcagacaatacagtcagagatacctgtatttgtacaaccagaagcaagtaacatgaacagatctgctgctaccggaatgcgatcaccgtcttttggctctccaactgaacggagcctctcatgtgttgctccttctcctacggatcctttgttgatacatggcagagtatcagatgcttccaagcctgggcaaagtgagcagcgagctgcatcacaaccaccggtacaaacttggcatcaaatagacggggttactactgagctggagcggtctatgcagcaaagcatccttccaacctcctgctgaaagtagagaatgcgagttgaatgacaaaaagaggcctcgagataacccaccgccatcttggagctactaaccgtaccatggatgcgatgtttgccagcagcaaatctcgtgctgttgctcgtgttttggtagagcacctgctgctgccgacgatgcgaggttcctgatcctgtgtgggatcatctaaccatgggctgagtggaattgagttattctccgtttcatttgtactttgtttacttttcacaagatatagattaattctaagttgatgcctgtcgaggtatcagtatcatttgagacgcaactgtgcattgtcgtccttccacagaattaggatctggaattgaaatgcgagtgccgtacagaacagatcagctgggtggcttttcagatgcaaagaagaatattggatttagcctgtaagctgacctgagagctctgtcaaccctttaaaagtgtgctacgcatatacgataccgtcagcgagctctgccaagaaacaaaggggcctgtttggttcagcttttttctaaccagtttttctgaaaatctggttgtggggagaatctggctgtggggagaatctgagtatcattactattacgtgtgaagtaagataaatttgtttatagtgctcatgatctagaaagtgacgaattcctactattacaacgactctaccgattatgtgtttatgttgattttggatgattttttgtcccaacgaattttatagaagctggctg

SEQ ID NO: 27448 - DNA, 373 bp, Zea Mays
gagctcggtagaattatcgtgacaatttataatgcaattctagaattgcaataatctcaacatcatcccacagcgttacctttaaattggtcatagcatatttctttcacaatctacagccacaagggacacagagtcaatgagatacaggggcgacgaatcatttccacactataatctatatattcaacaccagtccaagtctagacaaacaaacaggagaggaaacaccatggaatctctatcagacctagtttgggtactctagtattgaccaaaatccacatgtattgaggattagagtcaatactagagtaccaaacaaagcctcaaagggatgatcagcagctacatacaaaaatcttaaagcgat

SEQ ID NO: 27449 - DNA, 551 bp, Zea Mays
attaaagccgcagcgaaaggtctatgggacttgggagaaatacatttgcgttatattaatagatagatatccagaaagcaaacagaagtgcatataattctagtggtcttgattatctgcgtcacaaaaattgcaaaatcatctctggagaaggcattggctgagaatggagagctccatgtaggaacatcgcagcttccaggtgtaacctctcccttggatctgcaacaacctcttgtaatcaagattgacacatcaaatgaagaccacgagaagtaaaagtgttgtgtttacaatctcagatgtaaattctttggttgttgagtcggtagactgtatatacacccatactctggtgaggcccgtaaatgggtaaaaaagacatcatccccccttccaaaaaagggaatgaagtttagtttactgataggttatagtaatacgatatgcgctttgtttcactccacgtgctaccttatctttggtgaaaatactcgcacttaactgggttgagagctacagctcccaaaccgactacttacgaaaaaaag

SEQ ID NO: 27450 - DNA, 481 bp, Zea Mays
ccctttataattatgatagcatgtgctgttttgtggtcttgattatctgcgtcacaaaaattgcaaaatcatctctggagaaggcattggctgagaatggagagctccatgtaggaacatcgcagcttccaggtgtaacctctcccttggatctgcaacaacctcttgtaatcaagattgacacatcaaatgaagaccacgagaagtaaaagtgttgtgtttacaatctcagatgtaaattctttggttgttgagtcggtagactgtatatacacccatactctggtgaggcccgtaaatgggtaaaaaagacatcatccccccttccaaaaaagggaatgaagtttagtttactgataggttatagtaatacgatatgcgctttgtttcactccacgtgctaccttatctttggtgaaaatactcgcacttaactgggttgagagctacagctcccaaaccgactacttacgaaaaaaag

SEQ ID NO: 27451 - DNA, 1027 bp, Zea Mays
ctacttgcatccagctcacggcattacctgccctgattttgaaggactttctggtttggatcaaggagaatttgggtccatggggtcctttggtgttggccctcgcttacatccctctgacagtcttagctgttccagcatcaattcttacacttggagggggctatctatttggcttgccagtggggtttgttgctgattccattggagcagcaattggtgcgactgctgcatttctgcttggcaggacgattgggaggtcttatgttctctccaaatgcaaagattaccctaagtttcaagcagtagctattgccatccaaagatctggcttcaagatcgtgttgctactaaggcttgtacctttacttccgttcaacatgttgaactacctgttatctgtcactcctgttggtgttggagaatacatgctggcttcttggttgggaatgatgccaatcactcttgctctggtgtacgttggaacaacactaaaagatctatcagatgtgacacatgggtggagtgagatctcgactactcgacggattctgataatatctggttttgtattatctgtggtcttgattatctgcgtcacaaaaattgcaaaatcatctctggagaaggcattggctgagaatggagagctccatgtaggaacatcgcagcttccaggtgtaacctctcccttggatctgcaacaacctcttgtaatcaagattgacacatcaaatgaagaccacgagaagtaaaagtgttgtgtttacaatctcagatgtaaattctttggttgttgagtcggtagactgtatatacacccatactctggtgaggcccgtaaatgggtaaaaaagacatcatccccccttccaaaaaagggaatgaagtttagtttactgataggttatagtaatacgatatgcgctttgtttcactccacgtgctaccttatctttggtgaaaatactcgcacttaactgggttgagagctacagctcccaaaccgactacttacgaaaaaaag

SEQ ID NO: 27452 - DNA, 1653 bp, Zea Mays
gccggggacggacggttggtgcaactggaaagcgaggcgttttgttttctcccgtgctccccctcccggggaaggggcaacgagaaatcgaacccacacgcaacgcgacgcctccacccgctcgcctagtccagaatccagatccagcgcccgcatctctctctctcgcgcgcgcgcgcgagcgcgatgagctgccgcgacgggcgatcgtgctagcggtaacagcgagcggtgcgcgagggcggagtgggagtgtggatccgaggggcggcaaatctggcaggcgccgcggtggggctgcgggcgcgggggagggcggggggctgggcggacggcggggagggaggggaggactgcggtaggctcaggccctggcgcaggaggctgctcgcgtccatggcgctctcgtggtcctcggccctccgcctcgccgtcgccgccgtcctgctcgtcgccgtcgtcgtcgcgctcttcactctccccatcgagaaggaactacttgcatccagctcacggcattacctgccctggtagctttcatcttgactgagagaatttttctctgtatacaatgtgctatgggagcatgggtctatgggaaatataagaaactattcagagtcaggagagtttgatctgatccaagttgagtgccatgtttattttgaaggactttctggtttggatcaaggagaatttgggtccatggggtcctttggtgttggccctcgcttacatccctctgacagtcttagctgttccagcatcaattcttacacttggagggggctatctatttggcttgccagtggggtttgttgctgattccattggagcagcaattggtgcgactgctgcatttctgcttggcaggacgattgggaggtcttatgttctctccaaatgcaaagattaccctaagtttcaagcagtagctattgccatccaaagatctggcttcaagatcgtgttgctactaaggcttgtacctttacttccgttcaacatgttgaactacctgttatctgtcactcctgttggtgttggagaatacatgctggcttcttggttgggaatgatgccaatcactcttgctctggtgtacgttggaacaacactaaaagatctatcagatgtgacacatgggtggagtgagatctcgactactcgacggattctgataatatctggttttgtattatctgtggtcttgattatctgcgtcacaaaaattgcaaaatcatctctggagaaggcattggctgagaatggagagctccatgtaggaacatcgcagcttccaggtgtaacctctcccttggatctgcaacaacctcttgtaatcaagattgacacatcaaatgaagaccacgagaagtaaaagtgttgtgtttacaatctcagatgtaaattctttggttgttgagtcggtagactgtatatacacccatactctggtgaggcccgtaaatgggtaaaaaagacatcatccccccttccaaaaaagggaatgaagtttagtttactgataggttatagtaatacgatatgcgctttgtttcactccacgtgctaccttatctttggtgaaaatactcgcacttaactgggttgagagctacagctcccaaaccgactacttacgaaaaaaag

SEQ ID NO: 27453 - DNA, 1525 bp, Zea Mays
gttccaccgcccgcagccagagccgaccaggtcactcgcgtcacatctgtgtcggtgctgggcgcgctccccgccggggacggacggttggtgcaactggaaagcgaggcgttttgttttctcccgtgctccccctcccggggaaggggcaacgagaaatcgaacccacacgcaacgcgacgcctccacccgctcgcctagtccagaatccagatccagcgcccgcatctctctctctcgcgcgcgcgcgcgagcgcgatgagctgccgcgacgggcgatcgtgctagcggtaacagcgagcggtgcgcgagggcggagtgggagtgtggatccgaggggcggcaaatctggcaggcgccgcggtggggctgcgggcgcgggggagggcggggggctgggcggacggcggggagggaggggaggactgcggtaggctcaggccctggcgcaggaggctgctcgcgtccatggcgctctcgtggtcctcggccctccgcctcgccgtcgccgccgtcctgctcgtcgccgtcgtcgtcgcgctcttcactctccccatcgagaagattttgaaggactttctggtttggatcaaggagaatttgggtccatggggtcctttggtgttggccctcgcttacatccctctgacagtcttagctgttccagcatcaattcttacacttggagggggctatctatttggcttgccagtggggtttgttgctgattccattggagcagcaattggtgcgactgctgcatttctgcttggcaggacgattgggaggtcttatgttctctccaaatgcaaagattaccctaagtttcaagcagtagctattgccatccaaagatctggcttcaagatcgtgttgctactaaggcttgtacctttacttccgttcaacatgttgaactacctgttatctgtcactcctgttggtgttggagaatacatgctggcttcttggttgggaatgatgccaatcactcttgctctggtgtacgttggaacaacactaaaagatctatcagatgtgacacatgggtggagtgagatctcgactactcgacggtggtcttgattatctgcgtcacaaaaattgcaaaatcatctctggagaaggcattggctgagaatggagagctccatgtaggaacatcgcagcttccaggtgtaacctctcccttggatctgcaacaacctcttgtaatcaagattgacacatcaaatgaagaccacgagaagtaaaagtgttgtgtttacaatctcagatgtaaattctttggttgttgagtcggtagactgtatatacacccatactctggtgaggcccgtaaatgggtaaaaaagacatcatccccccttccaaaaaagggaatgaagtttagtttactgataggttatagtaatacgatatgcgctttgtttcactccacgtgctaccttatctttggtgaaaatactcgcacttaactgggttgagagctacagctcccaaaccgactacttacgaaaaaaag

SEQ ID NO: 27454 - DNA, 1255 bp, Zea Mays
tctgtatacaatgtgctatgggagcatgggtctatgggaaatataagaaactattcagagtcaggagagtttgatctgatccaagttgagtgccatgtttattttgaaggactttctggtttggatcaaggagaatttgggtccatggggtcctttggtgttggccctcgcttacatccctctgacagtcttagctgttccagcatcaattcttacacttggagggggctatctatttggcttgccagtggggtttgttgctgattccattggagcagcaattggtgcgactgctgcatttctgcttggcaggacgattgggaggtcttatgttctctccaaatgcaaagattaccctaagtttcaagcagtagctattgccatccaaagatctggcttcaagatcgtgttgctactaaggcttgtacctttacttccgttcaacatgttgaactacctgttatctgtcactcctgttggtgttggagaatacatgctggcttcttggttgggaatgatgccaatcactcttgctctggtgtacgttggaacaacactaaaagatctatcagatgtgacacatgggtggagtgagatctcgactactcgacggaattaagataattgagatctactgataaagtttgtctatccacgctttcagcacatctgtgttaataagttgtgtcatcaaggaacctctgcaaaatctagaaaccttttccattatcctgcccatttcacttgtatgcttgaatgaatgattcaatcatgggatatttgatttgagcttgagggcaaattttttatggtgattgactgccagagttcttacatgtgcggtggtatattagtgtgttgataagactttgattttggtggggtggggtagcactaaaagtagatggaacaattgccaattatgtaagttttaggtgttgtttggttcacgaaatgtaacgtaaatggtaatggtaatgattcatactcgagtaccaacagtaacagatttgaataggccagtatcagtttctaatgtggtatctgattacagttggacttaaacaaacatggtttaacgtttttagttaccgttcatgttacaaatatgtgaatcaaacaacaccttagtggaaacgtgcaaggaatacattgaacatccatatctagggaaaagtgcaattctaggaaactttctaaattttgaataagtttatagaaaatgttattgatatggacggccgtagtgctacag

SEQ ID NO: 27455 - DNA, 1783 bp, Zea Mays
gccggggacggacggttggtgcaactggaaagcgaggcgttttgttttctcccgtgctccccctcccggggaaggggcaacgagaaatcgaacccacacgcaacgcgacgcctccacccgctcgcctagtccagaatccagatccagcgcccgcatctctctctctcgcgcgcgcgcgcgagcgcgatgagctgccgcgacgggcgatcgtgctagcggtaacagcgagcggtgcgcgagggcggagtgggagtgtggatccgaggggcggcaaatctggcaggcgccgcggtggggctgcgggcgcgggggagggcggggggctgggcggacggcggggagggaggggaggactgcggtaggctcaggccctggcgcaggaggctgctcgcgtccatggcgctctcgtggtcctcggccctccgcctcgccgtcgccgccgtcctgctcgtcgccgtcgtcgtcgcgctcttcactctccccatcgagaaggaactacttgcatccagctcacggcattacctgccctggtagctttcatcttgactgagagaatttttctctgtatacaatgtgctatgggagcatgggtctatgggaaatataagaaactattcagagtcaggagattttgaaggactttctggtttggatcaaggagaatttgggtccatggggtcctttggtgttggccctcgcttacatccctctgacagtcttagctgttccagcatcaattcttacacttggagggggctatctatttggcttgccagtggggtttgttgctgattccattggagcagcaattggtgcgactgctgcatttctgcttggcaggacgattgggaggtcttatgttctctccaaatgcaaagattaccctaagtttcaagcagtagctattgccatccaaagatctggcttcaagatcgtgttgctactaaggcttgtacctttacttccgttcaacatgttgaactacctgttatctgtcactcctgttggtgttggagaatacatgctggcttcttggttgggaatgatgccaatcactcttgctctggtgtacgttggaacaacactaaaagatctatcagatgtgacacatgggtggagtgagatctcgactactcgacggaattaagataattgagatctactgataaagtttgtctatccacgctttcagcacatctgtgttaataagttgtgtcatcaaggaacctctgcaaaatctagaaaccttttccattatcctgcccatttcacttgtatgcttgaatgaatgattcaatcatgggatatttgatttgagcttgagggcaaattttttatggtgattgactgccagagttcttacatgtgcggtggtatattagtgtgttgataagactttgattttggtggggtggggtagcactaaaagtagatggaacaattgccaattatgtaagttttaggtgttgtttggttcacgaaatgtaacgtaaatggtaatggtaatgattcatactcgagtaccaacagtaacagatttgaataggccagtatcagtttctaatgtggtatctgattacagttggacttaaacaaacatggtttaacgtttttagttaccgttcatgttacaaatatgtgaatcaaacaacaccttagtggaaacgtgcaaggaatacattgaacatccatatctagggaaaagtgcaattctaggaaactttctaaattttgaataagtttatagaaaatgttattgatatggacggccgtagtgctacag

SEQ ID NO: 27456 - DNA, 1723 bp, Zea Mays
cacagttccaccgcccgcagccagagccgaccaggtcactcgcgtcacatctgtgtcggtgctgggcgcgctccccgccggggacggacggttggtgcaactggaaagcgaggcgttttgttttctcccgtgctccccctcccggggaaggggcaacgagaaatcgaacccacacgcaacgcgacgcctccacccgctcgcctagtccagaatccagatccagcgcccgcatctctctctctcgcgcgcgcgcgcgagcgcgatgagctgccgcgacgggcgatcgtgctagcggtaacagcgagcggtgcgcgagggcggagtgggagtgtggatccgaggggcggcaaatctggcaggcgccgcggtggggctgcgggcgcgggggagggcggggggctgggcggacggcggggagggaggggaggactgcggtaggctcaggccctggcgcaggaggctgctcgcgtccatggcgctctcgtggtcctcggccctccgcctcgccgtcgccgccgtcctgctcgtcgccgtcgtcgtcgcgctcttcactctccccatcgagaagattttgaaggactttctggtttggatcaaggagaatttgggtccatggggtcctttggtgttggccctcgcttacatccctctgacagtcttagctgttccagcatcaattcttacacttggagggggctatctatttggcttgccagtggggtttgttgctgattccattggagcagcaattggtgcgactgctgcatttctgcttggcaggacgattgggaggtcttatgttctctccaaatgcaaagattaccctaagtttcaagcagtagctattgccatccaaagatctggcttcaagatcgtgttgctactaaggcttgtacctttacttccgttcaacatgttgaactacctgttatctgtcactcctgttggtgttggagaatacatgctggcttcttggttgggaatgatgccaatcactcttgctctggtgtacgttggaacaacactaaaagatctatcagatgtgacacatgggtggagtgagatctcgactactcgacggaattaagataattgagatctactgataaagtttgtctatccacgctttcagcacatctgtgttaataagttgtgtcatcaaggaacctctgcaaaatctagaaaccttttccattatcctgcccatttcacttgtatgcttgaatgaatgattcaatcatgggatatttgatttgagcttgagggcaaattttttatggtgattgactgccagagttcttacatgtgcggtggtatattagtgtgttgataagactttgattttggtggggtggggtagcactaaaagtagatggaacaattgccaattatgtaagttttaggtgttgtttggttcacgaaatgtaacgtaaatggtaatggtaatgattcatactcgagtaccaacagtaacagatttgaataggccagtatcagtttctaatgtggtatctgattacagttggacttaaacaaacatggtttaacgtttttagttaccgttcatgttacaaatatgtgaatcaaacaacaccttagtggaaacgtgcaaggaatacattgaacatccatatctagggaaaagtgcaattctaggaaactttctaaattttgaataagtttatagaaaatgttattgatatggacggccgtagtgctacag

SEQ ID NO: 27457 - DNA, 1532 bp, Zea Mays
ccgatttgttgtttgctagatggatagatattgtctggcgactgaattttgtttgaaattactagtggaggcttcttcaggggatacacaaagctgtgcaagggcctcgccgtcatattgctcattgtgcaccttgtagtccagttgtttccgtccgccgtcacctatctcgcgcttatccctggaagaacgatcccttttgcttggaacctgataactgcaggctatgtcgagcaaacaattccagggatggttgtcagcatcattggccttcttttatttgggaagttgttagaacctctatggggttcaaaagagttatcaaagttcatttttatcgtcaacctttcaacttctgcttgtgttttcatgactgctattgtgctgtactatataactcagcaagagatctacctctatactcctttttctggattttatggggttctatcaggattgttggtgggcattaaacagcttttacctgatcaagagcttaatctttttgtgctaaaaattaaggcaaagtggattccatctcttgttgcattgatatccattcttggaagcatcttcatatacgactttatgtcttacctcccagttctgttgtttggcatgtatatgagttggatctacctccgttactttcaaaagagacttgagaccagcctgaaaggggatccaagtgaggagttctctttctcaagcttcttccctgaatttaccatttctcgacccaatagcatctgtattccataggttactttgtggaagatctgatgccaggggagaaacattagacacctcaccattacctggttcagattcgtttgaggcaaacaggaggagagagaggggtcaacgggcactggagcaaagattagctgagaagctggctgcagtcaggagttcagagggcggcacatcactggatgccgctgacaaagtttgagtcttctatgcaacgaacaacgagctgtgcggtgcagtttgtgatttcctggcaattcgtttctatgtgatttcaccagccccagcctcaccgccgagtgcttcattttttttatggtttctcatcctaatcatcatcgggaaccaactaatgaagcactgcgcgcccattttccccatggtttctctgtaatcaactagaagtgatcaagtaccaagcagtgtacaatgcgatgctccctaggacaagaactcatctatgttcggtttcctgttttttttcttccaaatggtgcggttgatacttgatagtagttgacacttgacaggaacaaaattatttttgtaaccttttagagctctgtgttggatggcaaattgacggtgctaacggtccggccccgagtctagacggtccgcgcgcgtagtcagttagggttctgagtttcttgctacagttgttggctagattcgcggaattaacttgggagatttgtatgtaatgggttcagccccctcctctataaatatagaggaatacgaccgattaaacattatcaatcgaattaataatcagt

SEQ ID NO: 27458 - DNA, 1571 bp, Zea Mays
aacgtgttcgcgcgtgctgctatccacagactaaccgatttgttgtttgctagatggatagatattgtctggcgactgaattttgtttgaaattactagtggaggcttcttcaggggatacacaaagctgtgcaagggcctcgccgtcatattgctcattgtgcaccttgtagtccagttgtttccgtccgccgtcacctatctcgcgcttatccctggaagaacgatcccttttgcttggaacctgataactgcaggctatgtcgagcaaacaattccagggatggttgtcagcatcattggccttcttttatttgggaagttgttagaacctctatggggttcaaaagagttatcaaagttcatttttatcgtcaacctttcaacttctgcttgtgttttcatgactgctattgtgctgtactatataactcagcaagagatctacctctatactcctttttctggattttatggggttctatcaggattgttggtgggcattaaacagcttttacctgatcaagagcttaatctttttgtgctaaaaattaaggcaaagtggattccatctcttgttgcattgatatccattcttggaagcatcttcatatacgactttatgtcttacctcccagttctgttgtttggcatgtatatgagttggatctacctccgttactttcaaaagagacttgagaccagcctgaaaggggatccaagtgaggagttctctttctcaagcttcttccctgaatttgtaagaccatttctcgacccaatagcatctgtattccataggttactttgtggaagatctgatgccaggggagaaacattagacacctcaccattacctggttcagattcgtttgaggcaaacaggaggagagagaggggtcaacgggcactggagcaaagattagctgagaagctggctgcagtcaggagttcagagggcggcacatcactggatgccgctgacaaagtttgagtcttctatgcaacgaacaacgagctgtgcggtgcagtttgtgatttcctggcaattcgtttctatgtgatttcaccagccccagcctcaccgccgagtgcttcattttttttatggtttctcatcctaatcatcatcgggaaccaactaatgaagcactgcgcgcccattttccccatggtttctctgtaatcaactagaagtgatcaagtaccaagcagtgtacaatgcgatgctccctaggacaagaactcatctatgttcggtttcctgttttttttcttccaaatggtgcggttgatacttgatagtagttgacacttgacaggaacaaaattatttttgtaaccttttagagctctgtgttggatggcaaattgacggtgctaacggtccggccccgagtctagacggtccgcgcgcgtagtcagttagggttctgagtttcttgctacagttgttggctagattcgcggaattaacttgggagatttgtatgtaatgggttcagccccctcctctataaatatagaggaatacgaccgattaaacattatcaatcgaattaataatcagt

SEQ ID NO: 27459 - DNA, 1489 bp, Zea Mays
ttccttcccgccgggagtggaggcttcttcaggggatacacaaagctgtgcaagggcctcgccgtcatattgctcattgtgcaccttgtagtccagttgtttccgtccgccgtcacctatctcgcgcttatccctggaagaacgatcccttttgcttggaacctgataactgcaggctatgtcgagcaaacaattccagggatggttgtcagcatcattggccttcttttatttgggaagttgttagaacctctatggggttcaaaagagttatcaaagttcatttttatcgtcaacctttcaacttctgcttgtgttttcatgactgctattgtgctgtactatataactcagcaagagatctacctctatactcctttttctggattttatggggttctatcaggattgttggtgggcattaaacagcttttacctgatcaagagcttaatctttttgtgctaaaaattaaggcaaagtggattccatctcttgttgcattgatatccattcttggaagcatcttcatatacgactttatgtcttacctcccagttctgttgtttggcatgtatatgagttggatctacctccgttactttcaaaagagacttgagaccagcctgaaaggggatccaagtgaggagttctctttctcaagcttcttccctgaatttgtaagaccatttctcgacccaatagcatctgtattccataggttactttgtggaagatctgatgccaggggagaaacattagacacctcaccattacctggttcagattcgtttgaggcaaacaggaggagagagaggggtcaacgggcactggagcaaagattagctgagaagctggctgcagtcaggagttcagagggcggcacatcactggatgccgctgacaaagtttgagtcttctatgcaacgaacaacgagctgtgcggtgcagtttgtgatttcctggcaattcgtttctatgtgatttcaccagccccagcctcaccgccgagtgcttcattttttttatggtttctcatcctaatcatcatcgggaaccaactaatgaagcactgcgcgcccattttccccatggtttctctgtaatcaactagaagtgatcaagtaccaagcagtgtacaatgcgatgctccctaggacaagaactcatctatgttcggtttcctgttttttttcttccaaatggtgcggttgatacttgatagtagttgacacttgacaggaacaaaattatttttgtaaccttttagagctctgtgttggatggcaaattgacggtgctaacggtccggccccgagtctagacggtccgcgcgcgtagtcagttagggttctgagtttcttgctacagttgttggctagattcgcggaattaacttgggagatttgtatgtaatgggttcagccccctcctctataaatatagaggaatacgaccgattaaacattatcaatcgaattaataatcagt

SEQ ID NO: 27460 - DNA, 1575 bp, Zea Mays
atgttttttgcactgaatctggttgtgaaccaaacacacctcagctgctctgtccaaacgcaccctgacttccgagttccgacccccactgctttgcttgctctgcactccgctaattccttccgcggcgatcccgagcaagaaacccagcagcgcggcggatctcgccgggcggcggccgccactatgatgagcggtagctcgcctccgccgccctcgcttcctgccgggaacgatcccttttgcttggaacctgataactgcaggctatgtcgagcaaacaattccagggatggttgtcagcatcattggccttcttttatttgggaagttgttagaacctctatggggttcaaaagagttatcaaagttcatttttatcgtcaacctttcaacttctgcttgtgttttcatgactgctattgtgctgtactatataactcagcaagagatctacctctatactcctttttctggattttatggggttctatcaggattgttggtgggcattaaacagcttttacctgatcaagagcttaatctttttgtgctaaaaattaaggcaaagtggattccatctcttgttgcattgatatccattcttggaagcatcttcatatacgactttatgtcttacctcccagttctgttgtttggcatgtatatgagttggatctacctccgttactttcaaaagagacttgagaccagcctgaaaggggatccaagtgaggagttctctttctcaagcttcttccctgaatttaccatttctcgacccaatagcatctgtattccataggttactttgtggaagatctgatgccaggggagaaacattagacacctcaccattacctggttcagattcgtttgaggcaaacaggaggagagagaggggtcaacgggcactggagcaaagattagctgagaagctggctgcagtcaggagttcagagggcggcacatcactggatgccgctgacaaagtttgagtcttctatgcaacgaacaacgagctgtgcggtgcagtttgtgatttcctggcaattcgtttctatgtgatttcaccagccccagcctcaccgccgagtgcttcattttttttatggtttctcatcctaatcatcatcgggaaccaactaatgaagcactgcgcgcccattttccccatggtttctctgtaatcaactagaagtgatcaagtaccaagcagtgtacaatgcgatgctccctaggacaagaactcatctatgttcggtttcctgttttttttcttccaaatggtgcggttgatacttgatagtagttgacacttgacaggaacaaaattatttttgtaaccttttagagctctgtgttggatggcaaattgacggtgctaacggtccggccccgagtctagacggtccgcgcgcgtagtcagttagggttctgagtttcttgctacagttgttggctagattcgcggaattaacttgggagatttgtatgtaatgggttcagccccctcctctataaatatagaggaatacgaccgattaaacattatcaatcgaattaataatcagt

SEQ ID NO: 27461 - DNA, 1536 bp, Zea Mays
atgttttttgcactgaatctggttgtgaaccaaacacacctcagctgctctgtccaaacgcaccctgacttccgagttccgacccccactgctttgcttgctctgcactccgctaattccttccgcggcgatcccgagcaagaaacccagcagcgcggcggatctcgccgggcggcggccgccactatgatgagcggtagctcgcctccgccgccctcgcttcctgccgggagtggaggcttcttcaggggatacacaaagctgtgcaagggcctcgccgtcatattgctcattgtgcaccttgtagtccagttgtttccgtccgccgtcacctatctcgcgcttatccctggaagaacgatcccttttgcttggaacctgataactgcaggctatgtcgagcaaacaattccagctatactcctttttctggattttatggggttctatcaggattgttggtgggcattaaacagcttttacctgatcaagagcttaatctttttgtgctaaaaattaaggcaaagtggattccatctcttgttgcattgatatccattcttggaagcatcttcatatacgactttatgtcttacctcccagttctgttgtttggcatgtatatgagttggatctacctccgttactttcaaaagagacttgagaccagcctgaaaggggatccaagtgaggagttctctttctcaagcttcttccctgaatttgtaagaccatttctcgacccaatagcatctgtattccataggttactttgtggaagatctgatgccaggggagaaacattagacacctcaccattacctggttcagattcgtttgaggcaaacaggaggagagagaggggtcaacgggcactggagcaaagattagctgagaagctggctgcagtcaggagttcagagggcggcacatcactggatgccgctgacaaagtttgagtcttctatgcaacgaacaacgagctgtgcggtgcagtttgtgatttcctggcaattcgtttctatgtgatttcaccagccccagcctcaccgccgagtgcttcattttttttatggtttctcatcctaatcatcatcgggaaccaactaatgaagcactgcgcgcccattttccccatggtttctctgtaatcaactagaagtgatcaagtaccaagcagtgtacaatgcgatgctccctaggacaagaactcatctatgttcggtttcctgttttttttcttccaaatggtgcggttgatacttgatagtagttgacacttgacaggaacaaaattatttttgtaaccttttagagctctgtgttggatggcaaattgacggtgctaacggtccggccccgagtctagacggtccgcgcgcgtagtcagttagggttctgagtttcttgctacagttgttggctagattcgcggaattaacttgggagatttgtatgtaatgggttcagccccctcctctataaatatagaggaatacgaccgattaaacattatcaatcgaattaataatcagt

SEQ ID NO: 27462 - DNA, 1700 bp, Zea Mays
atgttttttgcactgaatctggttgtgaaccaaacacacctcagctgctctgtccaaacgcaccctgacttccgagttccgacccccactgctttgcttgctctgcactccgctaattccttccgcggcgatcccgagcaagaaacccagcagcgcggcggatctcgccgggcggcggccgccactatgatgagcggtagctcgcctccgccgccctcgcttcctgccgggagtggaggcttcttcaggggatacacaaagctgtgcaagggcctcgccgtcatattgctcattgtgcaccttgtagtccagttgtttccgtccgccgtcacctatctcgcgcttatccctggaagaacgatcccttttgcttggaacctgataactgcaggctatgtcgagcaaacaattccagggatggttgtcagcatcattggccttcttttatttgggaagttgttagaacctctatggggttcaaaagagttatcaaagttcatttttatcgtcaacctttcaacttctgcttgtgttttcatgactgctattgtgctgtactatataactcagcaagagatctacctctatactcctttttctggattttatggggttctatcaggattgttggtgggcattaaacagcttttacctgatcaagagcttaatctttttgtgctaaaaattaaggcaaagtggattccatctcttgttgcattgatatccattcttggaagcatcttcatatacgactttatgtcttacctcccagttctgttgtttggcatgtatatgagttggatctacctccgttactttcaaaagagacttgagaccagcctgaaaggggatccaagtgaggagttctctttctcaagcttcttccctgaatttaccatttctcgacccaatagcatctgtattccataggttactttgtggaagatctgatgccaggggagaaacattagacacctcaccattacctggttcagattcgtttgaggcaaacaggaggagagagaggggtcaacgggcactggagcaaagattagctgagaagctggctgcagtcaggagttcagagggcggcacatcactggatgccgctgacaaagtttgagtcttctatgcaacgaacaacgagctgtgcggtgcagtttgtgatttcctggcaattcgtttctatgtgatttcaccagccccagcctcaccgccgagtgcttcattttttttatggtttctcatcctaatcatcatcgggaaccaactaatgaagcactgcgcgcccattttccccatggtttctctgtaatcaactagaagtgatcaagtaccaagcagtgtacaatgcgatgctccctaggacaagaactcatctatgttcggtttcctgttttttttcttccaaatggtgcggttgatacttgatagtagttgacacttgacaggaacaaaattatttttgtaaccttttagagctctgtgttggatggcaaattgacggtgctaacggtccggccccgagtctagacggtccgcgcgcgtagtcagttagggttctgagtttcttgctacagttgttggctagattcgcggaattaacttgggagatttgtatgtaatgggttcagccccctcctctataaatatagaggaatacgaccgattaaacattatcaatcgaattaataatcagt

SEQ ID NO: 27463 - DNA, 1105 bp, Zea Mays
atgttttttgcactgaatctggttgtgaaccaaacacacctcagctgctctgtccaaacgcaccctgacttccgagttccgacccccactgctttgcttgctctgcactccgctaattccttccgcggcgatcccgagcaagaaacccagcagcgcggcggatctcgccgggcggcggccgccactatgatgagcggtagctcgcctccgccgccctcgcttcctgccgggagtggaggcttcttcaggggatacacaaagctgtgcaagggcctcgccgtcatattgctcattgtgcaccttgtagtccagttgtttccgtccgccgtcacctatctcgcgcttatccctggaagaacgatcccttttgcttggaacctgataactgcaggctatgtcgagcaaacaattccagggatggttgtcagcatcattggccttcttttatttgggaagttgttagaacctctatggggttcaaaagagttatcaaagttcatttttatcgtcaacctttcaacttctgcttgtgttttcatgactgctattgtgctgtactatataactcagcaagagatctacctctatactcctttttctggattttatggggttctatcaggattgttggtgggcattaaacagcttttacctgatcaagagcttaatctttttgtgctaaaaattaaggcaaagtggattccatctcttgttgcattgatatccattcttggaagcatcttcatatacgactttatgtcttacctcccagttctgttgtttggcatgtatatgagttggatctacctccgttactttcaaaagagacttgagaccagcctgaaaggggatccaagtgaggagttctctttctcaagcttcttccctgaatttgtaagaccatttctcgacccaatagcatctgtattccataggttactttgtggaagatctgatgccaggggagaaacattagacacctcaccattacctggttcagattcgtttgaggcaaacaggaggaggtccttgagctagtggagtcaccaattgttcctgtgactgtcatgttttctgtgtttgttcgactattgcagatctgcag

SEQ ID NO: 27464 - DNA, 1152 bp, Zea Mays
atccaatctcctatacctaaaaagtatcatttttggagatataggtgcttcagtggatctcctattttatctcctatacctgtaatttttaagagtctcctaaaagaagcatcctttctcctaaataaaggagacaaccccctctctcctacttctaaagaaatataggagacatattttagatgcattataagagatctggtcaagacactcttagtaactatagttaagcggtcaagttcatctagtggtacttgttctattgtatggtactccctccatttctcttcgtataaggctttgctccatttcatgtactgggatgagttgccggatcttgaagagcttactggtgtaaatacaacttgggtatccaccttgatggctcaacatttacttgctgctgcagaccgttatgcattggagagattaaagttgctctgtgaacttaagctgtgtgaagatgttgcaataaacacagtggcaaatactttggcactggctgaacagcaccactgctatcagctaaaaactgtttgcttaaaatttgtggctctgcctgagaatttgaaagctgtcatgcaaaccgatgggtttgattatttgcagcaaagctgtccatccctcctgaccgagcttcttgaatatgtggccaagataggagagcactccgtgagcccctgcctgtattcaactgaagtccttgatggtggagatgccaatggacgacgcgtgaaaccaaggatctaacggctgcccagatgagcctagaagagggagttccttgtcttttttttttgttgttgttgtaaagtgattccaatgacgggcgccttctgtggtgccataatcatgcatgttgtagcgttggtttgtgtgtgttgtgatttccccagccccattgctgctactgtagagggactgatatacatcctactgactagactgcgttgctgctgcaaagcagcttttcatcatatgccaaggatggtctggtgcaaaggtttgatcaatatgttctgcagaagttttacctttcgctaggccagatttgtcgattcatggtcatctgtattgactgtattcaattgaaatgaaatgtatccgttgaacattcactttcatactgatccgttcatctgtcctaccctt

SEQ ID NO: 27465 - DNA, 1227 bp, Zea Mays
ctcaaatcattactattctcattgggctataagcgtttcttcaaacgagttgccctggaaacatcagactatcttaaagatgattgccttttagtgaactgcaccgttggtgttgttcaatcacatactgaaggaccaaagatatacacaattccagtaccacggtccaacatggctctacatattggtcagctattgacaagtgggaagaggacagacattgcatttgaagttgatggagagatgtttcctgcccacaaggtgattctttcagcccggtctcctgtttttagggcgcaactttttggtccaatgaaggataaggacatgaagtgtataaagattgaagacatggaggctccagtattcaaggctttgctccatttcatgtactgggatgagttgccggatcttgaagagcttactggtgtaaatacaacttgggtatccaccttgatggctcaacatttacttgctgctgcagaccgttatgcattggagagattaaagttgctctgtgaacttaagctgtgtgaagatgttgcaataaacacagtggcaaatactttggcactggctgaacagcaccactgctatcagctaaaaactgtttgcttaaaatttgtggctctgcctgagaatttgaaagctgtcatgcaaaccgatgggtttgattatttgcagcaaagctgtccatccctcctgaccgagcttcttgaatatgtggccaagataggagagcactccgtgagcccctgcctgtattcaactgaagtccttgatggtggagatgccaatggacgacgcgtgaaaccaaggatctaacggctgcccagatgagcctagaagagggagttccttgtcttttttttttgttgttgttgtaaagtgattccaatgacgggcgccttctgtggtgccataatcatgcatgttgtagcgttggtttgtgtgtgttgtgatttccccagccccattgctgctactgtagagggactgatatacatcctactgactagactgcgttgctgctgcaaagcagcttttcatcatatgccaaggatggtctggtgcaaaggtttgatcaatatgttctgcagaagttttacctttcgctaggccagatttgtcgattcatggtcatctgtattgactgtattcaattgaaatgaaatgtatccgttgaacattcactttcatactgatccgttcatctgtcctaccctt

SEQ ID NO: 27466 - DNA, 1877 bp, Zea Mays
caaaccaactcggaccaagcaaaaccacacacacacacgccacctccttgagtccttgtcggctcgccatcgccaccatcatttcgtgtcgagtctccgtttcaccctccccaaattcccctcaaatcgatctcccccgcaccccgaatccccgcgcccccgcgtctgaatccggcgccccccgccccgatccgtccgatccgcgccgaatcgccgttgctcggggcggaaccctagcccgatctccacctgtttcctcgcgatgggcgccggtcgtgtctgccgcggcggccctttctccgcctcccccgccgctggcgccgccgcggggcggccgttcccgccgctcaccgcgtcctcctcctcatctccttcatcggccccttccgagacagcgtccacgtcggtcaccaagacggtgaacggctcccaccacttcaagatcgcgggctactccctctccaaggggatcggcgtggggaagttcatcgcctccgagtccttcaacgtggggggattcgactgggcgatctacttctaccccgacgggaagagcggcgaggatggcgctgcctacgtctcgctcttcatagccctggccagcgaaggcaccgatgtgcgcgcgctgttcgagctcacgctcgtcgaccagagcggcaaggggcaagacaaggggctataagcgtttcttcaaacgagttgccctggaaacatcagactatcttaaagatgattgccttttagtgaactgcaccgttggtgttgttcaatcacatactgaaggaccaaagatatacacaattccagtaccacggtccaacatggctctacatattggtcagctattgacaagtgggaagaggacagacattgcatttgaagttgatggagagatgtttcctgcccacaaggtgattctttcagcccggtctcctgtttttagggcgcaactttttggtccaatgaaggataaggacatgaagtgtataaagattgaagacatggaggctccagtattcaaggctttgctccatttcatgtactgggatgagttgccggatcttgaagagcttactggtgtaaatacaacttgggtatccaccttgatggctcaacatttacttgctgctgcagaccgttatgcattggagagattaaagttgctctgtgaacttaagctgtgtgaagatgttgcaataaacacagtggcaaatactttggcactggctgaacagcaccactgctatcagctaaaaactgtttgcttaaaatttgtggctctgcctgagaatttgaaagctgtcatgcaaaccgatgggtttgattatttgcagcaaagctgtccatccctcctgaccgagcttcttgaatatgtggccaagataggagagcactccgtgagcccctgcctgtattcaactgaagtccttgatggtggagatgccaatggacgacgcgtgaaaccaaggatctaacggctgcccagatgagcctagaagagggagttccttgtcttttttttttgttgttgttgtaaagtgattccaatgacgggcgccttctgtggtgccataatcatgcatgttgtagcgttggtttgtgtgtgttgtgatttccccagccccattgctgctactgtagagggactgatatacatcctactgactagactgcgttgctgctgcaaagcagcttttcatcatatgccaaggatggtctggtgcaaaggtttgatcaatatgttctgcagaagttttacctttcgctaggccagatttgtcgattcatggtcatctgtattgactgtattcaattgaaatgaaatgtatccgttgaacattcactttcatactgatccgttcatctgtcctaccctt

SEQ ID NO: 27467 - DNA, 695 bp, Zea Mays
ggaggactcccacccggctgccagccatggctgagaatctggcgcccgagaagcgccactccttcgtgcacaacgggcagaaggtgttcgagtgggaccagacgctggaggaggtcaacatgtacatcgagctcccgaagggtgtgccaaccaagctatttcactgcagcatccaggctagccacgtcgagcatgacctgacacacccagtgaagactgactcgtcgttctggacaatagaagacggtgagatgcatataacactgcaaaaaagagagaaggggaaaacatggtcatctccaatacaagggcaagggattttggatccatatgctgcagatcaagagcaaaagcggcttatgctccaaaggtttcaggaagaggctcagttcagtggaacctgccctgacccaagaaccttcatgggagggatacgctccgagtgaagcaccctacctgcctatgtacgtttctactatatcctcggcatcttgatagatgcagcaggcgtgcttattatgtctgtaaatcggttggtgtctgttatggaaataattgtgatgtgtgaccatttgtgtgcaagcacattttgcgtgcttaattctagtttatagttgtgatcttcattcaggagctgtttgtttcagcgttttcacccggtgggtaaatgggtaacatttagtgcatgtttggga

SEQ ID NO: 27468 - DNA, 753 bp, Zea Mays
tggaggactcccacccggctgccagccatggctgagaatctggcgcccgagaagcgccactccttcgtgcacaacgggcagaaggtgttcgagtgggaccagacgctggaggaggtcaacatgtacatcgagctcccgaagggtgtgccaaccaagctatttcactgcagcatccaggctagccacgtcgaggtcggcatccgcggcaacccgccatacctcaaccatgacctgacacacccagtgaagactgactcgtcgttctggacaatagaagacggtgagatgcatataacactgcaaaaaagagagaaggggaaaacatggtcatctccaatacaagggcaagggattttggatccatatgctgcagatcaagagcaaaagcggcttatgctccaaaggtttcaggaagagaaccctgggttcgacttttcacaggctcagttcagtggaacctgccctgacccaagaaccttcatgggagggatacgctccgagtgaagcaccctacctgcctatgtacgtttctactatatcctcggcatcttgatagatgcagcaggcgtgcttattatgtctgtaaatcggttggtgtctgttatggaaataattgtgatgtgtgaccatttgtgtgcaagcacattttgcgtgcttaattctagtttatagttgtgatcttcattcaggagctgtttgtttcagcgttttcacccggtgggtaaatgggtaacatttagtgcatgtttggga

SEQ ID NO: 27469 - DNA, 726 bp, Zea Mays
tggaggactcccacccggctgccagccatggctgagaatctggcgcccgagaagcgccactccttcgtgcacaacgggcagaaggtgttcgagtgggaccagacgctggaggaggtcaacatgtacatcgagctcccgaagggtgtgccaaccaagctatttcactgcagcatccaggctagccacgtcgaggtcggcatccgcggcaacccgccatacctcaaccatgacctgacacacccagtgaagactgactcgtcgttctggacaatagacggtgagatgcatataacactgcaaaaaagagagaaggggaaaacatggtcatctccaatacaagggcaagggattttggatccatatgctgcagatcaagagcaaaagcggcttatgctccaaaggtttcaggaagaggctcagttcagtggaacctgccctgacccaagaaccttcatgggagggatacgctccgagtgaagcaccctacctgcctatgtacgtttctactatatcctcggcatcttgatagatgcagcaggcgtgcttattatgtctgtaaatcggttggtgtctgttatggaaataattgtgatgtgtgaccatttgtgtgcaagcacattttgcgtgcttaattctagtttatagttgtgatcttcattcaggagctgtttgtttcagcgttttcacccggtgggtaaatgggtaacatttagtgcatgtttggga

SEQ ID NO: 27470 - DNA, 2638 bp, Zea Mays
ctcaatatgatctgtgccgcaatgtcactaataaactgtttcactcagccagcggacaaaccactggttagagaaacagtgttccaaacaataatctaataaaatgcaggttaataaagttcgttcagtaaggttctatttacagaatggttgcatttagaggcaccaaaggatggacgtatcggctctctgccccggcgggtggtctccctcctcgatcccccaccccgcccgatcgcttcccctccccactcccctctccaccagcccctcgccggtcaccaccctggtactggtgaccacctccttgtcttccaccccctcggcgacagggtccagtctgtcccggcggctgcactcccaggatgggcggtccaaggcccagagatggtgcggcgactcttcggctggaggttcccttccatctccacgatccattaaagatgcagcccccaccagctcggtttgcgccgccagcccttctccctcggcaagtcactgcgccgccagcccctctcctgcggcccttccggtggatgaggaaggctggcaggtggttggtcgtagacagaggtctcgtggtgtgcatctccctcgtcgagggtcccgagtggatctccgaggtcggtgctacaactgcctctctacctcccacctcgtagcttcctgtcggcggcctacacagtgcttgcagtgcttcagttttggacaccggggggcaaagtgctcgtcccttccggttgaagcacagaagcggacggtgtggcagcgtctgggctacgtcaagacgcgtcctccggtgagacaggaaacctcccagagagctccggtgtggtcgaggtttcctgtgcggcctccggtgtggcagagactctccaacatggacatggttccttctccggagggtaagtttcaggaaccgccccgcagtaaggtttcagtatggaagcgcctcgctgcatcacatgatcatgcaacgtcggaggcaaacgctgaggaagacaagatgtctcctcggcccatgcggaaaaaaagacgttccaaacacgaaaaaggtacagttgcgcacgatttgggtcccactcaggcatgcccacctccttctccccatctagatagtttcagctctgaggtggctaggccaccctcagcctcctcctgtgttctggatttttctgaagtccttgctagggaggaaattgcccttcgtcgtgctctattcgtctctgtggctggtacacgacctggggtttctggttctgacgtgttgaaggaggtgaggcattgttttggtgttaagttggaggacatgaagattcatcagacctaccctgaagacttcctgttgtttctaccggatgaagacacgacaaccaaggttctcaacgaaggaagacctctgaggggaccccgtttcagtttgatgctcaaaagatggtccagatttgctcatgcatcctcatcgtcgatggctgagttggttgatgttaaattaataggcattcctcaacatgcctggtgtcgatctacagttgaacatttgctgagggactcatgttgggttgaagcattacattcagaaactatggaaatgagggatttttcagccttggtggtgaaagcatggtgttttcatcctgaaaaactggttaggaaaatggatttacacatcttggaggctgggattgatgatcaggaaaagagattcttaacctataagatctccattgatatccttccaccaaagaccctacagctgtcatcggctaccccacctcctcctcctccaccaccgtcgggaagggaacctgatgatgatgaccctgacgatcaagatccccaacaatggcggcggccggtcccagttgatctgcggcagcctgtccagctgcgtctgggcccacgacttcctttgggccgcgcgcatgcggtaaatgtgcctgggggtgacccgagagttgaggagactgccccaggagttgaggagacaactgggaggtatgaggatcagttattgttgagcacgggagccaaggagattttgtctcagccaccggttcgggcggaagtcgaggaggaccttggggagagtgcgtgtgttttgactctttccgatgttgctggtgtgaaggcgcttggagggataactcatgctcctgacactcagttgggtgggacgctgggtcaggccacttcttctatgcacctgggaacctttttctcagggctgctggagaacttgtgccatgactcacccaccaggatccatatgatgaaactataacccttgatgggccattgggctcgattggtccatcttcaccccaccacaattccttggatgagccgctagagatgaccaacctgaactcgccccatcagctctctccaatacttaaggacactgtgatagggacgctgggcctgaaatatctctcttcgccccctcatgaccagcctgaggcgacgctggagaggtttgtttctggctcgccccataaaattacaacggacagtgaagcaccaccatgtgtctcctactcctccgtgacctttgggaagaagcagactgccactaccctgaaggtctacaccagaaaaatgccaagagaaagggggtaccaggatacagaggttg

SEQ ID NO: 27471 - DNA, 1780 bp, Zea Mays
accagtcaaacccgtccgacgacatcactcgggcgctctcggccgccgccggccaggtaccggtgcgccctgacgagctcctcccggaagcgcgccaggtccagccgcacgttctgccggtccaggtacaccttcttggtcacgtcccagccgcgctgcgccacgccggcggggtccgtcagcacggggtcgccggtggggtactcgcgggacagcgagctctcctcggggaggatcctgtacccgacgtagcgcagccccatccgcgccgcgggctcgccgtagtaggcgccggccgcccagtgcgtgcccaggggcaccacctggatgaacaccttccccggccgcatgaacaggaagtgcgtcatggcggcgccgtgcacgccgaccatggcgtcgctgccgttcagctcccggtatatcttgcacagctccgtcgtgcgctcgggccggatcacgcgcacgtcgaacccgacgtccgcggccagcgccgccacgtccgcctcgttctcgatcacgcgggaccccgtccgcgacacgatcaccagcctgggacggtcctcgcgaggacctcctggagctggaggcgcgccgccgccgccgccgcggcggtggcggcgctggcgcaggcgcttgcgagccgcgcgccgctccaggcgctccaggaatccgatgcggccgcggtacgcgtcgtccaggagcctgcggaagtcgccgatgctcttcccctcgggcgtcctcgccgggtccacggtcagctcgccgtggatgcgcaggccggcgatcaactcggggaagcagtgcacgcggcggtcggcggcgaagtcgatcggcgggaacgccgacagctgcgacaccacgtcgccgtacttggtcatccaccagtcgtggtactcgaggatcaccagcaccacgcgccgccggaggtggtgcgccgtcacgaacagcggcaggatcccgtcgttgaactcgtggtacacgttgcccgtgtacccgccggtggagaagagcacggccggcgcgtcgtgccgcacgtcgcaccgcgcggcgtcgccggggagcacgcggcgcaggcgcacctcgtcgatcgtcgccatcacgttcgcctcccacttgcgcgtgtacggacgtatccgctcctcctcctccgccgccgccgagctgttgccggcggacacgagctggaacgacgcgctcgccgagtgcatgcgcacgtcccccttcgcgaagcagatgtccgcgcgctccgacgtgcggtcgcagcagaggctgtcgttccccacggccgagcacggctcggacaccccgccacgcacggcggcggtcgccgccgctgccgctgccgctgccgccgagccgccttcgtcgctatgcacgaaggagaggaaggacacgggcgccacgaacagcgtccccacgcagaggaaggagaggaagagcatgcccaagaaacgccgcaggcccagcgccctaggttgcaccttcttgccgttcttgccgccgccgctgccgtggtcctggtagtagtacatgaccggccgccggccgccgcccttgggctgcgacaccttgcatgacacctcctgctccggcccgcccttcctgaactgcaagatgtagattctgtgctgttgctgctgctgcaccatggccgtcgagagaatgtttcccggatgactatgagaaaaggagcgggcgggtatggctcggcttagcaaaagagtatagaaaacaattggcggttagaggttgtgctatttatgtgccggaaaacacagca

SEQ ID NO: 27472 - DNA, 439 bp, Zea Mays
cagggagttgcgttatctcgctcgcttttgtgggtaaagtttccgcgtttgggactgaacgcgggctgcggtggttatttcttccccggccgttgaaggatcgggactgccatcgccgtcgttcggcacagctcgagctctgaagagataggtgggtgcgtttgatgcgtcgcctggcccgacgggtgacgcttaacgaaagctgattagtccgttccaacgaactcatacagcctggcgggagttcagttcacagtcatgtctctgatggatggcttctttcagagttcagggccggagttcagttcagatagcaagcaaactctactcctctgtttgtttttgtttgttgacgcctgtattatgtatgtatgtatgttcagtgtaaccgattcttttttattggtgtgtatatgtatgtgtatgcacagcaagatcg

SEQ ID NO: 27473 - DNA, 443 bp, Zea Mays
cacgcctgcaggaacgtcgcccacggccccacgccgctgcccgccgccagcaggaaggccaatccacccgcaggctcccggtgtccggcgttcggctccactgccctgacgtccgatgttctgctcctgcgcgggcgcggccgcgctgcagctccaactccggcgtccgctccgctgctccagctcccaacttccccccgaccaggttgcttattggattggatgcaaggctgttggcaggctgtaggcgtgtaggaacgccggggtttgcttgttggattggaagtaggtttgcttgttggacgtgtagggctccaggtttgcttcttggattagatgcaggtttgcagtttgtttgttggattgaacgaaggtgcagtggcagtgcctagaccctagtgcagtttgctcaagagtcaagttattcaggttctggaggaacc

SEQ ID NO: 27474 - DNA, 1368 bp, Zea Mays
ccagagcccagggcccagggcccagagcccagagttccacctccctgcccctcctcgtcgtcgcattcaactgcttcttgcggtagcgactagcgatcgacccaacttcccacccgcccccgcgtccgcgagctcgccgaagctaaggcctaagggtacccgccctcggcgctatgtcgctgtcgccggcggacagcgcggcgtactggctgcggtggcaggtcctcgtctgcggcgcgctcatcgcgctccccgcggcggccgcggcggcgctactgccgcggttgcggagggcggcgccgcctctgcgcgcggccgacctctgggtctcttgctgggcgcgcctccacccgggttggctcctcgcctaccgcgccttcgcgctcgcagcggccgtcgcgctcctggcgcgcctcctcgtcgggcacggcctcaccgtcttctacttctacacccagtggacatttctattagtcaccatatattttgcgtttgccacagctatatcagcccatggctgctgggtttactcaaggaaaagtttgaggaaatccgatgaatcccatggatttcttaatgctgatgtcgaaaatcgtgatgtttccaattccatttctggagagaggaaaaaagatgagacaaaaatgatggtgagctattatgaacaaatagcgaatgagagaagagcagggttctggggccggtgcatgcaaatcatataccagactagcgcaggtgcaacaatgttgaccgatgtcacattttgggggcttcttgtgccatttttctaccgtgacaagtttgggttagcgttggtcactgatggcatgcactccctaaatgctgtttttctacttatagacacagttctcaacaatatggtggccatacccgtttctggacctttcatcatctggagctcctatatggtacctcggcatggcaatcgctcatatcccctgcttctttttgtattggttggtcgtcaaggcgaagcacacttatttcccacggatgtttccacatgcttatgttaggacagtatagatctaaatatcagtagcatactatttcaacacctgcttggctcaagtgtacacccgtatagtctcattgaattcgccgcacctttgagatgggtctgagctctgaaaacaagccggtaccggcggcttgatcaatgaaatgcagaggctcacaatcacctggaaacagagtcttgtcctgtcttgctccttctcttgtaaagcatgtaatcagccacaactactgcatctgttcgaatcctaaaccctaaaaccttaaaatactgcagctgttcgactgctgtaattacaatctataaaaataaaataccgtacacagaaa

SEQ ID NO: 27475 - DNA, 1631 bp, Zea Mays
aaaacatgttctccattcgacctgagagaatcggaaggcatccatccaagtaaaccctgctgccgaacgaaggagcagcaaagccaccttccttctccaccacatcacctcacctctctcagtctcacgccgcagtcaccaactcgccacgcacgccttcgccgcctataaccggtaccggccaccaccactagctcccccgaggaccacaccccccaaggccccaagcccacgacgcgccacgccacgccgccagctgtcgctctccctcgcccctccccgctcctctcgccgcctcgcaatcaatggcggtggcgcggctgtgcgcggcggccgccgccgcccggctgcagccggcgctcgccgcgggcgcccgcggcctcgggacggcggcggaggtggccgcgggcgccaggtgggagcccatgggggcgcgggagtactacgactaccgccgggccatgtacggcgacatcacgcacaaggccatcctcgtcgacgccgccggcacgctgctcgccccaaccgagcccatggcgcaggtgtacagaacgataggccagaagtatggggttgattactccgaggatgagattctgatgcggtatcgctgggcgtatgcgcagccttggggtagatcacgtctgaggtatgtcaatgatggaaggcccttctggcaatacatagtgagttcatctactggctgctcaaatctagagtactttgaggagctgtatcaatattacacaactgaaaaggcactgaaatgtgaccgctggtttgatgcagttgctgtatctgctgaggtcgcagcagaaaagccaaaccctacaatattcttgaaggcctgcgagctgttaggagtgaaaccagaagaagtcgtgcatattggtgacgaccgtaggaatgatctatggggagctagggatgcaggctgtgatgcctggctttggggcagtgatgtttactccttcaaggaggttgcggagaggatcggggttgaggtataggaagaagtcgctctcctgagccgcaagaagactcgtccttgtacatagtgttagggcgtcctgtacatagagacaaaatcctgtgtgcgactgtgccaaggccttctgtagcaaatactgatgtacatctttgcgtttgaatgttcgttgcggctgtgacctgcagaatagacctttggagacccctgcagcatctttcacgtttcatatcctgaagcatcatcagcgtcaccaattcatttttcatgccttcatgtattctggcgctgagtttaggccgagatcgcctgcaaaaactgctccgactgctctttttttttcatagaggctgcatcatctcgtgaactgagaggtgctcccactgccctcttttccgtgaatgtgcttctcggttttgtccgtcgcacgtgaatcaagcaaaagaatctgcgcaagtgcattcacctgctgtgattcagcatatagaaaattttcttgctcacgcatgcagatcgacgagttgtatgcattacgaagtaaatctaaggcatgccactgaaactttatctagtatttatttaccatcgtatgtgttgtaattgacagcatatcaagttcatggatctaatgatacaatatgcc

SEQ ID NO: 27476 - DNA, 1775 bp, Zea Mays
actatctcccatttccctttttttataaccaaaacatgttctccattcgacctgagagaatcggaaggcatccatccaagtaaaccctgctgccgaacgaaggagcagcaaagccaccttccttctccaccacatcacctcacctctctcagtctcacgccgcagtcaccaactcgccacgcacgccttcgccgcctataaccggtaccggccaccaccactagctcccccgaggaccacaccccccaaggccccaagcccacgacgcgccacgccacgccgccagctgtcgctctccctcgcccctccccgctcctctcgccgcctcgcaatcaatggcggtggcgcggctgtgcgcggcggccgccgccgcccggctgcagccggcgctcgccgcgggcgcccgcggcctcgggacggcggcggaggtggccgcgggcgccaggtgggagcccatgggggcgcgggagtactacgactaccgccgggccatgtacggcgacatcacgcacaaggccatcctcgtcgacgccgccggcacgctgctcgccccaaccgagcccatggcgcaggtgtacagaacgataggccagaagtatggggttgattactccgaggatgagattctgatgcggtatcgctgggcgtatgcgcagccttggggtagatcacgtctgaggtatgtcaatgatggaaggcccttctggcaatacatagtgagttcatctactggctgctcaaatctagagtactttgaggagctgtatcaatattacacaactgaaaaggcttggcatctctgcgatccagatgctggacgtgtttttgaggcattgaggaaggctggtgtcaaaacagctgtcgtgtccaattttgacactcgtcttcggccacttttacaggcactgaaatgtgaccgctggtttgatgcagttgctgtatctgctgaggtcgcagcagaaaagccaaaccctacaatattcttgaaggcctgcgagctgttaggagtgaaaccagaagaagtcgtgcatattggtgacgaccgtaggaatgatctatggggagctagggatgcaggctgtgatgcctggctttggggcagtgatgtttactccttcaaggaggttgcggagaggatcggggttgaggtataggaagaagtcgctctcctgagccgcaagaagactcgtccttgtacatagtgttagggcgtcctgtacatagagacaaaatcctgtgtgcgactgtgccaaggccttctgtagcaaatactgatgtacatctttgcgtttgaatgttcgttgcggctgtgacctgcagaatagacctttggagacccctgcagcatctttcacgtttcatatcctgaagcatcatcagcgtcaccaattcatttttcatgccttcatgtattctggcgctgagtttaggccgagatcgcctgcaaaaactgctccgactgctctttttttttcatagaggctgcatcatctcgtgaactgagaggtgctcccactgccctcttttccgtgaatgtgcttctcggttttgtccgtcgcacgtgaatcaagcaaaagaatctgcgcaagtgcattcacctgctgtgattcagcatatagaaaattttcttgctcacgcatgcagatcgacgagttgtatgcattacgaagtaaatctaaggcatgccactgaaactttatctagtatttatttaccatcgtatgtgttgtaattgacagcatatcaagttcatggatctaatgatacaatatgcc

SEQ ID NO: 27477 - DNA, 3062 bp, Zea Mays
ctctctttcccctcgctcctggaagccatgagtagggcacataggattggccaacaggagacagttaatatctaccgcttcgtcacatgcaaaagtgttgaggaggatattttggaacgcgcaaagaaaaagatggttcttgatcacttggtcattcagaagctaaacgctgagggcaggcttgagaagaaagaatccaaaaaaggtggccccatatttgacaagaacgaactttcagctatcttgaggttcggtgcagaggaattgttcaaggaagacaagactgatgaagagaccaagaggaaccttgaaagtttggacattgatgaaattcttgagagagctgagaaagtcgagacaaagggtggtgaaggggaggaaggaaatgagcttcttagcgctttcaaggtcgcaaacttttccagtgtcgaagatgatgcaacgttctggagtaggttaatacagccagatcctgcagatatagttcaggaaactttggcacctcgtgctgcacgaaataaaaagagctatattgaagatcctcagcttgacaaaaataataacaggaaaagacgggcagttgaaacacaagaaaagccaaggaggctttctggcagaactgtggaaacagttaattcattaccattggttgatggagcagtagctcaagtacgagagtggtcttttggtaatgttccaaagaaggacgcttctcgttttgtacgagcggtcaaaaaatttgggaatgcaacccagattggattaattgtggatgatgttggtggtgtacttgcgaaggtaccgcatgaagcgcagatagaactatttgatttgctggttgatggttgtcaggaagcagttaaggagaatacagacattaagggcacagttttggattttttcggtgtagctgtaaaggcctatgaattgctagctcgtgttgaagagcttcagttcttggcaaagcgaattgcacgttacaaagatccaatcaagcagtaccgcatccagctaccttataaaaagcctcagtggtcagcaagctgtggatggactgaaactgatgacgctagattgatggttggaattcattggtatggctacgggaattgggagaaaataaggttggatccaaagcttggcctgacaacaaaaattgcgccagcaacacttggagaaagggagacatttttaccacgtgctcccaacttggataaccgcgctagtgctctcctgcaaaaggagtatgctaagtttagcggtaagagcttaaaagtcaaaggaaacacccgccagacagtcaataacgacagtaatagtggagttcgatcaatgaggggccggcaaaaggatgtaccagaaaaagatgataataagccgaacaaagatgacattcagaagcgtagggtaatagtggaagctgaagcaagagaagaaggtgaaatttctgaatcggaggcagagaccaggtatcgtcaggacaaagaggagaagtggcttgaatggtgctctgaagttttagatgaggagcaggaaactttgaagcgcctggataggctgcagaatacaagtgtaaacctcccaaaggaaaaggttctttcaaggattcgcaagtatctcctgataattggggacaaaattggagaagttgtccggcaacacagtgaatcttataggcaatcccgcatggtcatgaggttatggaattatgttgccaccttttcaaacatgtctggggagcaactgcatgatctctatatgaaacttagtcaagaccaactggaaggtggagttggcccatctcatggtggcaatttcacatccattcctcccaataagggaggtaactcaaatcaacttcatccttcgagaaaccaaaggccaactaggtctctccagtacaattctgagtctttccataatgagagctctggaagttctgaagcctggaagcgtcgacggagagctgacacagataatcaatttgacacccagcctttgtgtcaacctccaattatgacaaatggaaataggttgcaggaatctagtagttctgcaggtattcttggttggggtccagttgaaattagacggtatggtaatgagaggccaaaacgtgctgttcatcctagtcatttccctactgggcatggacctttgctgtagctgaaggaagtagatgatgcgaacaaccttgttcattttggcataaccgttcccagtgaatttcagcttccatatagttataaatggtggatctccgtaggaattgaaattctttttccaaaacaaaaaggaataaagagcaacctcacctggatcacagttttgaattatatgccttaaaaggtaatgccaggactctagaggcgacttatggaattgttaacagctacactgaatatccttctgacaccatcacagcaacacaaatacatggtggcttgtgaactgccaagaggatcaatcgaggaagttttgcctgttcagttttgtgatctctcaacaatgatctatagttaaatctcaatacataaattatgctttacattgtaatatattgaaatatggttccgttatgctccctccctctcgatgtgttttgtgccgtttttctaccgtgttgatgtaaaagatgaaagaaatgcatgttctcattttgaggcaacaaaaagttgcagccgggagcataatagtgaaatgcgatggaattatcggatacttatcgattccatagtgttttccctgagacaatgtactgaatgaggtacggttataagaaatggtgataattagcttagtaggtgctcagccattctacaagtcatctggtagtccgaagttgcatgaggcctactttcccctggttgccccacttatgctcagtaagtatgcttctagggttgtatgatgatggcccaattgaatttttaatcctgtgtatgaatggtgatggccaaacacttaaatgtagcactgatttaataataggtaccagttttgtcctttttcaattctgttttctgttggtgttcaaaatgtatataattttaaaaaaggta

SEQ ID NO: 27478 - DNA, 3558 bp, Zea Mays
gtgggcaaggattgattgtttataacttcatgtctgatctactaaattcaaataattagtgtgcttggtatcacttcttaacattgttgttgaattgaagaaatgctgcaaccatccattcttgtttgaaagtgccgatcatggttatggtggagatagcatcggtgatcggaataaagttgaacgtattgttatgagtagtgggaaacttgtcttgttggacaaactattggtgagactgcgggagactaaccatcgtgtgcttatattctcacagatggttaagatgttggacatccttgcagaatacctctctcttcggggatttcagtttcagaggcttgatggtagtacaagagcagatcttcgtcatcaagccatggaacactttaatgctcctggaagtgatgatttctgttttcttttatccacacgtgccggaggacttggtattaatctagcaactgcagatacagtgataatttttgattcagattggaatccacaaaatgatttgcaggccatgagtagggcacataggattggccaacaggagacagttaatatctaccgcttcgtcacatgcaaaagtgttgaggaggatattttggaacgcgcaaagaaaaagatggttcttgatcacttggtcattcagaagctaaacgctgagggcaggcttgagaagaaagaatccaaaaaaggtggccccatatttgacaagaacgaactttcagctatcttgaggttcggtgcagaggaattgttcaaggaagacaagactgatgaagagaccaagaggaaccttgaaagtttggacattgatgaaattcttgagagagctgagaaagtcgagacaaagggtggtgaaggggaggaaggaaatgagcttcttagcgctttcaaggtcgcaaacttttccagtgtcgaagatgatgcaacgttctggagtaggttaatacagccagatcctgcagatatagttcaggaaactttggcacctcgtgctgcacgaaataaaaagagctatattgaagatcctcagcttgacaaaaataataacaggaaaagacgggcagttgaaacacaagaaaagccaaggaggctttctggcagaactgtggaaacagttaattcattaccattggttgatggagcagtagctcaagtacgagagtggtcttttggtaatgttccaaagaaggacgcttctcgttttgtacgagcggtcaaaaaatttgggaatgcaacccagattggattaattgtggatgatgttggtggtgtacttgcgaaggtaccgcatgaagcgcagatagaactatttgatttgctggttgatggttgtcaggaagcagttaaggagaatacagacattaagggcacagttttggattttttcggtgtagctgtaaaggcctatgaattgctagctcgtgttgaagagcttcagttcttggcaaagcgaattgcacgttacaaagatccaatcaagcagtaccgcatccagctaccttataaaaagcctcagtggtcagcaagctgtggatggactgaaactgatgacgctagattgatggttggaattcattggtatggctacgggaattgggagaaaataaggttggatccaaagcttggcctgacaacaaaaattgcgccagcaacacttggagaaagggagacatttttaccacgtgctcccaacttggataaccgcgctagtgctctcctgcaaaaggagtatgctaagtttagcggtaagagcttaaaagtcaaaggaaacacccgccagacagtcaataacgacagtaatagtggagttcgatcaatgaggggccggcaaaaggatgtaccagaaaaagatgataataagccgaacaaagatgacattcagaagcgtagggtaatagtggaagctgaagcaagagaagaaggtgaaatttctgaatcggaggcagagaccaggtatcgtcaggacaaagaggagaagtggcttgaatggtgctctgaagttttagatgaggagcaggaaactttgaagcgcctggataggctgcagaatacaagtgtaaacctcccaaaggaaaaggttctttcaaggattcgcaagtatctcctgataattggggacaaaattggagaagttgtccggcaacacagtgaatcttataggcaatcccgcatggtcatgaggttatggaattatgttgccaccttttcaaacatgtctggggagcaactgcatgatctctatatgaaacttagtcaagaccaactggaaggtggagttggcccatctcatggtggcaatttcacatccattcctcccaataagggaggtaactcaaatcaacttcatccttcgagaaaccaaaggccaactaggtctctccagtacaattctgagtctttccataatgagagctctggaagttctgaagcctggaagcgtcgacggagagctgacacagataatcaatttgacacccagcctttgtgtcaacctccaattatgacaaatggaaataggttgcaggaatctagtagttctgcaggtattcttggttggggtccagttgaaattagacggtatggtaatgagaggccaaaacgtgctgttcatcctagtcatttccctactgggcatggacctttgctgtagctgaaggaagtagatgatgcgaacaaccttgttcattttggcataaccgttcccagtgaatttcagcttccatatagttataaatggtggatctccgtaggaattgaaattctttttccaaaacaaaaaggaataaagagcaacctcacctggatcacagttttgaattatatgccttaaaaggtaatgccaggactctagaggcgacttatggaattgttaacagctacactgaatatccttctgacaccatcacagcaacacaaatacatggtggcttgtgaactgccaagaggatcaatcgaggaagttttgcctgttcagttttgtgatctctcaacaatgatctatagttaaatctcaatacataaattatgctttacattgtaatatattgaaatatggttccgttatgctccctccctctcgatgtgttttgtgccgtttttctaccgtgttgatgtaaaagatgaaagaaatgcatgttctcattttgaggcaacaaaaagttgcagccgggagcataatagtgaaatgcgatggaattatcggatacttatcgattccatagtgttttccctgagacaatgtactgaatgaggtacggttataagaaatggtgataattagcttagtaggtgctcagccattctacaagtcatctggtagtccgaagttgcatgaggcctactttcccctggttgccccacttatgctcagtaagtatgcttctagggttgtatgatgatggcccaattgaatttttaatcctgtgtatgaatggtgatggccaaacacttaaatgtagcactgatttaataataggtaccagttttgtcctttttcaattctgttttctgttggtgttcaaaatgtatataattttaaaaaaggta

SEQ ID NO: 27479 - DNA, 6650 bp, Zea Mays
gaaaaaacttatctgccgcctctctatcgcgcgcgccgccgccgcgctgccgcgccgggagcctgtctccggcgatcgccgccttccagccccgttactgaccctcctccgatccgaatcctaggcgaaaaatcgcggaaaataccgcaaaaaatcgcggaaaatcgcccggtcctttttgaataaatcgcacgggcgttgcaccccgctcccttgctcccctcccaccgccggcgacggcgatcgcgcagactaataggtgccccgcggcgagccagaaaacctgcctcgtgccggtccgagcattcgtctctgtcggggggactgagcgcccgtcgcccacccgcctcctgctcctctcgtcggccgcggcaggaggagtgacactgagactgtgagaggtattccatgtaatgccataatttgtgatggcatttttcagcaactccgggagcaaggccgattcagaagggtacaacttgaatgaaaaggccgatgatgatggcatacacgagtcaatccgggatgggaatgatggcctgaactctaggcagtggaacttaaatgagaaagcagaggatgcttaccacagcgaagcagagcaatatgagtctggccagtcaggtttgtacgcatcaaggcagcatgttcagagaggaggcagatcgtctggtggtccatggggcacaaattttctgaaggattccaggtccaaacagacggccaaggaagttgcatcaaatagcggtagaggaatggatgctgctaactcgcatgatgacatggatggtagcagagaggatgatgaactgaatagagcaaatggtgaggtgcctgctgaggaaatgctctcagatgactattacgagcaggacggagaggatcagattgaatcgttgcatcgtggcgggatgaagcagtcaagctgttccacttctggtggagcagcaaagtctggctcacgacaaatgaagaagatgtcaaagtacaatgcttatgataacgatgagtataatgatgagaatgatgatgacagcgatgcagatgaagatgatcctgctgacatggattttgagccagacggcgaaacagacaaggctactgataaggataagtttatggatagtgagaattctgacggcgacgacgatgatgaccttgaactctcagatgatgaagatgattttgttgagaatcggaggcaacctaaacgacttaagattgtagcaactaaaacttccaagggaggacagttgcccatgccagttcaaccaaaacgaggggtgtctcacagtgatgaagaatatttttcaggaaaagactcagatgttcccagcgattcggatttcaaacacataccgaaaaaacctgacaggttgcatcagaaacctgtgggccgcagtgatgttgccccaatcagttctcataatgagcttagaacttctggaaggaggaggacggtgaaaaagatctcatatgctgaaagcgaagaaagtgatgatagtgaggagaagtcaaataagcgacaaaagctcatcaaggaggaaccggaagaggaggatggagaaacaattgaaaaagttctgtggcatcaacccaagggtgtagcagaagaggcaataaggaatcaccggtcagctcaacctactgttgccagcctaacatcggactttgaccaacaatgggatgaattagagttctatataaaatggaaaggccagtcttacctgcattgtcaatggaagatactatcagagctccaaagttggattcaagaaggtaataaactacacgaaaagagtttctgaggaacagaggtacaagagggcactatcacgtgaagaggttgaggttgaacggatatttgctgatagggtcagcaaagctgatggagatgatctggttcccgaatatttagtaaaatggcaaggacttccttatgcagaatctacctgggaaaaagatacagatattgattttgctcaagatgcgattgatgaatataaggctcgtgaagctgcctcagctatacttgggaaaacagtagatttccaacgaaagaaaagcaaagctagtttgaggaggcttgatggtcagccagaatggctaaaagctggcaagcttcgtgattatcagctggaaggactaaactttctcgtcaatgggtggagaaacgatactaatgttatacttgctgatgaaatgggtctgggaaaaactatccaatctgtatccatgcttggcttccttcataatgctcaagaaatcaatggcccatttcttgtagtcgtgccactgtcaacattgtcgaactgggcaaaggaatttcggaagtggctgcccaacatgaatgttgttgtttatgttggcaaccgtgccagcagagagatgtgccagcagcatgaatttttttcagacaaaaaaggtgggcgtcatgtaaaattccacacgttgataactacgtacgaggtgattctcaaagacaaagcggttctttccaagataaaatggaactatcttatggttgatgaagcccaccggttgaaaaattgtgaagcgtcactgtatacaacccttttggaattcagcactaagaacaagctgcttatcacgggaacacctttgcagaacagtgtggaagagctttgggcattacttcatttccttgatccagtcaaattcaacagcaaggatagttttgttgagagatacaaaaatttgagttccttcaacgaaactgagctcgcgaatctgcataaggaattgaggcctcatattctacggcgggttataaaagatgttgagaagtctttacctcctaaaatcgagaggattctacgtgttgagatgtcacccctccagaaacagtactacaagtggattttagagcggaattttcagaatctgaataaaggtgttcgtgggaatcaggatcttgattggaacaatgttactattctttctcacctactattgctaggtcaagcagttcctcacctgctattgctagctcaagaagtttctcacctggccgtgcattacctatcaaactggagcatgggcaaggccacaaggcaagacttggctgttgtatcacttcttaacattgttgttgaattgaagaaatgctgcaaccatccattcttgtttgaaagtgccgatcatggttatggtggagatagcatcggtgatcggaataaagttgaacgtattgttatgagtagtgggaaacttgtcttgttggacaaactattggtgagactgcgggagactaaccatcgtgtgcttatattctcacagggcctcttcagtgtggtttggtttggttcaaacccgcactacgggtgccctaagagagaaagcaaaaaaatggttaagatgttggacatccttgcagaatacctctctcttcggggatttcagtttcagaggcttgatggtagtacaagagcagatcttcgtcatcaagccatggaacactttaatgctcctggaagtgatgatttctgttttcttttatccacacgtgccggaggacttggtattaatctagcaactgcagatacagtgataatttttgattcagattggaatccacaaaatgatttgcaggccatgagtagggcacataggattggccaacaggagacagttaatatctaccgcttcgtcacatgcaaaagtgttgaggaggatattttggaacgcgcaaagaaaaagatggttcttgatcacttggtcattcagaagctaaacgctgagggcaggcttgagaagaaagaatccaaaaaaggtggccccatatttgacaagaacgaactttcagctatcttgaggttcggtgcagaggaattgttcaaggaagacaagactgatgaagagaccaagaggaaccttgaaagtttggacattgatgaaattcttgagagagctgagaaagtcgagacaaagggtggtgaaggggaggaaggaaatgagcttcttagcgctttcaaggtcgcaaacttttccagtgtcgaagatgatgcaacgttctggagtaggttaatacagccagatcctgcagatatagttcaggaaactttggcacctcgtgctgcacgaaataaaaagagctatattgaagatcctcagcttgacaaaaataataacaggaaaagacgggcagttgaaacacaagaaaagccaaggaggctttctggcagaactgtggaaacagttaattcattaccattggttgatggagcagtagctcaagtacgagagtggtcttttggtaatgttccaaagaaggacgcttctcgttttgtacgagcggtcaaaaaatttgggaatgcaacccagattggattaattgtggatgatgttggtggtgtacttgcgaaggtaccgcatgaagcgcagatagaactatttgatttgctggttgatggttgtcaggaagcagttaaggagaatacagacattaagggcacagttttggattttttcggtgtagctgtaaaggcctatgaattgctagctcgtgttgaagagcttcagttcttggcaaagcgaattgcacgttacaaagatccaatcaagcagtaccgcatccagctaccttataaaaagcctcagtggtcagcaagctgtggatggactgaaactgatgacgctagattgatggttggaattcattggtatggctacgggaattgggagaaaataaggttggatccaaagcttggcctgacaacaaaaattgcgccagcaacacttggagaaagggagacatttttaccacgtgctcccaacttggataaccgcgctagtgctctcctgcaaaaggagtatgctaagtttagcggtaagagcttaaaagtcaaaggaaacacccgccagacagtcaataacgacagtaatagtggagttcgatcaatgaggggccggcaaaaggatgtaccagaaaaagatgataataagccgaacaaagatgacattcagaagcgtagggtaatagtggaagctgaagcaagagaagaaggtgaaatttctgaatcggaggcagagaccaggtatcgtcaggacaaagaggagaagtggcttgaatggtgctctgaagttttagatgaggagcaggaaactttgaagcgcctggataggctgcagaatacaagtgtaaacctcccaaaggaaaaggttctttcaaggattcgcaagtatctcctgataattggggacaaaattggagaagttgtccggcaacacagtgaatcttataggcaatcccgcatggtcatgaggttatggaattatgttgccaccttttcaaacatgtctggggagcaactgcatgatctctatatgaaacttagtcaagaccaactggaaggtggagttggcccatctcatggtggcaatttcacatccattcctcccaataagggaggtaactcaaatcaacttcatccttcgagaaaccaaaggccaactaggtctctccagtacaattctgagtctttccataatgagagctctggaagttctgaagcctggaagcgtcgacggagagctgacacagataatcaatttgacacccagcctttgtgtcaacctccaattatgacaaatggaaataggttgcaggaatctagtagttctgcaggtattcttggttggggtccagttgaaattagacggtatggtaatgagaggccaaaacgtgctgttcatcctagtcatttccctactgggcatggacctttgctgtagctgaaggaagtagatgatgcgaacaaccttgttcattttggcataaccgttcccagtgaatttcagcttccatatagttataaatggtggatctccgtaggaattgaaattctttttccaaaacaaaaaggaataaagagcaacctcacctggatcacagttttgaattatatgccttaaaaggtaatgccaggactctagaggcgacttatggaattgttaacagctacactgaatatccttctgacaccatcacagcaacacaaatacatggtggcttgtgaactgccaagaggatcaatcgaggaagttttgcctgttcagttttgtgatctctcaacaatgatctatagttaaatctcaatacataaattatgctttacattgtaatatattgaaatatggttccgttatgctccctccctctcgatgtgttttgtgccgtttttctaccgtgttgatgtaaaagatgaaagaaatgcatgttctcattttgaggcaacaaaaagttgcagccgggagcataatagtgaaatgcgatggaattatcggatacttatcgattccatagtgttttccctgagacaatgtactgaatgaggtacggttataagaaatggtgataattagcttagtaggtgctcagccattctacaagtcatctggtagtccgaagttgcatgaggcctactttcccctggttgccccacttatgctcagtaagtatgcttctagggttgtatgatgatggcccaattgaatttttaatcctgtgtatgaatggtgatggccaaacacttaaatgtagcactgatttaataataggtaccagttttgtcctttttcaattctgttttctgttggtgttcaaaatgtatataattttaaaaaaggta

SEQ ID NO: 27480 - DNA, 6657 bp, Zea Mays
gaaaaaacttatctgccgcctctctatcgcgcgcgccgccgccgcgctgccgcgccgggagcctgtctccggcgatcgccgccttccagccccgttactgaccctcctccgatccgaatcctaggcgaaaaatcgcggaaaataccgcaaaaaatcgcggaaaatcgcccggtcctttttgaataaatcgcacgggcgttgcaccccgctcccttgctcccctcccaccgccggcgacggcgatcgcgcagactaataggtgccccgcggcgagccagaaaacctgcctcgtgccggtccgagcattcgtctctgtcggggggactgagcgcccgtcgcccacccgcctcctgctcctctcgtcggccgcggcaggaggagtgacactgagactgtgagaggtattccatgtaatgccataatttgtgatggcatttttcagcaactccgggagcaaggccgattcagaagggtacaacttgaatgaaaaggccgatgatgatggcatacacgagtcaatccgggatgggaatgatggcctgaactctaggcagtggaacttaaatgagaaagcagaggatgcttaccacagcgaagcagagcaatatgagtctggccagtcaggtttgtacgcatcaaggcagcatgttcagagaggaggcagatcgtctggtggtccatggggcacaaattttctgaaggattccaggtccaaacagacggccaaggaagttgcatcaaatagcggtagaggaatggatgctgctaactcgcatgatgacatggatggtagcagagaggatgatgaactgaatagagcaaatggtgaggtgcctgctgaggaaatgctctcagatgactattacgagcaggacggagaggatcagattgaatcgttgcatcgtggcgggatgaagcagtcaagctgttccacttctggtggagcagcaaagtctggctcacgacaaatgaagaagatgtcaaagtacaatgcttatgataacgatgagtataatgatgagaatgatgatgacagcgatgcagatgaagatgatcctgctgacatggattttgagccagacggcgaaacagacaaggctactgataaggataagtttatggatagtgagaattctgacggcgacgacgatgatgaccttgaactctcagatgatgaagatgattttgttgagaatcggaggcaacctaaacgacttaagattgtagcaactaaaacttccaagggaggacagttgcccatgccagttcaaccaaaacgaggggtgtctcacagtgatgaagaatatttttcaggaaaagactcagatgttcccagcgattcggatttcaaacacataccgaaaaaacctgacaggttgcatcagaaacctgtgggccgcagtgatgttgccccaatcagttctcataatgagcttagaacttctggaaggaggaggacggtgaaaaagatctcatatgctgaaagcgaagaaagtgatgatagtgaggagaagtcaaataagcgacaaaagctcatcaaggaggaaccggaagaggaggatggagaaacaattgaaaaagttctgtggcatcaacccaagggtgtagcagaagaggcaataaggaatcaccggtcagctcaacctactgttgccagcctaacatcggactttgaccaacaatgggatgaattagagttctatataaaatggaaaggccagtcttacctgcattgtcaatggaagatactatcagagctccaaagtgttagtggattcaagaaggtaataaactacacgaaaagagtttctgaggaacagaggtacaagagggcactatcacgtgaagaggttgaggttgaacggatatttgctgatagggtcagcaaagctgatggagatgatctggttcccgaatatttagtaaaatggcaaggacttccttatgcagaatctacctgggaaaaagatacagatattgattttgctcaagatgcgattgatgaatataaggctcgtgaagctgcctcagctatacttgggaaaacagtagatttccaacgaaagaaaagcaaagctagtttgaggaggcttgatggtcagccagaatggctaaaagctggcaagcttcgtgattatcagctggaaggactaaactttctcgtcaatgggtggagaaacgatactaatgttatacttgctgatgaaatgggtctgggaaaaactatccaatctgtatccatgcttggcttccttcataatgctcaagaaatcaatggcccatttcttgtagtcgtgccactgtcaacattgtcgaactgggcaaaggaatttcggaagtggctgcccaacatgaatgttgttgtttatgttggcaaccgtgccagcagagagatgtgccagcagcatgaatttttttcagacaaaaaaggtgggcgtcatgtaaaattccacacgttgataactacgtacgaggtgattctcaaagacaaagcggttctttccaagataaaatggaactatcttatggttgatgaagcccaccggttgaaaaattgtgaagcgtcactgtatacaacccttttggaattcagcactaagaacaagctgcttatcacgggaacacctttgcagaacagtgtggaagagctttgggcattacttcatttccttgatccagtcaaattcaacagcaaggatagttttgttgagagatacaaaaatttgagttccttcaacgaaactgagctcgcgaatctgcataaggaattgaggcctcatattctacggcgggttataaaagatgttgagaagtctttacctcctaaaatcgagaggattctacgtgttgagatgtcacccctccagaaacagtactacaagtggattttagagcggaattttcagaatctgaataaaggtgttcgtgggaatcagttatttcagttggcacatcttggaattgaatgcaatttggctgtctcagatcttgattggaacaatgttactattctttctcacctactattgctaggtcaagcagttcctcacctgctattgctagctcaagaagtttctcacctggccgtgcattacctatcaaactggagcatgggcaaggccacaaggcaagacttggctgttgtgagccaaatctgctctcccatgtatcacttcttaacattgttgttgaattgaagaaatgctgcaaccatccattcttgtttgaaagtgccgatcatggttatggtggagatagcatcggtgatcggaataaagttgaacgtattgttatgagtagtgggaaacttgtcttgttggacaaactattggtgagactgcgggagactaaccatcgtgtgcttatattctcacagatggttaagatgttggacatccttgcagaatacctctctcttcggggatttcagtttcagaggcttgatggtagtacaagagcagatcttcgtcatcaagccatggaacactttaatgctcctggaagtgatgatttctgttttcttttatccacacgtgccggaggacttggtattaatctagcaactgcagatacagtgataatttttgattcagattggaatccacaaaatgatttgcaggccatgagtagggcacataggattggccaacaggagacagttaatatctaccgcttcgtcacatgcaaaagtgttgaggaggatattttggaacgcgcaaagaaaaagatggttcttgatcacttggtcattcagaagctaaacgctgagggcaggcttgagaagaaagaatccaaaaaaggtggccccatatttgacaagaacgaactttcagctatcttgaggttcggtgcagaggaattgttcaaggaagacaagactgatgaagagaccaagaggaaccttgaaagtttggacattgatgaaattcttgagagagctgagaaagtcgagacaaagggtggtgaaggggaggaaggaaatgagcttcttagcgctttcaaggtcgcaaacttttccagtgtcgaagatgatgcaacgttctggagtaggttaatacagccagatcctgcagatatagttcaggaaactttggcacctcgtgctgcacgaaataaaaagagctatattgaagatcctcagcttgacaaaaataataacaggaaaagacgggcagttgaaacacaagaaaagccaaggaggctttctggcagaactgtggaaacagttaattcattaccattggttgatggagcagtagctcaagtacgagagtggtcttttggtaatgttccaaagaaggacgcttctcgttttgtacgagcggtcaaaaaatttgggaatgcaacccagattggattaattgtggatgatgttggtggtgtacttgcgaaggtaccgcatgaagcgcagatagaactatttgatttgctggttgatggttgtcaggaagcagttaaggagaatacagacattaagggcacagttttggattttttcggtgtagctgtaaaggcctatgaattgctagctcgtgttgaagagcttcagttcttggcaaagcgaattgcacgttacaaagatccaatcaagcagtaccgcatccagctaccttataaaaagcctcagtggtcagcaagctgtggatggactgaaactgatgacgctagattgatggttggaattcattggtatggctacgggaattgggagaaaataaggttggatccaaagcttggcctgacaacaaaaattgcgccagcaacacttggagaaagggagacatttttaccacgtgctcccaacttggataaccgcgctagtgctctcctgcaaaaggagtatgctaagtttagcggtaagagcttaaaagtcaaaggaaacacccgccagacagtcaataacgacagtaatagtggagttcgatcaatgaggggccggcaaaaggatgtaccagaaaaagatgataataagccgaacaaagatgacattcagaagcgtagggtaatagtggaagctgaagcaagagaagaaggtgaaatttctgaatcggaggcagagaccaggtatcgtcaggacaaagaggagaagtggcttgaatggtgctctgaagttttagatgaggagcaggaaactttgaagcgcctggataggctgcagaatacaagtgtaaacctcccaaaggaaaaggttctttcaaggattcgcaagtatctcctgataattggggacaaaattggagaagttgtccggcaacacagtgaatcttataggcaatcccgcatggtcatgaggttatggaattatgttgccaccttttcaaacatgtctggggagcaactgcatgatctctatatgaaacttagtcaagaccaactggaaggtggagttggcccatctcatggtggcaatttcacatccattcctcccaataagggaggtaactcaaatcaacttcatccttcgagaaaccaaaggccaactaggtctctccagtacaattctgagtctttccataatgagagctctggaagttctgaagcctggaagcgtcgacggagagctgacacagataatcaatttgacacccagcctttgtgtcaacctccaattatgacaaatggaaataggttgcaggaatctagtagttctgcaggtattcttggttggggtccagttgaaattagacggtatggtaatgagaggccaaaacgtgctgttcatcctagtcatttccctactgggcatggacctttgctgtagctgaaggaagtagatgatgcgaacaaccttgttcattttggcataaccgttcccagtgaatttcagcttccatatagttataaatggtggatctccgtaggaattgaaattctttttccaaaacaaaaaggaataaagagcaacctcacctggatcacagttttgaattatatgccttaaaaggtaatgccaggactctagaggcgacttatggaattgttaacagctacactgaatatccttctgacaccatcacagcaacacaaatacatggtggcttgtgaactgccaagaggatcaatcgaggaagttttgcctgttcagttttgtgatctctcaacaatgatctatagttaaatctcaatacataaattatgctttacattgtaatatattgaaatatggttccgttatgctccctccctctcgatgtgttttgtgccgtttttctaccgtgttgatgtaaaagatgaaagaaatgcatgttctcattttgaggcaacaaaaagttgcagccgggagcataatagtgaaatgcgatggaattatcggatacttatcgattccatagtgttttccctgagacaatgtactgaatgaggtacggttataagaaatggtgataattagcttagtaggtgctcagccattctacaagtcatctggtagtccgaagttgcatgaggcctactttcccctggttgccccacttatgctcagtaagtatgcttctagggttgtatgatgatggcccaattgaatttttaatcctgtgtatgaatggtgatggccaaacacttaaatgtagcactgatttaataataggtaccagttttgtcctttttcaattctgttttctgttggtgttcaaaatgtatataattttaaaaaaggta

SEQ ID NO: 27481 - DNA, 6481 bp, Zea Mays
gaaaaaacttatctgccgcctctctatcgcgcgcgccgccgccgcgctgccgcgccgggagcctgtctccggcgatcgccgccttccagccccgttactgaccctcctccgatccgaatcctaggcgaaaaatcgcggaaaataccgcaaaaaatcgcggaaaatcgcccggtcctttttgaataaatcgcacgggcgttgcaccccgctcccttgctcccctcccaccgccggcgacggcgatcgcgcagactaataggtgccccgcggcgagccagaaaacctgcctcgtgccggtccgagcattcgtctctgtcggggggactgagcgcccgtcgcccacccgcctcctgctcctctcgtcggccgcggcaggaggagtgacactgagactgtgagaggtattccatgtaatgccataatttgtgatggcatttttcagcaactccgggagcaaggccgattcagaagggtacaacttgaatgaaaaggccgatgatgatggcatacacgagtcaatccgggatgggaatgatggcctgaactctaggcagtggaacttaaatgagaaagcagaggatgcttaccacagcgaagcagagcaatatgagtctggccagtcaggtttgtacgcatcaaggcagcatgttcagagaggaggcagatcgtctggtggtccatggggcacaaattttctgaaggattccaggtccaaacagacggccaaggaagttgcatcaaatagcggtagaggaatggatgctgctaactcgcatgatgacatggatggtagcagagaggatgatgaactgaatagagcaaatggtgaggtgcctgctgaggaaatgctctcagatgactattacgagcaggacggagaggatcagattgaatcgttgcatcgtggcgggatgaagcagtcaagctgttccacttctggtggagcagcaaagtctggctcacgacaaatgaagaagatgtcaaagtacaatgcttatgataacgatgagtataatgatgagaatgatgatgacagcgatgcagatgaagatgatcctgctgacatggattttgagccagacggcgaaacagacaaggctactgataaggataagtttatggatagtgagaattctgacggcgacgacgatgatgaccttgaactctcagatgatgaagatgattttgttgagaatcggaggcaacctaaacgacttaagattgtagcaactaaaacttccaagggaggacagttgcccatgccagttcaaccaaaacgaggggtgtctcacagtgatgaagaatatttttcaggaaaagactcagatgttcccagcgattcggatttcaaacacataccgaaaaaacctgacaggttgcatcagaaacctgtgggccgcagtgatgttgccccaatcagttctcataatgagcttagaacttctggaaggaggaggacggtgaaaaagatctcatatgctgaaagcgaagaaagtgatgatagtgaggagaagtcaaataagcgacaaaagctcatcaaggaggaaccggaagaggaggatggagaaacaattgaaaaagttctgtggcatcaacccaagggtgtagcagaagaggcaataaggaatcaccggtcagctcaacctactgttgccagcctaacatcggactttgaccaacaatgggatgaattagagttctatataaaatggaaaggccagtcttacctgcattgtcaatggaagatactatcagagctccaaagtgttagtggattcaagaaggtaataaactacacgaaaagagtttctgaggaacagaggtacaagagggcactatcacgtgaagaggttgaggtacatgacgtgggcaaggagatggagctggatcttattaaacaatatagtcaggttgaacggatatttgctgatagggtcagcaaagctgatggagatgatctggttcccgaatatttagtaaaatggcaaggacttccttatgcagaatctacctgggaaaaagatacagatattgattttgctcaagatgcgattgatgaatataaggctcgtgaagctgcctcagctatacttgggaaaacagtagatttccaacgaaagaaaagcaaagctagtttgaggaggcttgatggtcagccagaatggctaaaagctggcaagcttcgtgattatcagctggaaggactaaactttctcgtcaatgggtggagaaacgatactaatgttatacttgctgatgaaatgggtctgggaaaaactatccaatctgtatccatgcttggcttccttcataatgctcaagaaatcaatggcccatttcttgtagtcgtgccactgtcaacattgtcgaactgggcaaaggaatttcggaagtggctgcccaacatgaatgttgttgtttatgttggcaaccgtgccagcagagagatgtgccagcagcatgaatttttttcagacaaaaaaggtgggcgtcatgtaaaattccacacgttgataactacgtacgaggtgattctcaaagacaaagcggttctttccaagataaaatggaactatcttatggttgatgaagcccaccggttgaaaaattgtgaagcgtcactgtatacaacccttttggaattcagcactaagaacaagctgcttatcacgggaacacctttgcagaacagtgtggaagagctttgggcattacttcatttccttgatccagtcaaattcaacagcaaggatagttttgttgagagatacaaaaatttgagttccttcaacgaaactgagctcgcgaatctgcataaggaattgaggcctcatattctacggcgggttataaaagatgttgagaagtctttacctcctaaaatcgagaggattctacgtgttgagatgtcacccctccagaaacagtactacaagtggattttagagcggaattttcagaatctgaataaaggtgttcgtgggaatcaggtatcacttcttaacattgttgttgaattgaagaaatgctgcaaccatccattcttgtttgaaagtgccgatcatggttatggtggagatagcatcggtgatcggaataaagttgaacgtattgttatgagtagtgggaaacttgtcttgttggacaaactattggtgagactgcgggagactaaccatcgtgtgcttatattctcacagatggttaagatgttggacatccttgcagaatacctctctcttcggggatttcagtttcagaggcttgatggtagtacaagagcagatcttcgtcatcaagccatggaacactttaatgctcctggaagtgatgatttctgttttcttttatccacacgtgccggaggacttggtattaatctagcaactgcagatacagtgataatttttgattcagattggaatccacaaaatgatttgcaggccatgagtagggcacataggattggccaacaggagacagttaatatctaccgcttcgtcacatgcaaaagtgttgaggaggatattttggaacgcgcaaagaaaaagatggttcttgatcacttggtcattcagaagctaaacgctgagggcaggcttgagaagaaagaatccaaaaaaggtggccccatatttgacaagaacgaactttcagctatcttgaggttcggtgcagaggaattgttcaaggaagacaagactgatgaagagaccaagaggaaccttgaaagtttggacattgatgaaattcttgagagagctgagaaagtcgagacaaagggtggtgaaggggaggaaggaaatgagcttcttagcgctttcaaggtcgcaaacttttccagtgtcgaagatgatgcaacgttctggagtaggttaatacagccagatcctgcagatatagttcaggaaactttggcacctcgtgctgcacgaaataaaaagagctatattgaagatcctcagcttgacaaaaataataacaggaaaagacgggcagttgaaacacaagaaaagccaaggaggctttctggcagaactgtggaaacagttaattcattaccattggttgatggagcagtagctcaagtacgagagtggtcttttggtaatgttccaaagaaggacgcttctcgttttgtacgagcggtcaaaaaatttgggaatgcaacccagattggattaattgtggatgatgttggtggtgtacttgcgaaggtaccgcatgaagcgcagatagaactatttgatttgctggttgatggttgtcaggaagcagttaaggagaatacagacattaagggcacagttttggattttttcggtgtagctgtaaaggcctatgaattgctagctcgtgttgaagagcttcagttcttggcaaagcgaattgcacgttacaaagatccaatcaagcagtaccgcatccagctaccttataaaaagcctcagtggtcagcaagctgtggatggactgaaactgatgacgctagattgatggttggaattcattggtatggctacgggaattgggagaaaataaggttggatccaaagcttggcctgacaacaaaaattgcgccagcaacacttggagaaagggagacatttttaccacgtgctcccaacttggataaccgcgctagtgctctcctgcaaaaggagtatgctaagtttagcggtaagagcttaaaagtcaaaggaaacacccgccagacagtcaataacgacagtaatagtggagttcgatcaatgaggggccggcaaaaggatgtaccagaaaaagatgataataagccgaacaaagatgacattcagaagcgtagggtaatagtggaagctgaagcaagagaagaaggtgaaatttctgaatcggaggcagagaccaggtatcgtcaggacaaagaggagaagtggcttgaatggtgctctgaagttttagatgaggagcaggaaactttgaagcgcctggataggctgcagaatacaagtgtaaacctcccaaaggaaaaggttctttcaaggattcgcaagtatctcctgataattggggacaaaattggagaagttgtccggcaacacagtgaatcttataggcaatcccgcatggtcatgaggttatggaattatgttgccaccttttcaaacatgtctggggagcaactgcatgatctctatatgaaacttagtcaagaccaactggaaggtggagttggcccatctcatggtggcaatttcacatccattcctcccaataagggaggtaactcaaatcaacttcatccttcgagaaaccaaaggccaactaggtctctccagtacaattctgagtctttccataatgagagctctggaagttctgaagcctggaagcgtcgacggagagctgacacagataatcaatttgacacccagcctttgtgtcaacctccaattatgacaaatggaaataggttgcaggaatctagtagttctgcaggtattcttggttggggtccagttgaaattagacggtatggtaatgagaggccaaaacgtgctgttcatcctagtcatttccctactgggcatggacctttgctgtagctgaaggaagtagatgatgcgaacaaccttgttcattttggcataaccgttcccagtgaatttcagcttccatatagttataaatggtggatctccgtaggaattgaaattctttttccaaaacaaaaaggaataaagagcaacctcacctggatcacagttttgaattatatgccttaaaaggtaatgccaggactctagaggcgacttatggaattgttaacagctacactgaatatccttctgacaccatcacagcaacacaaatacatggtggcttgtgaactgccaagaggatcaatcgaggaagttttgcctgttcagttttgtgatctctcaacaatgatctatagttaaatctcaatacataaattatgctttacattgtaatatattgaaatatggttccgttatgctccctccctctcgatgtgttttgtgccgtttttctaccgtgttgatgtaaaagatgaaagaaatgcatgttctcattttgaggcaacaaaaagttgcagccgggagcataatagtgaaatgcgatggaattatcggatacttatcgattccatagtgttttccctgagacaatgtactgaatgaggtacggttataagaaatggtgataattagcttagtaggtgctcagccattctacaagtcatctggtagtccgaagttgcatgaggcctactttcccctggttgccccacttatgctcagtaagtatgcttctagggttgtatgatgatggcccaattgaatttttaatcctgtgtatgaatggtgatggccaaacacttaaatgtagcactgatttaataataggtaccagttttgtcctttttcaattctgttttctgttggtgttcaaaatgtatataattttaaaaaaggta

SEQ ID NO: 27482 - DNA, 6445 bp, Zea Mays
gaaaaaacttatctgccgcctctctatcgcgcgcgccgccgccgcgctgccgcgccgggagcctgtctccggcgatcgccgccttccagccccgttactgaccctcctccgatccgaatcctaggcgaaaaatcgcggaaaataccgcaaaaaatcgcggaaaatcgcccggtcctttttgaataaatcgcacgggcgttgcaccccgctcccttgctcccctcccaccgccggcgacggcgatcgcgcagactaataggtgccccgcggcgagccagaaaacctgcctcgtgccggtccgagcattcgtctctgtcggggggactgagcgcccgtcgcccacccgcctcctgctcctctcgtcggccgcggcaggaggagtgacactgagactgtgagaggtattccatgtaatgccataatttgtgatggcatttttcagcaactccgggagcaaggccgattcagaagggtacaacttgaatgaaaaggccgatgatgatggcatacacgagtcaatccgggatgggaatgatggcctgaactctaggcagtggaacttaaatgagaaagcagaggatgcttaccacagcgaagcagagcaatatgagtctggccagtcaggtttgtacgcatcaaggcagcatgttcagagaggaggcagatcgtctggtggtccatggggcacaaattttctgaaggattccaggtccaaacagacggccaaggaagttgcatcaaatagcggtagaggaatggatgctgctaactcgcatgatgacatggatggtagcagagaggatgatgaactgaatagagcaaatggtgaggtgcctgctgaggaaatgctctcagatgactattacgagcaggacggagaggatcagattgaatcgttgcatcgtggcgggatgaagcagtcaagctgttccacttctggtggagcagcaaagtctggctcacgacaaatgaagaagatgtcaaagtacaatgcttatgataacgatgagtataatgatgagaatgatgatgacagcgatgcagatgaagatgatcctgctgacatggattttgagccagacggcgaaacagacaaggctactgataaggataagtttatggatagtgagaattctgacggcgacgacgatgatgaccttgaactctcagatgatgaagatgattttgttgagaatcggaggcaacctaaacgacttaagattgtagcaactaaaacttccaagggaggacagttgcccatgccagttcaaccaaaacgaggggtgtctcacagtgatgaagaatatttttcaggaaaagactcagatgttcccagcgattcggatttcaaacacataccgaaaaaacctgacaggttgcatcagaaacctgtgggccgcagtgatgttgccccaatcagttctcataatgagcttagaacttctggaaggaggaggacggtgaaaaagatctcatatgctgaaagcgaagaaagtgatgatagtgaggagaagtcaaataagcgacaaaagctcatcaaggaggaaccggaagaggaggatggagaaacaattgaaaaagttctgtggcatcaacccaagggtgtagcagaagaggcaataaggaatcaccggtcagctcaacctactgttgccagcctaacatcggactttgaccaacaatgggatgaattagagttctatataaaatggaaaggccagtcttacctgcattgtcaatggaagatactatcagagctccaaagtgttagtggattcaagaaggtaataaactacacgaaaagagtttctgaggaacagaggtacaagagggcactatcacgtgaagaggttgaggtacatgacgtgggcaaggagatggagctggatcttattaaacaatatagtcaggttgaacggatatttgctgatagggtcagcaaagctgatggagatgatctggttcccgaatatttagtaaaatggcaaggacttccttatgcagaatctacctgggaaaaagatacagatattgattttgctcaagatgcgattgatgaatataaggctcgtgaagctgcctcagctatacttgggaaaacagtagatttccaacgaaagaaaagcaaagctagtttgaggaggcttgatggtcagccagaatggctaaaagctggcaagcttcgtgattatcagctggaaggactaaactttctcgtcaatgggtggagaaacgatactaatgttatacttgctgatgaaatgggtctgggaaaaactatccaatctgtatccatgcttggcttccttcataatgctcaagaaatcaatggcccatttcttgtagtcgtgccactgtcaacattgtcgaactgggcaaaggaatttcggaagtggctgcccaacatgaatgttgttgtttatgttggcaaccgtgccagcagagagatgtgccagcagcatgaatttttttcagacaaaaaaggtgggcgtcatgtaaaattccacacgttgataactacgtacgaggtgattctcaaagacaaagcggttctttccaagataaaatggaactatcttatggttgatgaagcccaccggttgaaaaattgtgaagcgtcactgtatacaacccttttggaattcagcactaagaacaagctgcttatcacgggaacacctttgcagaacagtgtggaagagctttgggcattacttcatttccttgatccagtcaaattcaacagcaaggatagttttgttgagagatacaaaaatttgagttccttcaacgaaactgagctcgcgaatctgcataaggaattgaggcctcatattctacggcgggttataaaagatgttgagaagtctttacctcctaaaatcgagaggattctacgtgttgagatgtcacccctccagaaacagtactacaagtggattttagagcggaattttcagaatctgaataaaggtgttcgtgggaatcaggtatcacttcttaacattgttgttgaattgaagaaatgctgcaaccatccattcttgtttgaaagtgccgatcatggttatggtggagatagcatcggtgatcggaataaagttgaacgtattgttatgagtagtgggaaacttgtcttgttggacaaactattggtgagactgcgggagactaaccatcgtgtgcttatattctcacagatggttaagatgttggacatccttgcagaatacctctctcttcggggatttcagtttcagaggcttgatggtagtacaagagcagatcttcgtcatcaagccatggaacactttaatgctcctggaagtgatgatttctgttttcttttatccacacgtgccggaggacttggtattaatctagcaactgcagatacagtgataatttttgattcagattggaatccacaaaatgatttgcaggccatgagtagggcacataggattggccaacaggagacagttaatatctaccgcttcgtcacatgcaaaagtgttgaggaggatattttggaacgcgcaaagaaaaagatggttcttgatcacttggtcattcagaagctaaacgctgagggcaggcttgagaagaaagaatccaaaaaaggtggccccatatttgacaagaacgaactttcagctatcttgaggttcggtgcagaggaattgttcaaggaagacaagactgatgaagagaccaagaggaaccttgaaagtttggacattgatgaaattcttgagagagctgagaaagtcgagacaaagggtggtgaaggggaggaaggaaatgagcttcttagcgctttcaaggtcgcaaacttttccagtgtcgaagatgatgcaacgttctggagtaggttaatacagccagatcctgcagatatagttcagagctatattgaagatcctcagcttgacaaaaataataacaggaaaagacgggcagttgaaacacaagaaaagccaaggaggctttctggcagaactgtggaaacagttaattcattaccattggttgatggagcagtagctcaagtacgagagtggtcttttggtaatgttccaaagaaggacgcttctcgttttgtacgagcggtcaaaaaatttgggaatgcaacccagattggattaattgtggatgatgttggtggtgtacttgcgaaggtaccgcatgaagcgcagatagaactatttgatttgctggttgatggttgtcaggaagcagttaaggagaatacagacattaagggcacagttttggattttttcggtgtagctgtaaaggcctatgaattgctagctcgtgttgaagagcttcagttcttggcaaagcgaattgcacgttacaaagatccaatcaagcagtaccgcatccagctaccttataaaaagcctcagtggtcagcaagctgtggatggactgaaactgatgacgctagattgatggttggaattcattggtatggctacgggaattgggagaaaataaggttggatccaaagcttggcctgacaacaaaaattgcgccagcaacacttggagaaagggagacatttttaccacgtgctcccaacttggataaccgcgctagtgctctcctgcaaaaggagtatgctaagtttagcggtaagagcttaaaagtcaaaggaaacacccgccagacagtcaataacgacagtaatagtggagttcgatcaatgaggggccggcaaaaggatgtaccagaaaaagatgataataagccgaacaaagatgacattcagaagcgtagggtaatagtggaagctgaagcaagagaagaaggtgaaatttctgaatcggaggcagagaccaggtatcgtcaggacaaagaggagaagtggcttgaatggtgctctgaagttttagatgaggagcaggaaactttgaagcgcctggataggctgcagaatacaagtgtaaacctcccaaaggaaaaggttctttcaaggattcgcaagtatctcctgataattggggacaaaattggagaagttgtccggcaacacagtgaatcttataggcaatcccgcatggtcatgaggttatggaattatgttgccaccttttcaaacatgtctggggagcaactgcatgatctctatatgaaacttagtcaagaccaactggaaggtggagttggcccatctcatggtggcaatttcacatccattcctcccaataagggaggtaactcaaatcaacttcatccttcgagaaaccaaaggccaactaggtctctccagtacaattctgagtctttccataatgagagctctggaagttctgaagcctggaagcgtcgacggagagctgacacagataatcaatttgacacccagcctttgtgtcaacctccaattatgacaaatggaaataggttgcaggaatctagtagttctgcaggtattcttggttggggtccagttgaaattagacggtatggtaatgagaggccaaaacgtgctgttcatcctagtcatttccctactgggcatggacctttgctgtagctgaaggaagtagatgatgcgaacaaccttgttcattttggcataaccgttcccagtgaatttcagcttccatatagttataaatggtggatctccgtaggaattgaaattctttttccaaaacaaaaaggaataaagagcaacctcacctggatcacagttttgaattatatgccttaaaaggtaatgccaggactctagaggcgacttatggaattgttaacagctacactgaatatccttctgacaccatcacagcaacacaaatacatggtggcttgtgaactgccaagaggatcaatcgaggaagttttgcctgttcagttttgtgatctctcaacaatgatctatagttaaatctcaatacataaattatgctttacattgtaatatattgaaatatggttccgttatgctccctccctctcgatgtgttttgtgccgtttttctaccgtgttgatgtaaaagatgaaagaaatgcatgttctcattttgaggcaacaaaaagttgcagccgggagcataatagtgaaatgcgatggaattatcggatacttatcgattccatagtgttttccctgagacaatgtactgaatgaggtacggttataagaaatggtgataattagcttagtaggtgctcagccattctacaagtcatctggtagtccgaagttgcatgaggcctactttcccctggttgccccacttatgctcagtaagtatgcttctagggttgtatgatgatggcccaattgaatttttaatcctgtgtatgaatggtgatggccaaacacttaaatgtagcactgatttaataataggtaccagttttgtcctttttcaattctgttttctgttggtgttcaaaatgtatataattttaaaaaaggta

SEQ ID NO: 27483 - DNA, 6737 bp, Zea Mays
gaaaaaacttatctgccgcctctctatcgcgcgcgccgccgccgcgctgccgcgccgggagcctgtctccggcgatcgccgccttccagccccgttactgaccctcctccgatccgaatcctaggcgaaaaatcgcggaaaataccgcaaaaaatcgcggaaaatcgcccggtcctttttgaataaatcgcacgggcgttgcaccccgctcccttgctcccctcccaccgccggcgacggcgatcgcgcagactaataggtgccccgcggcgagccagaaaacctgcctcgtgccggtccgagcattcgtctctgtcggggggactgagcgcccgtcgcccacccgcctcctgctcctctcgtcggccgcggcaggaggagtgacactgagactgtgagaggtattccatgtaatgccataatttgtgatggcatttttcagcaactccgggagcaaggccgattcagaagggtacaacttgaatgaaaaggccgatgatgatggcatacacgagtcaatccgggatgggaatgatggcctgaactctaggcagtggaacttaaatgagaaagcagaggatgcttaccacagcgaagcagagcaatatgagtctggccagtcaggtttgtacgcatcaaggcagcatgttcagagaggaggcagatcgtctggtggtccatggggcacaaattttctgaaggattccaggtccaaacagacggccaaggaagttgcatcaaatagcggtagaggaatggatgctgctaactcgcatgatgacatggatggtagcagagaggatgatgaactgaatagagcaaatggtgaggtgcctgctgaggaaatgctctcagatgactattacgagcaggacggagaggatcagattgaatcgttgcatcgtggcgggatgaagcagtcaagctgttccacttctggtggagcagcaaagtctggctcacgacaaatgaagaagatgtcaaagtacaatgcttatgataacgatgagtataatgatgagaatgatgatgacagcgatgcagatgaagatgatcctgctgacatggattttgagccagacggcgaaacagacaaggctactgataaggataagtttatggatagtgagaattctgacggcgacgacgatgatgaccttgaactctcagatgatgaagatgattttgttgagaatcggaggcaacctaaacgacttaagattgtagcaactaaaacttccaagggaggacagttgcccatgccagttcaaccaaaacgaggggtgtctcacagtgatgaagaatatttttcaggaaaagactcagatgttcccagcgattcggatttcaaacacataccgaaaaaacctgacaggttgcatcagaaacctgtgggccgcagtgatgttgccccaatcagttctcataatgagcttagaacttctggaaggaggaggacggtgaaaaagatctcatatgctgaaagcgaagaaagtgatgatagtgaggagaagtcaaataagcgacaaaagctcatcaaggaggaaccggaagaggaggatggagaaacaattgaaaaagttctgtggcatcaacccaagggtgtagcagaagaggcaataaggaatcaccggtcagctcaacctactgttgccagcctaacatcggactttgaccaacaatgggatgaattagagttctatataaaatggaaaggccagtcttacctgcattgtcaatggaagatactatcagagctccaaagtgttagtggattcaagaaggtaataaactacacgaaaagagtttctgaggaacagaggtacaagagggcactatcacgtgaagaggttgaggtacatgacgtgggcaaggagatggagctggatcttattaaacaatatagtcaggttgaacggatatttgctgatagggtcagcaaagctgatggagatgatctggttcccgaatatttagtaaaatggcaaggacttccttatgcagaatctacctgggaaaaagatacagatattgattttgctcaagatgcgattgatgaatataaggctcgtgaagctgcctcagctatacttgggaaaacagtagatttccaacgaaagaaaagcaaagtttgaggaggcttgatggtcagccagaatggctaaaagctggcaagcttcgtgattatcagctggaaggactaaactttctcgtcaatgggtggagaaacgatactaatgttatacttgctgatgaaatgggtctgggaaaaactatccaatctgtatccatgcttggcttccttcataatgctcaagaaatcaatggcccatttcttgtagtcgtgccactgtcaacattgtcgaactgggcaaaggaatttcggaagtggctgcccaacatgaatgttgttgtttatgttggcaaccgtgccagcagagagatgtgccagcagcatgaatttttttcagacaaaaaaggtgggcgtcatgtaaaattccacacgttgataactacgtacgaggtgattctcaaagacaaagcggttctttccaagataaaatggaactatcttatggttgatgaagcccaccggttgaaaaattgtgaagcgtcactgtatacaacccttttggaattcagcactaagaacaagctgcttatcacgggaacacctttgcagaacagtgtggaagagctttgggcattacttcatttccttgatccagtcaaattcaacagcaaggatagttttgttgagagatacaaaaatttgagttccttcaacgaaactgagctcgcgaatctgcataaggaattgaggcctcatattctacggcgggttataaaagatgttgagaagtctttacctcctaaaatcgagaggattctacgtgttgagatgtcacccctccagaaacagtactacaagtggattttagagcggaattttcagaatctgaataaaggtgttcgtgggaatcagttatttcagttggcacatcttggaattgaatgcaatttggctgtctcagtatgtagcaaattgaaccttatgtctcagtatgtatatataccgttgctgctagtctaagaccatttttcttgctaaatgctgtggtgcttgccaggatcttgattggaacaatgttactattctttctcacctactattgctaggtcaagcagttcctcacctgctattgctagctcaagaagtttctcacctggccgtgcattacctatcaaactggagcatgggcaaggccacaaggtatcacttcttaacattgttgttgaattgaagaaatgctgcaaccatccattcttgtttgaaagtgccgatcatggttatggtggagatagcatcggtgatcggaataaagttgaacgtattgttatgagtagtgggaaacttgtcttgttggacaaactattggtgagactgcgggagactaaccatcgtgtgcttatattctcacagaatacctctctcttcggggatttcagtttcagaggcttgatggtagtacaagagcagatcttcgtcatcaagccatggaacactttaatgctcctggaagtgatgatttctgttttcttttatccacacgtgccggaggacttggtattaatctagcaactgcagatacagtgataatttttgattcagattggaatccacaaaatgatttgcaggccatgagtagggcacataggattggccaacaggagacagttaatatctaccgcttcgtcacatgcaaaagtgttgaggaggatattttggaacgcgcaaagaaaaagatggttcttgatcacttggtcattcagaagctaaacgctgagggcaggcttgagaagaaagaatccaaaaaaggtggccccatatttgacaagaacgaactttcagctatcttgaggttcggtgcagaggaattgttcaaggaagacaagactgatgaagagaccaagaggaaccttgaaagtttggacattgatgaaattcttgagagagctgagaaagtcgagacaaagggtggtgaaggggaggaaggaaatgagcttcttagcgctttcaaggtcgcaaacttttccagtgtcgaagatgatgcaacgttctggagtaggttaatacagccagatcctgcagatatagttcaggaaactttggcacctcgtgctgcacgaaataaaaagagctatattgaagatcctcagcttgacaaaaataataacaggaaaagacgggcagttgaaacacaagaaaagccaaggaggctttctggcagaactgtggaaacagttaattcattaccattggttgatggagcagtagctcaagtacgagagtggtcttttggtaatgttccaaagaaggacgcttctcgttttgtacgagcggtcaaaaaatttgggaatgcaacccagattggattaattgtggatgatgttggtggtgtacttgcgaaggtaccgcatgaagcgcagatagaactatttgatttgctggttgatggttgtcaggaagcagttaaggagaatacagacattaagggcacagttttggattttttcggtgtagctgtaaaggcctatgaattgctagctcgtgttgaagagcttcagttcttggcaaagcgaattgcacgttacaaagatccaatcaagcagtaccgcatccagctaccttataaaaagcctcagtggtcagcaagctgtggatggactgaaactgatgacgctagattgatggttggaattcattggtatggctacgggaattgggagaaaataaggttggatccaaagcttggcctgacaacaaaaattgcgccagcaacacttggagaaagggagacatttttaccacgtgctcccaacttggataaccgcgctagtgctctcctgcaaaaggagtatgctaagtttagcggtaagagcttaaaagtcaaaggaaacacccgccagacagtcaataacgacagtaatagtggagttcgatcaatgaggggccggcaaaaggatgtaccagaaaaagatgataataagccgaacaaagatgacattcagaagcgtagggtaatagtggaagctgaagcaagagaagaaggtgaaatttctgaatcggaggcagagaccaggtatcgtcaggacaaagaggagaagtggcttgaatggtgctctgaagttttagatgaggagcaggaaactttgaagcgcctggataggctgcagaatacaagtgtaaacctcccaaaggaaaaggttctttcaaggattcgcaagtatctcctgataattggggacaaaattggagaagttgtccggcaacacagtgaatcttataggcaatcccgcatggtcatgaggttatggaattatgttgccaccttttcaaacatgtctggggagcaactgcatgatctctatatgaaacttagtcaagaccaactggaaggtggagttggcccatctcatggtggcaatttcacatccattcctcccaataagggaggtaactcaaatcaacttcatccttcgagaaaccaaaggccaactaggtctctccagtacaattctgagtctttccataatgagagctctggaagttctgaagcctggaagcgtcgacggagagctgacacagataatcaatttgacacccagcctttgtgtcaacctccaattatgacaaatggaaataggttgcaggaatctagtagttctgcaggtattcttggttggggtccagttgaaattagacggtatggtaatgagaggccaaaacgtgctgttcatcctagtcatttccctactgggcatggacctttgctgtagctgaaggaagtagatgatgcgaacaaccttgttcattttggcataaccgttcccagtgaatttcagcttccatatagttataaatggtggatctccgtaggaattgaaattctttttccaaaacaaaaaggaataaagagcaacctcacctggatcacagttttgaattatatgccttaaaaggtaatgccaggactctagaggcgacttatggaattgttaacagctacactgaatatccttctgacaccatcacagcaacacaaatacatggtggcttgtgaactgccaagaggatcaatcgaggaagttttgcctgttcagttttgtgatctctcaacaatgatctatagttaaatctcaatacataaattatgctttacattgtaatatattgaaatatggttccgttatgctccctccctctcgatgtgttttgtgccgtttttctaccgtgttgatgtaaaagatgaaagaaatgcatgttctcattttgaggcaacaaaaagttgcagccgggagcataatagtgaaatgcgatggaattatcggatacttatcgattccatagtgttttccctgagacaatgtactgaatgaggtacggttataagaaatggtgataattagcttagtaggtgctcagccattctacaagtcatctggtagtccgaagttgcatgaggcctactttcccctggttgccccacttatgctcagtaagtatgcttctagggttgtatgatgatggcccaattgaatttttaatcctgtgtatgaatggtgatggccaaacacttaaatgtagcactgatttaataataggtaccagttttgtcctttttcaattctgttttctgttggtgttcaaaatgtatataattttaaaaaaggta

SEQ ID NO: 27484 - DNA, 6842 bp, Zea Mays
gaaaaaacttatctgccgcctctctatcgcgcgcgccgccgccgcgctgccgcgccgggagcctgtctccggcgatcgccgccttccagccccgttactgaccctcctccgatccgaatcctaggcgaaaaatcgcggaaaataccgcaaaaaatcgcggaaaatcgcccggtcctttttgaataaatcgcacgggcgttgcaccccgctcccttgctcccctcccaccgccggcgacggcgatcgcgcagactaataggtgccccgcggcgagccagaaaacctgcctcgtgccggtccgagcattcgtctctgtcggggggactgagcgcccgtcgcccacccgcctcctgctcctctcgtcggccgcggcaggaggagtgacactgagactgtgagaggtattccatgtaatgccataatttgtgatggcatttttcagcaactccgggagcaaggccgattcagaagggtacaacttgaatgaaaaggccgatgatgatggcatacacgagtcaatccgggatgggaatgatggcctgaactctaggcagtggaacttaaatgagaaagcagaggatgcttaccacagcgaagcagagcaatatgagtctggccagtcaggtttgtacgcatcaaggcagcatgttcagagaggaggcagatcgtctggtggtccatggggcacaaattttctgaaggattccaggtccaaacagacggccaaggaagttgcatcaaatagcggtagaggaatggatgctgctaactcgcatgatgacatggatggtagcagagaggatgatgaactgaatagagcaaatggtgaggtgcctgctgaggaaatgctctcagatgactattacgagcaggacggagaggatcagattgaatcgttgcatcgtggcgggatgaagcagtcaagctgttccacttctggtggagcagcaaagtctggctcacgacaaatgaagaagatgtcaaagtacaatgcttatgataacgatgagtataatgatgagaatgatgatgacagcgatgcagatgaagatgatcctgctgacatggattttgagccagacggcgaaacagacaaggctactgataaggataagtttatggatagtgagaattctgacggcgacgacgatgatgaccttgaactctcagatgatgaagatgattttgttgagaatcggaggcaacctaaacgacttaagattgtagcaactaaaacttccaagggaggacagttgcccatgccagttcaaccaaaacgaggggtgtctcacagtgatgaagaatatttttcaggaaaagactcagatgttcccagcgattcggatttcaaacacataccgaaaaaacctgacaggttgcatcagaaacctgtgggccgcagtgatgttgccccaatcagttctcataatgagcttagaacttctggaaggaggaggacggtgaaaaagatctcatatgctgaaagcgaagaaagtgatgatagtgaggagaagtcaaataagcgacaaaagctcatcaaggaggaaccggaagaggaggatggagaaacaattgaaaaagttctgtggcatcaacccaagggtgtagcagaagaggcaataaggaatcaccggtcagctcaacctactgttgccagcctaacatcggactttgaccaacaatgggatgaattagagttctatataaaatggaaaggccagtcttacctgcattgtcaatggaagatactatcagagctccaaagtgttagtggattcaagaaggtaataaactacacgaaaagagtttctgaggaacagaggtacaagagggcactatcacgtgaagaggttgaggtacatgacgtgggcaaggagatggagctggatcttattaaacaatatagtcaggttgactgttgatatatactgttcattatcgctttgcatattgtctaacattgaatcttcaggttgaacggatatttgctgatagggtcagcaaagctgatggagatgatctggttcccgaatatttagtaaaatggcaaggacttccttatgcagaatctacctgggaaaaagatacagatattgattttgctcaagatgcgattgatgaatataaggctcgtgaagctgcctcagctatacttgggaaaacagtagatttccaacgaaagaaaagcaaagctagtttgaggaggcttgatggtcagccagaatggctaaaagctggcaagcttcgtgattatcagctggaaggactaaactttctcgtcaatgggtggagaaacgatactaatgttatacttgctgatgaaatgggtctgggaaaaactatccaatctgtatccatgcttggcttccttcataatgctcaagaaatcaatggcccatttcttgtagtcgtgccactgtcaacattgtcgaactgggcaaaggaatttcggaagtggctgcccaacatgaatgttgttgtttatgttggcaaccgtgccagcagagagatgtgccagcagcatgaatttttttcagacaaaaaaggtgggcgtcatgtaaaattccacacgttgataactacgtacgaggtgattctcaaagacaaagcggttctttccaagataaaatggaactatcttatggttgatgaagcccaccggttgaaaaattgtgaagcgtcactgtatacaacccttttggaattcagcactaagaacaagctgcttatcacgggaacacctttgcagaacagtgtggaagagctttgggcattacttcatttccttgatccagtcaaattcaacagcaaggatagttttgttgagagatacaaaaatttgagttccttcaacgaaactgagctcgcgaatctgcataaggaattgaggcctcatattctacggcgggttataaaagatgttgagaagtctttacctcctaaaatcgagaggattctacgtgttgagatgtcacccctccagaaacagtactacaagtggattttagagcggaattttcagaatctgaataaaggtgttcgtgggaatcagttatttcagttggcacatcttggaattgaatgcaatttggctgtctcagtatgtagcaaattgaaccttatgtctcagtatgtatatataccgttgctgctagtctaagaccatttttcttgctaaatgctgtggtgcttgccaggatcttgattggaacaatgttactattctttctcacctactattgctaggtcaagcagttcctcacctgctattgctagctcaagaagtttctcacctggccgtgcattacctatcaaactggagcatgggcaaggccacaaggcaagacttggctgttgtgagccaaatctgctctcccatgtatcacttcttaacattgttgttgaattgaagaaatgctgcaaccatccattcttgtttgaaagtgccgatcatggttatggtggagatagcatcggtgatcggaataaagttgaacgtattgttatgagtagtgggaaacttgtcttgttggacaaactattggtgagactgcgggagactaaccatcgtgtgcttatattctcacagaatacctctctcttcggggatttcagtttcagaggcttgatggtagtacaagagcagatcttcgtcatcaagccatggaacactttaatgctcctggaagtgatgatttctgttttcttttatccacacgtgccggaggacttggtattaatctagcaactgcagatacagtgataatttttgattcagattggaatccacaaaatgatttgcaggccatgagtagggcacataggattggccaacaggagacagttaatatctaccgcttcgtcacatgcaaaagtgttgaggaggatattttggaacgcgcaaagaaaaagatggttcttgatcacttggtcattcagaagctaaacgctgagggcaggcttgagaagaaagaatccaaaaaaggtggccccatatttgacaagaacgaactttcagctatcttgaggttcggtgcagaggaattgttcaaggaagacaagactgatgaagagaccaagaggaaccttgaaagtttggacattgatgaaattcttgagagagctgagaaagtcgagacaaagggtggtgaaggggaggaaggaaatgagcttcttagcgctttcaaggtcgcaaacttttccagtgtcgaagatgatgcaacgttctggagtaggttaatacagccagatcctgcagatatagttcaggaaactttggcacctcgtgctgcacgaaataaaaagagctatattgaagatcctcagcttgacaaaaataataacaggaaaagacgggcagttgaaacacaagaaaagccaaggaggctttctggcagaactgtggaaacagttaattcattaccattggttgatggagcagtagctcaagtacgagagtggtcttttggtaatgttccaaagaaggacgcttctcgttttgtacgagcggtcaaaaaatttgggaatgcaacccagattggattaattgtggatgatgttggtggtgtacttgcgaaggtaccgcatgaagcgcagatagaactatttgatttgctggttgatggttgtcaggaagcagttaaggagaatacagacattaagggcacagttttggattttttcggtgtagctgtaaaggcctatgaattgctagctcgtgttgaagagcttcagttcttggcaaagcgaattgcacgttacaaagatccaatcaagcagtaccgcatccagctaccttataaaaagcctcagtggtcagcaagctgtggatggactgaaactgatgacgctagattgatggttggaattcattggtatggctacgggaattgggagaaaataaggttggatccaaagcttggcctgacaacaaaaattgcgccagcaacacttggagaaagggagacatttttaccacgtgctcccaacttggataaccgcgctagtgctctcctgcaaaaggagtatgctaagtttagcggtaagagcttaaaagtcaaaggaaacacccgccagacagtcaataacgacagtaatagtggagttcgatcaatgaggggccggcaaaaggatgtaccagaaaaagatgataataagccgaacaaagatgacattcagaagcgtagggtaatagtggaagctgaagcaagagaagaaggtgaaatttctgaatcggaggcagagaccaggtatcgtcaggacaaagaggagaagtggcttgaatggtgctctgaagttttagatgaggagcaggaaactttgaagcgcctggataggctgcagaatacaagtgtaaacctcccaaaggaaaaggttctttcaaggattcgcaagtatctcctgataattggggacaaaattggagaagttgtccggcaacacagtgaatcttataggcaatcccgcatggtcatgaggttatggaattatgttgccaccttttcaaacatgtctggggagcaactgcatgatctctatatgaaacttagtcaagaccaactggaaggtggagttggcccatctcatggtggcaatttcacatccattcctcccaataagggaggtaactcaaatcaacttcatccttcgagaaaccaaaggccaactaggtctctccagtacaattctgagtctttccataatgagagctctggaagttctgaagcctggaagcgtcgacggagagctgacacagataatcaatttgacacccagcctttgtgtcaacctccaattatgacaaatggaaataggttgcaggaatctagtagttctgcaggtattcttggttggggtccagttgaaattagacggtatggtaatgagaggccaaaacgtgctgttcatcctagtcatttccctactgggcatggacctttgctgtagctgaaggaagtagatgatgcgaacaaccttgttcattttggcataaccgttcccagtgaatttcagcttccatatagttataaatggtggatctccgtaggaattgaaattctttttccaaaacaaaaaggaataaagagcaacctcacctggatcacagttttgaattatatgccttaaaaggtaatgccaggactctagaggcgacttatggaattgttaacagctacactgaatatccttctgacaccatcacagcaacacaaatacatggtggcttgtgaactgccaagaggatcaatcgaggaagttttgcctgttcagttttgtgatctctcaacaatgatctatagttaaatctcaatacataaattatgctttacattgtaatatattgaaatatggttccgttatgctccctccctctcgatgtgttttgtgccgtttttctaccgtgttgatgtaaaagatgaaagaaatgcatgttctcattttgaggcaacaaaaagttgcagccgggagcataatagtgaaatgcgatggaattatcggatacttatcgattccatagtgttttccctgagacaatgtactgaatgaggtacggttataagaaatggtgataattagcttagtaggtgctcagccattctacaagtcatctggtagtccgaagttgcatgaggcctactttcccctggttgccccacttatgctcagtaagtatgcttctagggttgtatgatgatggcccaattgaatttttaatcctgtgtatgaatggtgatggccaaacacttaaatgtagcactgatttaataataggtaccagttttgtcctttttcaattctgttttctgttggtgttcaaaatgtatataattttaaaaaaggta

SEQ ID NO: 27485 - DNA, 6618 bp, Zea Mays
gaaaaaacttatctgccgcctctctatcgcgcgcgccgccgccgcgctgccgcgccgggagcctgtctccggcgatcgccgccttccagccccgttactgaccctcctccgatccgaatcctaggcgaaaaatcgcggaaaataccgcaaaaaatcgcggaaaatcgcccggtcctttttgaataaatcgcacgggcgttgcaccccgctcccttgctcccctcccaccgccggcgacggcgatcgcgcagactaataggtgccccgcggcgagccagaaaacctgcctcgtgccggtccgagcattcgtctctgtcggggggactgagcgcccgtcgcccacccgcctcctgctcctctcgtcggccgcggcaggaggagtgacactgagactgtgagaggtattccatgtaatgccataatttgtgatggcatttttcagcaactccgggagcaaggccgattcagaagggtacaacttgaatgaaaaggccgatgatgatggcatacacgagtcaatccgggatgggaatgatggcctgaactctaggcagtggaacttaaatgagaaagcagaggatgcttaccacagcgaagcagagcaatatgagtctggccagtcaggtttgtacgcatcaaggcagcatgttcagagaggaggcagatcgtctggtggtccatggggcacaaattttctgaaggattccaggtccaaacagacggccaaggaagttgcatcaaatagcggtagaggaatggatgctgctaactcgcatgatgacatggatggtagcagagaggatgatgaactgaatagagcaaatggtgaggtgcctgctgaggaaatgctctcagatgactattacgagcaggacggagaggatcagattgaatcgttgcatcgtggcgggatgaagcagtcaagctgttccacttctggtggagcagcaaagtctggctcacgacaaatgaagaagatgtcaaagtacaatgcttatgataacgatgagtataatgatgagaatgatgatgacagcgatgcagatgaagatgatcctgctgacatggattttgagccagacggcgaaacagacaaggctactgataaggataagtttatggatagtgagaattctgacggcgacgacgatgatgaccttgaactctcagatgatgaagatgattttgttgagaatcggaggcaacctaaacgacttaagattgtagcaactaaaacttccaagggaggacagttgcccatgccagttcaaccaaaacgaggggtgtctcacagtgatgaagaatatttttcaggaaaagactcagatgttcccagcgattcggatttcaaacacataccgaaaaaacctgacaggttgcatcagaaacctgtgggccgcagtgatgttgccccaatcagttctcataatgagcttagaacttctggaaggaggaggacggtgaaaaagatctcatatgctgaaagcgaagaaagtgatgatagtgaggagaagtcaaataagcgacaaaagctcatcaaggaggaaccggaagaggaggatggagaaacaattgaaaaagttctgtggcatcaacccaagggtgtagcagaagaggcaataaggaatcaccggtcagctcaacctactgttgccagcctaacatcggactttgaccaacaatgggatgaattagagttctatataaaatggaaaggccagtcttacctgcattgtcaatggaagatactatcagagctccaaagtgttagtggattcaagaaggtaataaactacacgaaaagagtttctgaggaacagaggtacaagagggcactatcacgtgaagaggttgaggttgaacggatatttgctgatagggtcagcaaagctgatggagatgatctggttcccgaatatttagtaaaatggcaaggacttccttatgcagaatctacctgggaaaaagatacagatattgattttgctcaagatgcgattgatgaatataaggctcgtgaagctgcctcagctatacttgggaaaacagtagatttccaacgaaagaaaagcaaagctagtttgaggaggcttgatggtcagccagaatggctaaaagctggcaagcttcgtgattatcagctggaaggactaaactttctcgtcaatgggtggagaaacgatactaatgttatacttgctgatgaaatgggtctgggaaaaactatccaatctgtatccatgcttggcttccttcataatgctcaagaaatcaatggcccatttcttgtagtcgtgccactgtcaacattgtcgaactgggcaaaggaatttcggaagtggctgcccaacatgaatgttgttgtttatgttggcaaccgtgccagcagagagatgtgccagcagcatgaatttttttcagacaaaaaaggtgggcgtcatgtaaaattccacacgttgataactacgtacgaggtgattctcaaagacaaagcggttctttccaagataaaatggaactatcttatggttgatgaagcccaccggttgaaaaattgtgaagcgtcactgtatacaacccttttggaattcagcactaagaacaagctgcttatcacgggaacacctttgcagaacagtgtggaagagctttgggcattacttcatttccttgatccagtcaaattcaacagcaaggatagttttgttgagagatacaaaaatttgagttccttcaacgaaactgagctcgcgaatctgcataaggaattgaggcctcatattctacggcgggttataaaagatgttgagaagtctttacctcctaaaatcgagaggattctacgtgttgagatgtcacccctccagaaacagtactacaagtggattttagagcggaattttcagaatctgaataaaggtgttcgtgggaatcagttatttcagttggcacatcttggaattgaatgcaatttggctgtctcagatcttgattggaacaatgttactattctttctcacctactattgctaggtcaagcagttcctcacctgctattgctagctcaagaagtttctcacctggccgtgcattacctatcaaactggagcatgggcaaggccacaaggtatcacttcttaacattgttgttgaattgaagaaatgctgcaaccatccattcttgtttgaaagtgccgatcatggttatggtggagatagcatcggtgatcggaataaagttgaacgtattgttatgagtagtgggaaacttgtcttgttggacaaactattggtgagactgcgggagactaaccatcgtgtgcttatattctcacagatggttaagatgttggacatccttgcagaatacctctctcttcggggatttcagtttcagaggcttgatggtagtacaagagcagatcttcgtcatcaagccatggaacactttaatgctcctggaagtgatgatttctgttttcttttatccacacgtgccggaggacttggtattaatctagcaactgcagatacagtgataatttttgattcagattggaatccacaaaatgatttgcaggccatgagtagggcacataggattggccaacaggagacagttaatatctaccgcttcgtcacatgcaaaagtgttgaggaggatattttggaacgcgcaaagaaaaagatggttcttgatcacttggtcattcagaagctaaacgctgagggcaggcttgagaagaaagaatccaaaaaaggtggccccatatttgacaagaacgaactttcagctatcttgaggttcggtgcagaggaattgttcaaggaagacaagactgatgaagagaccaagaggaaccttgaaagtttggacattgatgaaattcttgagagagctgagaaagtcgagacaaagggtggtgaaggggaggaaggaaatgagcttcttagcgctttcaaggtcgcaaacttttccagtgtcgaagatgatgcaacgttctggagtaggttaatacagccagatcctgcagatatagttcaggaaactttggcacctcgtgctgcacgaaataaaaagagctatattgaagatcctcagcttgacaaaaataataacaggaaaagacgggcagttgaaacacaagaaaagccaaggaggctttctggcagaactgtggaaacagttaattcattaccattggttgatggagcagtagctcaagtacgagagtggtcttttggtaatgttccaaagaaggacgcttctcgttttgtacgagcggtcaaaaaatttgggaatgcaacccagattggattaattgtggatgatgttggtggtgtacttgcgaaggtaccgcatgaagcgcagatagaactatttgatttgctggttgatggttgtcaggaagcagttaaggagaatacagacattaagggcacagttttggattttttcggtgtagctgtaaaggcctatgaattgctagctcgtgttgaagagcttcagttcttggcaaagcgaattgcacgttacaaagatccaatcaagcagtaccgcatccagctaccttataaaaagcctcagtggtcagcaagctgtggatggactgaaactgatgacgctagattgatggttggaattcattggtatggctacgggaattgggagaaaataaggttggatccaaagcttggcctgacaacaaaaattgcgccagcaacacttggagaaagggagacatttttaccacgtgctcccaacttggataaccgcgctagtgctctcctgcaaaaggagtatgctaagtttagcggtaagagcttaaaagtcaaaggaaacacccgccagacagtcaataacgacagtaatagtggagttcgatcaatgaggggccggcaaaaggatgtaccagaaaaagatgataataagccgaacaaagatgacattcagaagcgtagggtaatagtggaagctgaagcaagagaagaaggtgaaatttctgaatcggaggcagagaccaggtatcgtcaggacaaagaggagaagtggcttgaatggtgctctgaagttttagatgaggagcaggaaactttgaagcgcctggataggctgcagaatacaagtgtaaacctcccaaaggaaaaggttctttcaaggattcgcaagtatctcctgataattggggacaaaattggagaagttgtccggcaacacagtgaatcttataggcaatcccgcatggtcatgaggttatggaattatgttgccaccttttcaaacatgtctggggagcaactgcatgatctctatatgaaacttagtcaagaccaactggaaggtggagttggcccatctcatggtggcaatttcacatccattcctcccaataagggaggtaactcaaatcaacttcatccttcgagaaaccaaaggccaactaggtctctccagtacaattctgagtctttccataatgagagctctggaagttctgaagcctggaagcgtcgacggagagctgacacagataatcaatttgacacccagcctttgtgtcaacctccaattatgacaaatggaaataggttgcaggaatctagtagttctgcaggtattcttggttggggtccagttgaaattagacggtatggtaatgagaggccaaaacgtgctgttcatcctagtcatttccctactgggcatggacctttgctgtagctgaaggaagtagatgatgcgaacaaccttgttcattttggcataaccgttcccagtgaatttcagcttccatatagttataaatggtggatctccgtaggaattgaaattctttttccaaaacaaaaaggaataaagagcaacctcacctggatcacagttttgaattatatgccttaaaaggtaatgccaggactctagaggcgacttatggaattgttaacagctacactgaatatccttctgacaccatcacagcaacacaaatacatggtggcttgtgaactgccaagaggatcaatcgaggaagttttgcctgttcagttttgtgatctctcaacaatgatctatagttaaatctcaatacataaattatgctttacattgtaatatattgaaatatggttccgttatgctccctccctctcgatgtgttttgtgccgtttttctaccgtgttgatgtaaaagatgaaagaaatgcatgttctcattttgaggcaacaaaaagttgcagccgggagcataatagtgaaatgcgatggaattatcggatacttatcgattccatagtgttttccctgagacaatgtactgaatgaggtacggttataagaaatggtgataattagcttagtaggtgctcagccattctacaagtcatctggtagtccgaagttgcatgaggcctactttcccctggttgccccacttatgctcagtaagtatgcttctagggttgtatgatgatggcccaattgaatttttaatcctgtgtatgaatggtgatggccaaacacttaaatgtagcactgatttaataataggtaccagttttgtcctttttcaattctgttttctgttggtgttcaaaatgtatataattttaaaaaaggta

SEQ ID NO: 27486 - DNA, 6582 bp, Zea Mays
gaaaaaacttatctgccgcctctctatcgcgcgcgccgccgccgcgctgccgcgccgggagcctgtctccggcgatcgccgccttccagccccgttactgaccctcctccgatccgaatcctaggcgaaaaatcgcggaaaataccgcaaaaaatcgcggaaaatcgcccggtcctttttgaataaatcgcacgggcgttgcaccccgctcccttgctcccctcccaccgccggcgacggcgatcgcgcagactaataggtgccccgcggcgagccagaaaacctgcctcgtgccggtccgagcattcgtctctgtcggggggactgagcgcccgtcgcccacccgcctcctgctcctctcgtcggccgcggcaggaggagtgacactgagactgtgagaggtattccatgtaatgccataatttgtgatggcatttttcagcaactccgggagcaaggccgattcagaagggtacaacttgaatgaaaaggccgatgatgatggcatacacgagtcaatccgggatgggaatgatggcctgaactctaggcagtggaacttaaatgagaaagcagaggatgcttaccacagcgaagcagagcaatatgagtctggccagtcaggtttgtacgcatcaaggcagcatgttcagagaggaggcagatcgtctggtggtccatggggcacaaattttctgaaggattccaggtccaaacagacggccaaggaagttgcatcaaatagcggtagaggaatggatgctgctaactcgcatgatgacatggatggtagcagagaggatgatgaactgaatagagcaaatggtgaggtgcctgctgaggaaatgctctcagatgactattacgagcaggacggagaggatcagattgaatcgttgcatcgtggcgggatgaagcagtcaagctgttccacttctggtggagcagcaaagtctggctcacgacaaatgaagaagatgtcaaagtacaatgcttatgataacgatgagtataatgatgagaatgatgatgacagcgatgcagatgatgatcctgctgacatggattttgagccagacggcgaaacagacaaggctactgataaggataagtttatggatagtgagaattctgacggcgacgacgatgatgaccttgaactctcagatgatgaagatgattttgttgagaatcggaggcaacctaaacgacttaagattgtagcaactaaaacttccaagggaggacagttgcccatgccagttcaaccaaaacgaggggtgtctcacagtgatgaagaatatttttcaggaaaagactcagatgttcccagcgattcggatttcaaacacataccgaaaaaacctgacaggttgcatcagaaacctgtgggccgcagtgatgttgccccaatcagttctcataatgagcttagaacttctggaaggaggaggacggtgaaaaagatctcatatgctgaaagcgaagaaagtgatgatagtgaggagaagtcaaataagcgacaaaagctcatcaaggaggaaccggaagaggaggatggagaaacaattgaaaaagttctgtggcatcaacccaagggtgtagcagaagaggcaataaggaatcaccggtcagctcaacctactgttgccagcctaacatcggactttgaccaacaatgggatgaattagagttctatataaaatggaaaggccagtcttacctgcattgtcaatggaagatactatcagagctccaaagttggattcaagaaggtaataaactacacgaaaagagtttctgaggaacagaggtacaagagggcactatcacgtgaagaggttgaggttgaacggatatttgctgatagggtcagcaaagctgatggagatgatctggttcccgaatatttagtaaaatggcaaggacttccttatgcagaatctacctgggaaaaagatacagatattgattttgctcaagatgcgattgatgaatataaggctcgtgaagctgcctcagctatacttgggaaaacagtagatttccaacgaaagaaaagcaaagctagtttgaggaggcttgatggtcagccagaatggctaaaagctggcaagcttcgtgattatcagctggaaggactaaactttctcgtcaatgggtggagaaacgatactaatgttatacttgctgatgaaatgggtctgggaaaaactatccaatctgtatccatgcttggcttccttcataatgctcaagaaatcaatggcccatttcttgtagtcgtgccactgtcaacattgtcgaactgggcaaaggaatttcggaagtggctgcccaacatgaatgttgttgtttatgttggcaaccgtgccagcagagagatgtgccagcagcatgaatttttttcagacaaaaaaggtgggcgtcatgtaaaattccacacgttgataactacgtacgaggtgattctcaaagacaaagcggttctttccaagataaaatggaactatcttatggttgatgaagcccaccggttgaaaaattgtgaagcgtcactgtatacaacccttttggaattcagcactaagaacaagctgcttatcacgggaacacctttgcagaacagtgtggaagagctttgggcattacttcatttccttgatccagtcaaattcaacagcaaggatagttttgttgagagatacaaaaatttgagttccttcaacgaaactgagctcgcgaatctgcataaggaattgaggcctcatattctacggcgggttataaaagatgttgagaagtctttacctcctaaaatcgagaggattctacgtgttgagatgtcacccctccagaaacagtactacaagtggattttagagcggaattttcagaatctgaataaaggtgttcgtgggaatcaggtcaagcagttcctcacctgctattgctagctcaagaagtttctcacctggccgtgcattacctatcaaactggagcatgggcaaggccacaaggtatcacttcttaacattgttgttgaattgaagaaatgctgcaaccatccattcttgtttgaaagtgccgatcatggttatggtggagatagcatcggtgatcggaataaagttgaacgtattgttatgagtagtgggaaacttgtcttgttggacaaactattggtgagactgcgggagactaaccatcgtgtgcttatattctcacagggcctcttcagtgtggtttggtttggttcaaacccgcactacgggtgccctaagagagaaagcaaaaaaatggttaagatgttggacatccttgcagaatacctctctcttcggggatttcagtttcagaggcttgatggtagtacaagagcagatcttcgtcatcaagccatggaacactttaatgctcctggaagtgatgatttctgttttcttttatccacacgtgccggaggacttggtattaatctagcaactgcagatacagtgataatttttgattcagattggaatccacaaaatgatttgcaggccatgagtagggcacataggattggccaacaggagacagttaatatctaccgcttcgtcacatgcaaaagtgttgaggaggatattttggaacgcgcaaagaaaaagatggttcttgatcacttggtcattcagaagctaaacgctgagggcaggcttgagaagaaagaatccaaaaaaggtggccccatatttgacaagaacgaactttcagctatcttgaggttcggtgcagaggaattgttcaaggaagacaagactgatgaagagaccaagaggaaccttgaaagtttggacattgatgaaattcttgagagagctgagaaagtcgagacaaagggtggtgaaggggaggaaggaaatgagcttcttagcgctttcaaggtcgcaaacttttccagtgtcgaagatgatgcaacgttctggagtaggttaatacagccagatcctgcagatatagttcaggaaactttggcacctcgtgctgcacgaaataaaaagagctatattgaagatcctcagcttgacaaaaataataacaggaaaagacgggcagttgaaacacaagaaaagccaaggaggctttctggcagaactgtggaaacagttaattcattaccattggttgatggagcagtagctcaagtacgagagtggtcttttggtaatgttccaaagaaggacgcttctcgttttgtacgagcggtcaaaaaatttgggaatgcaacccagattggattaattgtggatgatgttggtggtgtacttgcgaaggtaccgcatgaagcgcagatagaactatttgatttgctggttgatggttgtcaggaagcagttaaggagaatacagacattaagggcacagttttggattttttcggtgtagctgtaaaggcctatgaattgctagctcgtgttgaagagcttcagttcttggcaaagcgaattgcacgttacaaagatccaatcaagcagtaccgcatccagctaccttataaaaagcctcagtggtcagcaagctgtggatggactgaaactgatgacgctagattgatggttggaattcattggtatggctacgggaattgggagaaaataaggttggatccaaagcttggcctgacaacaaaaattgcgccagcaacacttggagaaagggagacatttttaccacgtgctcccaacttggataaccgcgctagtgctctcctgcaaaaggagtatgctaagtttagcggtaagagcttaaaagtcaaaggaaacacccgccagacagtcaataacgacagtaatagtggagttcgatcaatgaggggccggcaaaaggatgtaccagaaaaagatgataataagccgaacaaagatgacattcagaagcgtagggtaatagtggaagctgaagcaagagaagaaggtgaaatttctgaatcggaggcagagaccaggtatcgtcaggacaaagaggagaagtggcttgaatggtgctctgaagttttagatgaggagcaggaaactttgaagcgcctggataggctgcagaatacaagtgtaaacctcccaaaggaaaaggttctttcaaggattcgcaagtatctcctgataattggggacaaaattggagaagttgtccggcaacacagtgaatcttataggcaatcccgcatggtcatgaggttatggaattatgttgccaccttttcaaacatgtctggggagcaactgcatgatctctatatgaaacttagtcaagaccaactggaaggtggagttggcccatctcatggtggcaatttcacatccattcctcccaataagggaggtaactcaaatcaacttcatccttcgagaaaccaaaggccaactaggtctctccagtacaattctgagtctttccataatgagagctctggaagttctgaagcctggaagcgtcgacggagagctgacacagataatcaatttgacacccagcctttgtgtcaacctccaattatgacaaatggaaataggttgcaggaatctagtagttctgcaggtattcttggttggggtccagttgaaattagacggtatggtaatgagaggccaaaacgtgctgttcatcctagtcatttccctactgggcatggacctttgctgtagctgaaggaagtagatgatgcgaacaaccttgttcattttggcataaccgttcccagtgaatttcagcttccatatagttataaatggtggatctccgtaggaattgaaattctttttccaaaacaaaaaggaataaagagcaacctcacctggatcacagttttgaattatatgccttaaaaggtaatgccaggactctagaggcgacttatggaattgttaacagctacactgaatatccttctgacaccatcacagcaacacaaatacatggtggcttgtgaactgccaagaggatcaatcgaggaagttttgcctgttcagttttgtgatctctcaacaatgatctatagttaaatctcaatacataaattatgctttacattgtaatatattgaaatatggttccgttatgctccctccctctcgatgtgttttgtgccgtttttctaccgtgttgatgtaaaagatgaaagaaatgcatgttctcattttgaggcaacaaaaagttgcagccgggagcataatagtgaaatgcgatggaattatcggatacttatcgattccatagtgttttccctgagacaatgtactgaatgaggtacggttataagaaatggtgataattagcttagtaggtgctcagccattctacaagtcatctggtagtccgaagttgcatgaggcctactttcccctggttgccccacttatgctcagtaagtatgcttctagggttgtatgatgatggcccaattgaatttttaatcctgtgtatgaatggtgatggccaaacacttaaatgtagcactgatttaataataggtaccagttttgtcctttttcaattctgttttctgttggtgttcaaaatgtatataattttaaaaaaggta

SEQ ID NO: 27487 - DNA, 6487 bp, Zea Mays
gaaaaaacttatctgccgcctctctatcgcgcgcgccgccgccgcgctgccgcgccgggagcctgtctccggcgatcgccgccttccagccccgttactgaccctcctccgatccgaatcctaggcgaaaaatcgcggaaaataccgcaaaaaatcgcggaaaatcgcccggtcctttttgaataaatcgcacgggcgttgcaccccgctcccttgctcccctcccaccgccggcgacggcgatcgcgcagactaataggtgccccgcggcgagccagaaaacctgcctcgtgccggtccgagcattcgtctctgtcggggggactgagcgcccgtcgcccacccgcctcctgctcctctcgtcggccgcggcaggaggagtgacactgagactgtgagaggtattccatgtaatgccataatttgtgatggcatttttcagcaactccgggagcaaggccgattcagaagggtacaacttgaatgaaaaggccgatgatgatggcatacacgagtcaatccgggatgggaatgatggcctgaactctaggcagtggaacttaaatgagaaagcagaggatgcttaccacagcgaagcagagcaatatgagtctggccagtcaggtttgtacgcatcaaggcagcatgttcagagaggaggcagatcgtctggtggtccatggggcacaaattttctgaaggattccaggtccaaacagacggccaaggaagttgcatcaaatagcggtagaggaatggatgctgctaactcgcatgatgacatggatggtagcagagaggatgatgaactgaatagagcaaatggtgaggtgcctgctgaggaaatgctctcagatgactattacgagcaggacggagaggatcagattgaatcgttgcatcgtggcgggatgaagcagtcaagctgttccacttctggtggagcagcaaagtctggctcacgacaaatgaagaagatgtcaaagtacaatgcttatgataacgatgagtataatgatgagaatgatgatgacagcgatgcagatgatgatcctgctgacatggattttgagccagacggcgaaacagacaaggctactgataaggataagtttatggatagtgagaattctgacggcgacgacgatgatgaccttgaactctcagatgatgaagatgattttgttgagaatcggaggcaacctaaacgacttaagattgtagcaactaaaacttccaagggaggacagttgcccatgccagttcaaccaaaacgaggggtgtctcacagtgatgaagaatatttttcaggaaaagactcagatgttcccagcgattcggatttcaaacacataccgaaaaaacctgacaggttgcatcagaaacctgtgggccgcagtgatgttgccccaatcagttctcataatgagcttagaacttctggaaggaggaggacggtgaaaaagatctcatatgctgaaagcgaagaaagtgatgatagtgaggagaagtcaaataagcgacaaaagctcatcaaggaggaaccggaagaggaggatggagaaacaattgaaaaagttctgtggcatcaacccaagggtgtagcagaagaggcaataaggaatcaccggtcagctcaacctactgttgccagcctaacatcggactttgaccaacaatgggatgaattagagttctatataaaatggaaaggccagtcttacctgcattgtcaatggaagatactatcagagctccaaagtgttagtggattcaagaaggtaataaactacacgaaaagagtttctgaggaacagaggtacaagagggcactatcacgtgaagaggttgaggtacatgacgtgggcaaggagatggagctggatcttattaaacaatatagtcaggttgaacggatatttgctgatagggtcagcaaagctgatggagatgatctggttcccgaatatttagtaaaatggcaaggacttccttatgcagaatctacctgggaaaaagatacagatattgattttgctcaagatgcgattgatgaatataaggctcgtgaagctgcctcagctatacttgggaaaacagtagatttccaacgaaagaaaagcaaagctagtttgaggaggcttgatggtcagccagaatggctaaaagctggcaagcttcgtgattatcagctggaaggactaaactttctcgtcaatgggtggagaaacgatactaatgttatacttgctgatgaaatgggtctgggaaaaactatccaatctgtatccatgcttggcttccttcataatgctcaagaaatcaatggcccatttcttgtagtcgtgccactgtcaacattgtcgaactgggcaaaggaatttcggaagtggctgcccaacatgaatgttgttgtttatgttggcaaccgtgccagcagagagatgtgccagcagcatgaatttttttcagacaaaaaaggtgggcgtcatgtaaaattccacacgttgataactacgtacgaggtgattctcaaagacaaagcggttctttccaagataaaatggaactatcttatggttgatgaagcccaccggttgaaaaattgtgaagcgtcactgtatacaacccttttggaattcagcactaagaacaagctgcttatcacgggaacacctttgcagaacagtgtggaagagctttgggcattacttcatttccttgatccagtcaaattcaacagcaaggatagttttgttgagagatacaaaaatttgagttccttcaacgaaactgagctcgcgaatctgcataaggaattgaggcctcatattctacggcgggttataaaagatgttgagaagtctttacctcctaaaatcgagaggattctacgtgttgagatgtcacccctccagaaacagtactacaagtggattttagagcggaattttcagaatctgaataaaggtgttcgtgggaatcaggtatcacttcttaacattgttgttgaattgaagaaatgctgcaaccatccattcttgtttgaaagtgccgatcatggttatggtggagatagcatcggtgatcggaataaagttgaacgtattgttatgagtagtgggaaacttgtcttgttggacaaactattggtgagactgcgggagactaaccatcgtgtgcttatattctcacagatggttaagatgttggacatccttgcagaatacctctctcttcggggatttcagtttcagaggcttgatggtagtacaagagcagatcttcgtcatcaagccatggaacactttaatgctcctggaagtgatgatttctgttttcttttatccacacgtgccggaggacttggtattaatctagcaactgcagatacagtgataatttttgattcagattggaatccacaaaatgatttgcaggccatgagtagggcacataggattggccaacaggagacagttaatatctaccgcttcgtcacatgcaaaagtgttgaggaggatattttggaacgcgcaaagaaaaagatggttcttgatcacttggtcattcagaagctaaacgctgagggcaggcttgagaagaaagaatccaaaaaaggtggccccatatttgacaagaacgaactttcagctatcttgaggttcggtgcagaggaattgttcaaggaagacaagactgatgaagagaccaagaggaaccttgaaagtttggacattgatgaaattcttgagagagctgagaaagtcgagacaaagggtggtgaaggggaggaaggaaatgagcttcttagcgctttcaaggcatgtgatgtcgcaaacttttccagtgtcgaagatgatgcaacgttctggagtaggttaatacagccagatcctgcagatatagttcaggaaactttggcacctcgtgctgcacgaaataaaaagagctatattgaagatcctcagcttgacaaaaataataacaggaaaagacgggcagttgaaacacaagaaaagccaaggaggctttctggcagaactgtggaaacagttaattcattaccattggttgatggagcagtagctcaagtacgagagtggtcttttggtaatgttccaaagaaggacgcttctcgttttgtacgagcggtcaaaaaatttgggaatgcaacccagattggattaattgtggatgatgttggtggtgtacttgcgaaggtaccgcatgaagcgcagatagaactatttgatttgctggttgatggttgtcaggaagcagttaaggagaatacagacattaagggcacagttttggattttttcggtgtagctgtaaaggcctatgaattgctagctcgtgttgaagagcttcagttcttggcaaagcgaattgcacgttacaaagatccaatcaagcagtaccgcatccagctaccttataaaaagcctcagtggtcagcaagctgtggatggactgaaactgatgacgctagattgatggttggaattcattggtatggctacgggaattgggagaaaataaggttggatccaaagcttggcctgacaacaaaaattgcgccagcaacacttggagaaagggagacatttttaccacgtgctcccaacttggataaccgcgctagtgctctcctgcaaaaggagtatgctaagtttagcggtaagagcttaaaagtcaaaggaaacacccgccagacagtcaataacgacagtaatagtggagttcgatcaatgaggggccggcaaaaggatgtaccagaaaaagatgataataagccgaacaaagatgacattcagaagcgtagggtaatagtggaagctgaagcaagagaagaaggtgaaatttctgaatcggaggcagagaccaggtatcgtcaggacaaagaggagaagtggcttgaatggtgctctgaagttttagatgaggagcaggaaactttgaagcgcctggataggctgcagaatacaagtgtaaacctcccaaaggaaaaggttctttcaaggattcgcaagtatctcctgataattggggacaaaattggagaagttgtccggcaacacagtgaatcttataggcaatcccgcatggtcatgaggttatggaattatgttgccaccttttcaaacatgtctggggagcaactgcatgatctctatatgaaacttagtcaagaccaactggaaggtggagttggcccatctcatggtggcaatttcacatccattcctcccaataagggaggtaactcaaatcaacttcatccttcgagaaaccaaaggccaactaggtctctccagtacaattctgagtctttccataatgagagctctggaagttctgaagcctggaagcgtcgacggagagctgacacagataatcaatttgacacccagcctttgtgtcaacctccaattatgacaaatggaaataggttgcaggaatctagtagttctgcaggtattcttggttggggtccagttgaaattagacggtatggtaatgagaggccaaaacgtgctgttcatcctagtcatttccctactgggcatggacctttgctgtagctgaaggaagtagatgatgcgaacaaccttgttcattttggcataaccgttcccagtgaatttcagcttccatatagttataaatggtggatctccgtaggaattgaaattctttttccaaaacaaaaaggaataaagagcaacctcacctggatcacagttttgaattatatgccttaaaaggtaatgccaggactctagaggcgacttatggaattgttaacagctacactgaatatccttctgacaccatcacagcaacacaaatacatggtggcttgtgaactgccaagaggatcaatcgaggaagttttgcctgttcagttttgtgatctctcaacaatgatctatagttaaatctcaatacataaattatgctttacattgtaatatattgaaatatggttccgttatgctccctccctctcgatgtgttttgtgccgtttttctaccgtgttgatgtaaaagatgaaagaaatgcatgttctcattttgaggcaacaaaaagttgcagccgggagcataatagtgaaatgcgatggaattatcggatacttatcgattccatagtgttttccctgagacaatgtactgaatgaggtacggttataagaaatggtgataattagcttagtaggtgctcagccattctacaagtcatctggtagtccgaagttgcatgaggcctactttcccctggttgccccacttatgctcagtaagtatgcttctagggttgtatgatgatggcccaattgaatttttaatcctgtgtatgaatggtgatggccaaacacttaaatgtagcactgatttaataataggtaccagttttgtcctttttcaattctgttttctgttggtgttcaaaatgtatataattttaaaaaaggta

SEQ ID NO: 27488 - DNA, 6316 bp, Zea Mays
gaaaaaacttatctgccgcctctctatcgcgcgcgccgccgccgcgctgccgcgccgggagcctgtctccggcgatcgccgccttccagccccgttactgaccctcctccgatccgaatcctaggcgaaaaatcgcggaaaataccgcaaaaaatcgcggaaaatcgcccggtcctttttgaataaatcgcacgggcgttgcaccccgctcccttgctcccctcccaccgccggcgacggcgatcgcgcagactaataggtgccccgcggcgagccagaaaacctgcctcgtgccggtccgagcattcgtctctgtcggggggactgagcgcccgtcgcccacccgcctcctgctcctctcgtcggccgcggcaggaggagtgacactgagactgtgagaggtattccatgtaatgccataatttgtgatggcatttttcagcaactccgggagcaaggccgattcagaagggtacaacttgaatgaaaaggccgatgatgatggcatacacgagtcaatccgggatgggaatgatggcctgaactctaggcagtggaacttaaatgagaaagcagaggatgcttaccacagcgaagcagagcaatatgagtctggccagtcaggtttgtacgcatcaaggcagcatgttcagagaggaggcagatcgtctggtggtccatggggcacaaattttctgaaggattccaggtccaaacagacggccaaggaagttgcatcaaatagcggtagaggaatggatgctgctaactcgcatgatgacatggatggtagcagagaggatgatgaactgaatagagcaaatggtgaggtgcctgctgaggaaatgctctcagatgactattacgagcaggacggagaggatcagattgaatcgttgcatcgtggcgggatgaagcagtcaagctgttccacttctggtggagcagcaaagtctggctcacgacaaatgaagaagatgtcaaagtacaatgcttatgataacgatgagtataatgatgagaatgatgatgacagcgatgcagatgaagatgatcctgctgacatggattttgagccagacggcgaaacagacaaggctactgataaggataagtttatggatagtgagaattctgacggcgacgacgatgatgaccttgaactctcagatgatgaagatgattttgttgagaatcggaggcaacctaaacgacttaagattgtagcaactaaaacttccaagggaggacagttgcccatgccagttcaaccaaaacgaggggtgtctcacagtgatgaagaatatttttcaggaaaagactcagatgttcccagcgattcggatttcaaacacataccgaaaaaacctgacaggttgcatcagaaacctgtgggccgcagtgatgttgccccaatcagttctcataatgagcttagaacttctggaaggaggaggacggtgaaaaagatctcatatgctgaaagcgaagaaagtgatgatagtgaggagaagtcaaataagcgacaaaagctcatcaaggaggaaccggaagaggaggatggagaaacaattgaaaaagttctgtggcatcaacccaagggtgtagcagaagaggcaataaggaatcaccggtcagctcaacctactgttgccagcctaacatcggactttgaccaacaatgggatgaattagagttctatataaaatggaaaggccagtcttacctgcattgtcaatggaagatactatcagagctccaaagtgttagtggattcaagaaggtaataaactacacgaaaagagtttctgaggaacagaggtacaagagggcactatcacgtgaagaggttgaggttgaacggatatttgctgatagggtcagcaaagctgatggagatgatctggttcccgaatatttagtaaaatggcaaggacttccttatgcagaatctacctgggaaaaagatacagatattgattttgctcaagatgcgattgatgaatataaggctcgtgaagctgcctcagctatacttgggaaaacagtagatttccaacgaaagaaaagcaaagctagtttgaggaggcttgatggtcagccagaatggctaaaagctggcaagcttcgtgattatcagctggaaggactaaactttctcgtcaatgggtggagaaacgatactaatgttatacttgctgatgaaatgggtctgggaaaaactatccaatctgtatccatgcttggcttccttcataatgctcaagaaatcaatggcccatttcttgtagtcgtgccactgtcaacattgtcgaactgggcaaaggaatttcggaagtggctgcccaacatgaatgttgttgtttatgttggcaaccgtgccagcagagagatgtgccagcagcatgaatttttttcagacaaaaaaggtgggcgtcatgtaaaattccacacgttgataactacgtacgaggtgattctcaaagacaaagcggttctttccaagataaaatggaactatcttatggttgatgaagcccaccggttgaaaaattgtgaagcgtcactgtatacaacccttttggaattcagcactaagaacaagctgcttatcacgggaacacctttgcagaacagtgtggaagagctttgggcattacttcatttccttgatccagtcaaattcaacagcaaggatagttttgttgagagatacaaaaatttgagttccttcaacgaaactgagctcgcgaatctgcataaggaattgaggcctcatattctacggcgggttataaaagatgttgagaagtctttacctcctaaaatcgagaggattctacgtgttgagatgtcacccctccagaaacagtactacaagtggattttagagcggaattttcagaatctgaataaaggtgttcgtgggaatcaggtatcacttcttaacattgttgttgaattgaagaaatgctgcaaccatccattcttgtttgaaagtgccgatcatggttatggtggagatagcatcggtgatcggaataaagttgaacgtattgttatgagtagtgggaaacttgtcttgttggacaaactattggtgagactgcgggagactaaccatcgtgtgcttatattctcacagatggttaagatgttggacatccttgcagaatacctctctcttcggggatttcagtttcagaggcttgatggtagtacaagagcagatcttcgtcatcaagccatggaacactttaatgctcctggaagtgatgatttctgttttcttttatccacacgtgccggaggacttggtattaatctagcaactgcagatacagtgataatttttgattcagattggaatccacaaaatgatttgcaggttcttgatcacttggtcattcagaagctaaacgctgagggcaggcttgagaagaaagaatccaaaaaaggtggccccatatttgacaagaacgaactttcagctatcttgaggttcggtgcagaggaattgttcaaggaagacaagactgatgaagagaccaagaggaaccttgaaagtttggacattgatgaaattcttgagagagctgagaaagtcgagacaaagggtggtgaaggggaggaaggaaatgagcttcttagcgctttcaaggtcgcaaacttttccagtgtcgaagatgatgcaacgttctggagtaggttaatacagccagatcctgcagatatagttcaggaaactttggcacctcgtgctgcacgaaataaaaagagctatattgaagatcctcagcttgacaaaaataataacaggaaaagacgggcagttgaaacacaagaaaagccaaggaggctttctggcagaactgtggaaacagttaattcattaccattggttgatggagcagtagctcaagtacgagagtggtcttttggtaatgttccaaagaaggacgcttctcgttttgtacgagcggtcaaaaaatttgggaatgcaacccagattggattaattgtggatgatgttggtggtgtacttgcgaaggtaccgcatgaagcgcagatagaactatttgatttgctggttgatggttgtcaggaagcagttaaggagaatacagacattaagggcacagttttggattttttcggtgtagctgtaaaggcctatgaattgctagctcgtgttgaagagcttcagttcttggcaaagcgaattgcacgttacaaagatccaatcaagcagtaccgcatccagctaccttataaaaagcctcagtggtcagcaagctgtggatggactgaaactgatgacgctagattgatggttggaattcattggtatggctacgggaattgggagaaaataaggttggatccaaagcttggcctgacaacaaaaattgcgccagcaacacttggagaaagggagacatttttaccacgtgctcccaacttggataaccgcgctagtgctctcctgcaaaaggagtatgctaagtttagcggtaagagcttaaaagtcaaaggaaacacccgccagacagtcaataacgacagtaatagtggagttcgatcaatgaggggccggcaaaaggatgtaccagaaaaagatgataataagccgaacaaagatgacattcagaagcgtagggtaatagtggaagctgaagcaagagaagaaggtgaaatttctgaatcggaggcagagaccaggtatcgtcaggacaaagaggagaagtggcttgaatggtgctctgaagttttagatgaggagcaggaaactttgaagcgcctggataggctgcagaatacaagtgtaaacctcccaaaggaaaaggttctttcaaggattcgcaagtatctcctgataattggggacaaaattggagaagttgtccggcaacacagtgaatcttataggcaatcccgcatggtcatgaggttatggaattatgttgccaccttttcaaacatgtctggggagcaactgcatgatctctatatgaaacttagtcaagaccaactggaaggtggagttggcccatctcatggtggcaatttcacatccattcctcccaataagggaggtaactcaaatcaacttcatccttcgagaaaccaaaggccaactaggtctctccagtacaattctgagtctttccataatgagagctctggaagttctgaagcctggaagcgtcgacggagagctgacacagataatcaatttgacacccagcctttgtgtcaacctccaattatgacaaatggaaataggttgcaggaatctagtagttctgcaggtattcttggttggggtccagttgaaattagacggtatggtaatgagaggccaaaacgtgctgttcatcctagtcatttccctactgggcatggacctttgctgtagctgaaggaagtagatgatgcgaacaaccttgttcattttggcataaccgttcccagtgaatttcagcttccatatagttataaatggtggatctccgtaggaattgaaattctttttccaaaacaaaaaggaataaagagcaacctcacctggatcacagttttgaattatatgccttaaaaggtaatgccaggactctagaggcgacttatggaattgttaacagctacactgaatatccttctgacaccatcacagcaacacaaatacatggtggcttgtgaactgccaagaggatcaatcgaggaagttttgcctgttcagttttgtgatctctcaacaatgatctatagttaaatctcaatacataaattatgctttacattgtaatatattgaaatatggttccgttatgctccctccctctcgatgtgttttgtgccgtttttctaccgtgttgatgtaaaagatgaaagaaatgcatgttctcattttgaggcaacaaaaagttgcagccgggagcataatagtgaaatgcgatggaattatcggatacttatcgattccatagtgttttccctgagacaatgtactgaatgaggtacggttataagaaatggtgataattagcttagtaggtgctcagccattctacaagtcatctggtagtccgaagttgcatgaggcctactttcccctggttgccccacttatgctcagtaagtatgcttctagggttgtatgatgatggcccaattgaatttttaatcctgtgtatgaatggtgatggccaaacacttaaatgtagcactgatttaataataggtaccagttttgtcctttttcaattctgttttctgttggtgttcaaaatgtatataattttaaaaaaggta

SEQ ID NO: 27489 - DNA, 6496 bp, Zea Mays
gaaaaaacttatctgccgcctctctatcgcgcgcgccgccgccgcgctgccgcgccgggagcctgtctccggcgatcgccgccttccagccccgttactgaccctcctccgatccgaatcctaggcgaaaaatcgcggaaaataccgcaaaaaatcgcggaaaatcgcccggtcctttttgaataaatcgcacgggcgttgcaccccgctcccttgctcccctcccaccgccggcgacggcgatcgcgcagactaataggtgccccgcggcgagccagaaaacctgcctcgtgccggtccgagcattcgtctctgtcggggggactgagcgcccgtcgcccacccgcctcctgctcctctcgtcggccgcggcaggaggagtgacactgagactgtgagaggtattccatgtaatgccataatttgtgatggcatttttcagcaactccgggagcaaggccgattcagaagggtacaacttgaatgaaaaggccgatgatgatggcatacacgagtcaatccgggatgggaatgatggcctgaactctaggcagtggaacttaaatgagaaagcagaggatgcttaccacagcgaagcagagcaatatgagtctggccagtcaggtttgtacgcatcaaggcagcatgttcagagaggaggcagatcgtctggtggtccatggggcacaaattttctgaaggattccaggtccaaacagacggccaaggaagttgcatcaaatagcggtagaggaatggatgctgctaactcgcatgatgacatggatggtagcagagaggatgatgaactgaatagagcaaatggtgaggtgcctgctgaggaaatgctctcagatgactattacgagcaggacggagaggatcagattgaatcgttgcatcgtggcgggatgaagcagtcaagctgttccacttctggtggagcagcaaagtctggctcacgacaaatgaagaagatgtcaaagtacaatgcttatgataacgatgagtataatgatgagaatgatgatgacagcgatgcagatgaagatgatcctgctgacatggattttgagccagacggcgaaacagacaaggctactgataaggataagtttatggatagtgagaattctgacggcgacgacgatgatgaccttgaactctcagatgatgaagatgattttgttgagaatcggaggcaacctaaacgacttaagattgtagcaactaaaacttccaagggaggacagttgcccatgccagttcaaccaaaacgaggggtgtctcacagtgatgaagaatatttttcaggaaaagactcagatgttcccagcgattcggatttcaaacacataccgaaaaaacctgacaggttgcatcagaaacctgtgggccgcagtgatgttgccccaatcagttctcataatgagcttagaacttctggaaggaggaggacggtgaaaaagatctcatatgctgaaagcgaagaaagtgatgatagtgaggagaagtcaaataagcgacaaaagctcatcaaggaggaaccggaagaggaggatggagaaacaattgaaaaagttctgtggcatcaacccaagggtgtagcagaagaggcaataaggaatcaccggtcagctcaacctactgttgccagcctaacatcggactttgaccaacaatgggatgaattagagttctatataaaatggaaaggccagtcttacctgcattgtcaatggaagatactatcagagctccaaagtgttagtggattcaagaaggtaataaactacacgaaaagagtttctgaggaacagaggtacaagagggcactatcacgtgaagaggttgaggttgaacggatatttgctgatagggtcagcaaagctgatggagatgatctggttcccgaatatttagtaaaatggcaaggacttccttatgcagaatctacctgggaaaaagatacagatattgattttgctcaagatgcgattgatgaatataaggctcgtgaagctgcctcagctatacttgggaaaacagtagatttccaacgaaagaaaagcaaagctagtttgaggaggcttgatggtcagccagaatggctaaaagctggcaagcttcgtgattatcagctggaaggactaaactttctcgtcaatgggtggagaaacgatactaatgttatacttgctgatgaaatgggtctgggaaaaactatccaatctgtatccatgcttggcttccttcataatgctcaagaaatcaatggcccatttcttgtagtcgtgccactgtcaacattgtcgaactgggcaaaggaatttcggaagtggctgcccaacatgaatgttgttgtttatgttggcaaccgtgccagcagagagatgtgccagcagcatgaatttttttcagacaaaaaaggtgggcgtcatgtaaaattccacacgttgataactacgtacgaggtgattctcaaagacaaagcggttctttccaagataaaatggaactatcttatggttgatgaagcccaccggttgaaaaattgtgaagcgtcactgtatacaacccttttggaattcagcactaagaacaagctgcttatcacgggaacacctttgcagaacagtgtggaagagctttgggcattacttcatttccttgatccagtcaaattcaacagcaaggatagttttgttgagagatacaaaaatttgagttccttcaacgaaactgagctcgcgaatctgcataaggaattgaggcctcatattctacggcgggttataaaagatgttgagaagtctttacctcctaaaatcgagaggattctacgtgttgagatgtcacccctccagaaacagtactacaagtggattttagagcggaattttcagaatctgaataaaggtgttcgtgggaatcaggtatcacttcttaacattgttgttgaattgaagaaatgctgcaaccatccattcttgtttgaaagtgccgatcatggttatggtggagatagcatcggtgatcggaataaagttgaacgtattgttatgagtagtgggaaacttgtcttgttggacaaactattggtgagactgcgggagactaaccatcgtgtgcttatattctcacagggcctcttcagtgtggtttggtttggttcaaacccgcactacgggtgccctaagagagaaagcaaaaaaatggttaagatgttggacatccttgcagaatacctctctcttcggggatttcagtttcagaggcttgatggtagtacaagagcagatcttcgtcatcaagccatggaacactttaatgctcctggaagtgatgatttctgttttcttttatccacacgtgccggaggacttggtattaatctagcaactgcagatacagtgataatttttgattcagattggaatccacaaaatgatttgcaggccatgagtagggcacataggattggccaacaggagacagttaatatctaccgcttcgtcacatgcaaaagtgttgaggaggatattttggaacgcgcaaagaaaaagatggttcttgatcacttggtcattcagaagctaaacgctgagggcaggcttgagaagaaagaatccaaaaaaggtggccccatatttgacaagaacgaactttcagctatcttgaggttcggtgcagaggaattgttcaaggaagacaagactgatgaagagaccaagaggaaccttgaaagtttggacattgatgaaattcttgagagagctgagaaagtcgagacaaagggtggtgaaggggaggaaggaaatgagcttcttagcgctttcaaggtcgcaaacttttccagtgtcgaagatgatgcaacgttctggagtaggttaatacagccagatcctgcagatatagttcaggaaactttggcacctcgtgctgcacgaaataaaaagagctatattgaagatcctcagcttgacaaaaataataacaggaaaagacgggcagttgaaacacaagaaaagccaaggaggctttctggcagaactgtggaaacagttaattcattaccattggttgatggagcagtagctcaagtacgagagtggtcttttggtaatgttccaaagaaggacgcttctcgttttgtacgagcggtcaaaaaatttgggaatgcaacccagattggattaattgtggatgatgttggtggtgtacttgcgaaggtaccgcatgaagcgcagatagaactatttgatttgctggttgatggttgtcaggaagcagttaaggagaatacagacattaagggcacagttttggattttttcggtgtagctgtaaaggcctatgaattgctagctcgtgttgaagagcttcagttcttggcaaagcgaattgcacgttacaaagatccaatcaagcagtaccgcatccagctaccttataaaaagcctcagtggtcagcaagctgtggatggactgaaactgatgacgctagattgatggttggaattcattggtatggctacgggaattgggagaaaataaggttggatccaaagcttggcctgacaacaaaaattgcgccagcaacacttggagaaagggagacatttttaccacgtgctcccaacttggataaccgcgctagtgctctcctgcaaaaggagtatgctaagtttagcggtaagagcttaaaagtcaaaggaaacacccgccagacagtcaataacgacagtaatagtggagttcgatcaatgaggggccggcaaaaggatgtaccagaaaaagatgataataagccgaacaaagatgacattcagaagcgtagggtaatagtggaagctgaagcaagagaagaaggtgaaatttctgaatcggaggcagagaccaggtatcgtcaggacaaagaggagaagtggcttgaatggtgctctgaagttttagatgaggagcaggaaactttgaagcgcctggataggctgcagaatacaagtgtaaacctcccaaaggaaaaggttctttcaaggattcgcaagtatctcctgataattggggacaaaattggagaagttgtccggcaacacagtgaatcttataggcaatcccgcatggtcatgaggttatggaattatgttgccaccttttcaaacatgtctggggagcaactgcatgatctctatatgaaacttagtcaagaccaactggaaggtggagttggcccatctcatggtggcaatttcacatccattcctcccaataagggaggtaactcaaatcaacttcatccttcgagaaaccaaaggccaactaggtctctccagtacaattctgagtctttccataatgagagctctggaagttctgaagcctggaagcgtcgacggagagctgacacagataatcaatttgacacccagcctttgtgtcaacctccaattatgacaaatggaaataggttgcaggaatctagtagttctgcaggtattcttggttggggtccagttgaaattagacggtatggtaatgagaggccaaaacgtgctgttcatcctagtcatttccctactgggcatggacctttgctgtagctgaaggaagtagatgatgcgaacaaccttgttcattttggcataaccgttcccagtgaatttcagcttccatatagttataaatggtggatctccgtaggaattgaaattctttttccaaaacaaaaaggaataaagagcaacctcacctggatcacagttttgaattatatgccttaaaaggtaatgccaggactctagaggcgacttatggaattgttaacagctacactgaatatccttctgacaccatcacagcaacacaaatacatggtggcttgtgaactgccaagaggatcaatcgaggaagttttgcctgttcagttttgtgatctctcaacaatgatctatagttaaatctcaatacataaattatgctttacattgtaatatattgaaatatggttccgttatgctccctccctctcgatgtgttttgtgccgtttttctaccgtgttgatgtaaaagatgaaagaaatgcatgttctcattttgaggcaacaaaaagttgcagccgggagcataatagtgaaatgcgatggaattatcggatacttatcgattccatagtgttttccctgagacaatgtactgaatgaggtacggttataagaaatggtgataattagcttagtaggtgctcagccattctacaagtcatctggtagtccgaagttgcatgaggcctactttcccctggttgccccacttatgctcagtaagtatgcttctagggttgtatgatgatggcccaattgaatttttaatcctgtgtatgaatggtgatggccaaacacttaaatgtagcactgatttaataataggtaccagttttgtcctttttcaattctgttttctgttggtgttcaaaatgtatataattttaaaaaaggta

SEQ ID NO: 27490 - DNA, 6575 bp, Zea Mays
gaaaaaacttatctgccgcctctctatcgcgcgcgccgccgccgcgctgccgcgccgggagcctgtctccggcgatcgccgccttccagccccgttactgaccctcctccgatccgaatcctaggcgaaaaatcgcggaaaataccgcaaaaaatcgcggaaaatcgcccggtcctttttgaataaatcgcacgggcgttgcaccccgctcccttgctcccctcccaccgccggcgacggcgatcgcgcagactaataggtgccccgcggcgagccagaaaacctgcctcgtgccggtccgagcattcgtctctgtcggggggactgagcgcccgtcgcccacccgcctcctgctcctctcgtcggccgcggcaggaggagtgacactgagactgtgagaggtattccatgtaatgccataatttgtgatggcatttttcagcaactccgggagcaaggccgattcagaagggtacaacttgaatgaaaaggccgatgatgatggcatacacgagtcaatccgggatgggaatgatggcctgaactctaggcagtggaacttaaatgagaaagcagaggatgcttaccacagcgaagcagagcaatatgagtctggccagtcaggtttgtacgcatcaaggcagcatgttcagagaggaggcagatcgtctggtggtccatggggcacaaattttctgaaggattccaggtccaaacagacggccaaggaagttgcatcaaatagcggtagaggaatggatgctgctaactcgcatgatgacatggatggtagcagagaggatgatgaactgaatagagcaaatggtgaggtgcctgctgaggaaatgctctcagatgactattacgagcaggacggagaggatcagattgaatcgttgcatcgtggcgggatgaagcagtcaagctgttccacttctggtggagcagcaaagtctggctcacgacaaatgaagaagatgtcaaagtacaatgcttatgataacgatgagtataatgatgagaatgatgatgacagcgatgcagatgaagatgatcctgctgacatggattttgagccagacggcgaaacagacaaggctactgataaggataagtttatggatagtgagaattctgacggcgacgacgatgatgaccttgaactctcagatgatgaagatgattttgttgagaatcggaggcaacctaaacgacttaagattgtagcaactaaaacttccaagggaggacagttgcccatgccagttcaaccaaaacgaggggtgtctcacagtgatgaagaatatttttcaggaaaagactcagatgttcccagcgattcggatttcaaacacataccgaaaaaacctgacaggttgcatcagaaacctgtgggccgcagtgatgttgccccaatcagttctcataatgagcttagaacttctggaaggaggaggacggtgaaaaagatctcatatgctgaaagcgaagaaagtgatgatagtgaggagaagtcaaataagcgacaaaagctcatcaaggaggaaccggaagaggaggatggagaaacaattgaaaaagttctgtggcatcaacccaagggtgtagcagaagaggcaataaggaatcaccggtcagctcaacctactgttgccagcctaacatcggactttgaccaacaatgggatgaattagagttctatataaaatggaaaggccagtcttacctgcattgtcaatggaagatactatcagagctccaaagtgttagtggattcaagaaggtaataaactacacgaaaagagtttctgaggaacagaggtacaagagggcactatcacgtgaagaggttgaggtacatgacgtgggcaaggagatggagctggatcttattaaacaatatagtcaggttgaacggatatttgctgatagggtcagcaaagctgatggagatgatctggttcccgaatatttagtaaaatggcaaggacttccttatgcagaatctacctgggaaaaagatacagatattgattttgctcaagatgcgattgatgaatataaggctcgtgaagctgcctcagctatacttgggaaaacagtagatttccaacgaaagaaaagcaaagctagtttgaggaggcttgatggtcagccagaatggctaaaagctggcaagcttcgtgattatcagctggaaggactaaactttctcgtcaatgggtggagaaacgatactaatgttatacttgctgatgaaatgggtctgggaaaaactatccaatctgtatccatgcttggcttccttcataatgctcaagaaatcaatggcccatttcttgtagtcgtgccactgtcaacattgtcgaactgggcaaaggaatttcggaagtggctgcccaacatgaatgttgttgtttatgttggcaaccgtgccagcagagagatgtgccagcagcatgaatttttttcagacaaaaaaggtgggcgtcatgtaaaattccacacgttgataactacgtacgaggtgattctcaaagacaaagcggttctttccaagataaaatggaactatcttatggttgatgaagcccaccggttgaaaaattgtgaagcgtcactgtatacaacccttttggaattcagcactaagaacaagctgcttatcacgggaacacctttgcagaacagtgtggaagagctttgggcattacttcatttccttgatccagtcaaattcaacagcaaggatagttttgttgagagatacaaaaatttgagttccttcaacgaaactgagctcgcgaatctgcataaggaattgaggcctcatattctacggcgggttataaaagatgttgagaagtctttacctcctaaaatcgagaggattctacgtgttgagatgtcacccctccagaaacagtactacaagtggattttagagcggaattttcagaatctgaataaaggtgttcgtgggaatcaggtcaagcagttcctcacctgctattgctagctcaagaagtttctcacctggccgtgcattacctatcaaactggagcatgggcaaggccacaaggtatcacttcttaacattgttgttgaattgaagaaatgctgcaaccatccattcttgtttgaaagtgccgatcatggttatggtggagatagcatcggtgatcggaataaagttgaacgtattgttatgagtagtgggaaacttgtcttgttggacaaactattggtgagactgcgggagactaaccatcgtgtgcttatattctcacagatggttaagatgttggacatccttgcagaatacctctctcttcggggatttcagtttcagaggcttgatggtagtacaagagcagatcttcgtcatcaagccatggaacactttaatgctcctggaagtgatgatttctgttttcttttatccacacgtgccggaggacttggtattaatctagcaactgcagatacagtgataatttttgattcagattggaatccacaaaatgatttgcaggccatgagtagggcacataggattggccaacaggagacagttaatatctaccgcttcgtcacatgcaaaagtgttgaggaggatattttggaacgcgcaaagaaaaagatggttcttgatcacttggtcattcagaagctaaacgctgagggcaggcttgagaagaaagaatccaaaaaaggtggccccatatttgacaagaacgaactttcagctatcttgaggttcggtgcagaggaattgttcaaggaagacaagactgatgaagagaccaagaggaaccttgaaagtttggacattgatgaaattcttgagagagctgagaaagtcgagacaaagggtggtgaaggggaggaaggaaatgagcttcttagcgctttcaaggtcgcaaacttttccagtgtcgaagatgatgcaacgttctggagtaggttaatacagccagatcctgcagatatagttcaggaaactttggcacctcgtgctgcacgaaataaaaagagctatattgaagatcctcagcttgacaaaaataataacaggaaaagacgggcagttgaaacacaagaaaagccaaggaggctttctggcagaactgtggaaacagttaattcattaccattggttgatggagcagtagctcaagtacgagagtggtcttttggtaatgttccaaagaaggacgcttctcgttttgtacgagcggtcaaaaaatttgggaatgcaacccagattggattaattgtggatgatgttggtggtgtacttgcgaaggtaccgcatgaagcgcagatagaactatttgatttgctggttgatggttgtcaggaagcagttaaggagaatacagacattaagggcacagttttggattttttcggtgtagctgtaaaggcctatgaattgctagctcgtgttgaagagcttcagttcttggcaaagcgaattgcacgttacaaagatccaatcaagcagtaccgcatccagctaccttataaaaagcctcagtggtcagcaagctgtggatggactgaaactgatgacgctagattgatggttggaattcattggtatggctacgggaattgggagaaaataaggttggatccaaagcttggcctgacaacaaaaattgcgccagcaacacttggagaaagggagacatttttaccacgtgctcccaacttggataaccgcgctagtgctctcctgcaaaaggagtatgctaagtttagcggtaagagcttaaaagtcaaaggaaacacccgccagacagtcaataacgacagtaatagtggagttcgatcaatgaggggccggcaaaaggatgtaccagaaaaagatgataataagccgaacaaagatgacattcagaagcgtagggtaatagtggaagctgaagcaagagaagaaggtgaaatttctgaatcggaggcagagaccaggtatcgtcaggacaaagaggagaagtggcttgaatggtgctctgaagttttagatgaggagcaggaaactttgaagcgcctggataggctgcagaatacaagtgtaaacctcccaaaggaaaaggttctttcaaggattcgcaagtatctcctgataattggggacaaaattggagaagttgtccggcaacacagtgaatcttataggcaatcccgcatggtcatgaggttatggaattatgttgccaccttttcaaacatgtctggggagcaactgcatgatctctatatgaaacttagtcaagaccaactggaaggtggagttggcccatctcatggtggcaatttcacatccattcctcccaataagggaggtaactcaaatcaacttcatccttcgagaaaccaaaggccaactaggtctctccagtacaattctgagtctttccataatgagagctctggaagttctgaagcctggaagcgtcgacggagagctgacacagataatcaatttgacacccagcctttgtgtcaacctccaattatgacaaatggaaataggttgcaggaatctagtagttctgcaggtattcttggttggggtccagttgaaattagacggtatggtaatgagaggccaaaacgtgctgttcatcctagtcatttccctactgggcatggacctttgctgtagctgaaggaagtagatgatgcgaacaaccttgttcattttggcataaccgttcccagtgaatttcagcttccatatagttataaatggtggatctccgtaggaattgaaattctttttccaaaacaaaaaggaataaagagcaacctcacctggatcacagttttgaattatatgccttaaaaggtaatgccaggactctagaggcgacttatggaattgttaacagctacactgaatatccttctgacaccatcacagcaacacaaatacatggtggcttgtgaactgccaagaggatcaatcgaggaagttttgcctgttcagttttgtgatctctcaacaatgatctatagttaaatctcaatacataaattatgctttacattgtaatatattgaaatatggttccgttatgctccctccctctcgatgtgttttgtgccgtttttctaccgtgttgatgtaaaagatgaaagaaatgcatgttctcattttgaggcaacaaaaagttgcagccgggagcataatagtgaaatgcgatggaattatcggatacttatcgattccatagtgttttccctgagacaatgtactgaatgaggtacggttataagaaatggtgataattagcttagtaggtgctcagccattctacaagtcatctggtagtccgaagttgcatgaggcctactttcccctggttgccccacttatgctcagtaagtatgcttctagggttgtatgatgatggcccaattgaatttttaatcctgtgtatgaatggtgatggccaaacacttaaatgtagcactgatttaataataggtaccagttttgtcctttttcaattctgttttctgttggtgttcaaaatgtatataattttaaaaaaggta

SEQ ID NO: 27491 - DNA, 6567 bp, Zea Mays
gaaaaaacttatctgccgcctctctatcgcgcgcgccgccgccgcgctgccgcgccgggagcctgtctccggcgatcgccgccttccagccccgttactgaccctcctccgatccgaatcctaggcgaaaaatcgcggaaaataccgcaaaaaatcgcggaaaatcgcccggtcctttttgaataaatcgcacgggcgttgcaccccgctcccttgctcccctcccaccgccggcgacggcgatcgcgcagactaataggtgccccgcggcgagccagaaaacctgcctcgtgccggtccgagcattcgtctctgtcggggggactgagcgcccgtcgcccacccgcctcctgctcctctcgtcggccgcggcaggaggagtgacactgagactgtgagaggtattccatgtaatgccataatttgtgatggcatttttcagcaactccgggagcaaggccgattcagaagggtacaacttgaatgaaaaggccgatgatgatggcatacacgagtcaatccgggatgggaatgatggcctgaactctaggcagtggaacttaaatgagaaagcagaggatgcttaccacagcgaagcagagcaatatgagtctggccagtcaggtttgtacgcatcaaggcagcatgttcagagaggaggcagatcgtctggtggtccatggggcacaaattttctgaaggattccaggtccaaacagacggccaaggaagttgcatcaaatagcggtagaggaatggatgctgctaactcgcatgatgacatggatggtagcagagaggatgatgaactgaatagagcaaatggtgaggtgcctgctgaggaaatgctctcagatgactattacgagcaggacggagaggatcagattgaatcgttgcatcgtggcgggatgaagcagtcaagctgttccacttctggtggagcagcaaagtctggctcacgacaaatgaagaagatgtcaaagtacaatgcttatgataacgatgagtataatgatgagaatgatgatgacagcgatgcagatgatgatcctgctgacatggattttgagccagacggcgaaacagacaaggctactgataaggataagtttatggatagtgagaattctgacggcgacgacgatgatgaccttgaactctcagatgatgaagatgattttgttgagaatcggaggcaacctaaacgacttaagattgtagcaactaaaacttccaagggaggacagttgcccatgccagttcaaccaaaacgaggggtgtctcacagtgatgaagaatatttttcaggaaaagactcagatgttcccagcgattcggatttcaaacacataccgaaaaaacctgacaggttgcatcagaaacctgtgggccgcagtgatgttgccccaatcagttctcataatgagcttagaacttctggaaggaggaggacggtgaaaaagatctcatatgctgaaagcgaagaaagtgatgatagtgaggagaagtcaaataagcgacaaaagctcatcaaggaggaaccggaagaggaggatggagaaacaattgaaaaagttctgtggcatcaacccaagggtgtagcagaagaggcaataaggaatcaccggtcagctcaacctactgttgccagcctaacatcggactttgaccaacaatgggatgaattagagttctatataaaatggaaaggccagtcttacctgcattgtcaatggaagatactatcagagctccaaagtgttagtggattcaagaaggtaataaactacacgaaaagagtttctgaggaacagaggtacaagagggcactatcacgtgaagaggttgaggttgaacggatatttgctgatagggtcagcaaagctgatggagatgatctggttcccgaatatttagtaaaatggcaaggacttccttatgcagaatctacctgggaaaaagatacagatattgattttgctcaagatgcgattgatgaatataaggctcgtgaagctgcctcagctatacttgggaaaacagtagatttccaacgaaagaaaagcaaagctagtttgaggaggcttgatggtcagccagaatggctaaaagctggcaagcttcgtgattatcagctggaaggactaaactttctcgtcaatgggtggagaaacgatactaatgttatacttgctgatgaaatgggtctgggaaaaactatccaatctgtatccatgcttggcttccttcataatgctcaagaaatcaatggcccatttcttgtagtcgtgccactgtcaacattgtcgaactgggcaaaggaatttcggaagtggctgcccaacatgaatgttgttgtttatgttggcaaccgtgccagcagagagatgtgccagcagcatgaatttttttcagacaaaaaaggtgggcgtcatgtaaaattccacacgttgataactacgtacgaggtgattctcaaagacaaagcggttctttccaagataaaatggaactatcttatggttgatgaagcccaccggttgaaaaattgtgaagcgtcactgtatacaacccttttggaattcagcactaagaacaagctgcttatcacgggaacacctttgcagaacagtgtggaagagctttgggcattacttcatttccttgatccagtcaaattcaacagcaaggatagttttgttgagagatacaaaaatttgagttccttcaacgaaactgagctcgcgaatctgcataaggaattgaggcctcatattctacggcgggttataaaagatgttgagaagtctttacctcctaaaatcgagaggattctacgtgttgagatgtcacccctccagaaacagtactacaagtggattttagagcggaattttcagaatctgaataaaggtgttcgtgggaatcaggatcttgattggaacaatgttactattctttctcacctactattgctaggtcaagcagttcctcacctgctattgctagctcaagaagtttctcacctggccgtgcattacctatcaaactggagcatgggcaaggccacaaggtatcacttcttaacattgttgttgaattgaagaaatgctgcaaccatccattcttgtttgaaagtgccgatcatggttatggtggagatagcatcggtgatcggaataaagttgaacgtattgttatgagtagtgggaaacttgtcttgttggacaaactattggtgagactgcgggagactaaccatcgtgtgcttatattctcacagatggttaagatgttggacatccttgcagaatacctctctcttcggggatttcagtttcagaggcttgatggtagtacaagagcagatcttcgtcatcaagccatggaacactttaatgctcctggaagtgatgatttctgttttcttttatccacacgtgccggaggacttggtattaatctagcaactgcagatacagtgataatttttgattcagattggaatccacaaaatgatttgcaggccatgagtagggcacataggattggccaacaggagacagttaatatctaccgcttcgtcacatgcaaaagtgttgaggaggatattttggaacgcgcaaagaaaaagatggttcttgatcacttggtcattcagaagctaaacgctgagggcaggcttgagaagaaagaatccaaaaaaggtggccccatatttgacaagaacgaactttcagctatcttgaggttcggtgcagaggaattgttcaaggaagacaagactgatgaagagaccaagaggaaccttgaaagtttggacattgatgaaattcttgagagagctgagaaagtcgagacaaagggtggtgaaggggaggaaggaaatgagcttcttagcgctttcaaggtcgcaaacttttccagtgtcgaagatgatgcaacgttctggagtaggttaatacagccagatcctgcagatatagttcaggaaactttggcacctcgtgctgcacgaaataaaaagagctatattgaagatcctcagcttgacaaaaataataacaggaaaagacgggcagttgaaacacaagaaaagccaaggaggctttctggcagaactgtggaaacagttaattcattaccattggttgatggagcagtagctcaagtacgagagtggtcttttggtaatgttccaaagaaggacgcttctcgttttgtacgagcggtcaaaaaatttgggaatgcaacccagattggattaattgtggatgatgttggtggtgtacttgcgaaggtaccgcatgaagcgcagatagaactatttgatttgctggttgatggttgtcaggaagcagttaaggagaatacagacattaagggcacagttttggattttttcggtgtagctgtaaaggcctatgaattgctagctcgtgttgaagagcttcagttcttggcaaagcgaattgcacgttacaaagatccaatcaagcagtaccgcatccagctaccttataaaaagcctcagtggtcagcaagctgtggatggactgaaactgatgacgctagattgatggttggaattcattggtatggctacgggaattgggagaaaataaggttggatccaaagcttggcctgacaacaaaaattgcgccagcaacacttggagaaagggagacatttttaccacgtgctcccaacttggataaccgcgctagtgctctcctgcaaaaggagtatgctaagtttagcggtaagagcttaaaagtcaaaggaaacacccgccagacagtcaataacgacagtaatagtggagttcgatcaatgaggggccggcaaaaggatgtaccagaaaaagatgataataagccgaacaaagatgacattcagaagcgtagggtaatagtggaagctgaagcaagagaagaaggtgaaatttctgaatcggaggcagagaccaggtatcgtcaggacaaagaggagaagtggcttgaatggtgctctgaagttttagatgaggagcaggaaactttgaagcgcctggataggctgcagaatacaagtgtaaacctcccaaaggaaaaggttctttcaaggattcgcaagtatctcctgataattggggacaaaattggagaagttgtccggcaacacagtgaatcttataggcaatcccgcatggtcatgaggttatggaattatgttgccaccttttcaaacatgtctggggagcaactgcatgatctctatatgaaacttagtcaagaccaactggaaggtggagttggcccatctcatggtggcaatttcacatccattcctcccaataagggaggtaactcaaatcaacttcatccttcgagaaaccaaaggccaactaggtctctccagtacaattctgagtctttccataatgagagctctggaagttctgaagcctggaagcgtcgacggagagctgacacagataatcaatttgacacccagcctttgtgtcaacctccaattatgacaaatggaaataggttgcaggaatctagtagttctgcaggtattcttggttggggtccagttgaaattagacggtatggtaatgagaggccaaaacgtgctgttcatcctagtcatttccctactgggcatggacctttgctgtagctgaaggaagtagatgatgcgaacaaccttgttcattttggcataaccgttcccagtgaatttcagcttccatatagttataaatggtggatctccgtaggaattgaaattctttttccaaaacaaaaaggaataaagagcaacctcacctggatcacagttttgaattatatgccttaaaaggtaatgccaggactctagaggcgacttatggaattgttaacagctacactgaatatccttctgacaccatcacagcaacacaaatacatggtggcttgtgaactgccaagaggatcaatcgaggaagttttgcctgttcagttttgtgatctctcaacaatgatctatagttaaatctcaatacataaattatgctttacattgtaatatattgaaatatggttccgttatgctccctccctctcgatgtgttttgtgccgtttttctaccgtgttgatgtaaaagatgaaagaaatgcatgttctcattttgaggcaacaaaaagttgcagccgggagcataatagtgaaatgcgatggaattatcggatacttatcgattccatagtgttttccctgagacaatgtactgaatgaggtacggttataagaaatggtgataattagcttagtaggtgctcagccattctacaagtcatctggtagtccgaagttgcatgaggcctactttcccctggttgccccacttatgctcagtaagtatgcttctagggttgtatgatgatggcccaattgaatttttaatcctgtgtatgaatggtgatggccaaacacttaaatgtagcactgatttaataataggtaccagttttgtcctttttcaattctgttttctgttggtgttcaaaatgtatataattttaaaaaaggta

SEQ ID NO: 27492 - DNA, 6466 bp, Zea Mays
gtgagagccggagagggagaaagaggatagagagagaaggaaaaaacttatctgccgcctctctatcgcgcgcgccgccgccgcgctgccgcgccgggagcctgtctccggcgatcgccgccttccagccccgttactgaccctcctccgatccgaatcctaggcgaaaaatcgcggaaaataccgcaaaaaatcgcggaaaatcgcccggtcctttttgaataaatcgcacgggcgttgcaccccgctcccttgctcccctcccaccgccggcgacggcgatcgcgcagactaataggtgccccgcggcgagccagaaaacctgcctcgtgccggtccgagcattcgtctctgtcggggggactgagcgcccgtcgcccacccgcctcctgctcctctcgtcggccgcggcaggaggagtgacactgagactgtgagaggtattccatgtaatgccataatttgtgatggcatttttcagcaactccgggagcaaggccgattcagaagggtacaacttgaatgaaaaggccgatgatgatggcatacacgagtcaatccgggatgggaatgatggcctgaactctaggcagtggaacttaaatgagaaagcagaggatgcttaccacagcgaagcagagcaatatgagtctggccagtcaggtttgtacgcatcaaggcagcatgttcagagaggaggcagatcgtctggtggtccatggggcacaaattttctgaaggattccaggtccaaacagacggccaaggaagttgcatcaaatagcggtagaggaatggatgctgctaactcgcatgatgacatggatggtagcagagaggatgatgaactgaatagagcaaatggtgaggtgcctgctgaggaaatgctctcagatgactattacgagcaggacggagaggatcagattgaatcgttgcatcgtggcgggatgaagcagtcaagctgttccacttctggtggagcagcaaagtctggctcacgacaaatgaagaagatgtcaaagtacaatgcttatgataacgatgagtataatgatgagaatgatgatgacagcgatgcagatgaagatgatcctgctgacatggattttgagccagacggcgaaacagacaaggctactgataaggataagtttatggatagtgagaattctgacggcgacgacgatgatgaccttgaactctcagatgatgaagatgattttgttgagaatcggaggcaacctaaacgacttaagattgtagcaactaaaacttccaagggaggacagttgcccatgccagttcaaccaaaacgaggggtgtctcacagtgatgaagaatatttttcaggaaaagactcagatgttcccagcgattcggatttcaaacacataccgaaaaaacctgacaggttgcatcagaaacctgtgggccgcagtgatgttgccccaatcagttctcataatgagcttagaacttctggaaggaggaggacggtgaaaaagatctcatatgctgaaagcgaagaaagtgatgatagtgaggagaagtcaaataagcgacaaaagctcatcaaggaggaaccggaagaggaggatggagaaacaattgaaaaagttctgtggcatcaacccaagggtgtagcagaagaggcaataaggaatcaccggtcagctcaacctactgttgccagcctaacatcggactttgaccaacaatgggatgaattagagttctatataaaatggaaaggccagtcttacctgcattgtcaatggaagatactatcagagctccaaagtgttagtggattcaagaaggtaataaactacacgaaaagagtttctgaggaacagaggtacaagagggcactatcacgtgaagaggttgaggttgaacggatatttgctgatagggtcagcaaagctgatggagatgatctggttcccgaatatttagtaaaatggcaaggacttccttatgcagaatctacctgggaaaaagatacagatattgattttgctcaagatgcgattgatgaatataaggctcgtgaagctgcctcagctatacttgggaaaacagtagatttccaacgaaagaaaagcaaagctagtttgaggaggcttgatggtcagccagaatggctaaaagctggcaagcttcgtgattatcagctggaaggactaaactttctcgtcaatgggtggagaaacgatactaatgttatacttgctgatgaaatgggtctgggaaaaactatccaatctgtatccatgcttggcttccttcataatgctcaagaaatcaatggcccatttcttgtagtcgtgccactgtcaacattgtcgaactgggcaaaggaatttcggaagtggctgcccaacatgaatgttgttgtttatgttggcaaccgtgccagcagagagatgtgccagcagcatgaatttttttcagacaaaaaaggtgggcgtcatgtaaaattccacacgttgataactacgtacgaggtgattctcaaagacaaagcggttctttccaagataaaatggaactatcttatggttgatgaagcccaccggttgaaaaattgtgaagcgtcactgtatacaacccttttggaattcagcactaagaacaagctgcttatcacgggaacacctttgcagaacagtgtggaagagctttgggcattacttcatttccttgatccagtcaaattcaacagcaaggatagttttgttgagagatacaaaaatttgagttccttcaacgaaactgagctcgcgaatctgcataaggaattgaggcctcatattctacggcgggttataaaagatgttgagaagtctttacctcctaaaatcgagaggattctacgtgttgagatgtcacccctccagaaacagtactacaagtggattttagagcggaattttcagaatctgaataaaggtgttcgtgggaatcaggtatcacttcttaacattgttgttgaattgaagaaatgctgcaaccatccattcttgtttgaaagtgccgatcatggttatggtggagatagcatcggtgatcggaataaagttgaacgtattgttatgagtagtgggaaacttgtcttgttggacaaactattggtgagactgcgggagactaaccatcgtgtgcttatattctcacagatggttaagatgttggacatccttgcagaatacctctctcttcggggatttcagtttcagaggcttgatggtagtacaagagcagatcttcgtcatcaagccatggaacactttaatgctcctggaagtgatgatttctgttttcttttatccacacgtgccggaggacttggtattaatctagcaactgcagatacagtgataatttttgattcagattggaatccacaaaatgatttgcaggccatgagtagggcacataggattggccaacaggagacagttaatatctaccgcttcgtcacatgcaaaagtgttgaggaggatattttggaacgcgcaaagaaaaagatggttcttgatcacttggtcattcagaagctaaacgctgagggcaggcttgagaagaaagaatccaaaaaaggtggccccatatttgacaagaacgaactttcagctatcttgaggttcggtgcagaggaattgttcaaggaagacaagactgatgaagagaccaagaggaaccttgaaagtttggacattgatgaaattcttgagagagctgagaaagtcgagacaaagggtggtgaaggggaggaaggaaatgagcttcttagcgctttcaaggtcgcaaacttttccagtgtcgaagatgatgcaacgttctggagtaggttaatacagccagatcctgcagatatagttcaggaaactttggcacctcgtgctgcacgaaataaaaagagctatattgaagatcctcagcttgacaaaaataataacaggaaaagacgggcagttgaaacacaagaaaagccaaggaggctttctggcagaactgtggaaacagttaattcattaccattggttgatggagcagtagctcaagtacgagagtggtcttttggtaatgttccaaagaaggacgcttctcgttttgtacgagcggtcaaaaaatttgggaatgcaacccagattggattaattgtggatgatgttggtggtgtacttgcgaaggtaccgcatgaagcgcagatagaactatttgatttgctggttgatggttgtcaggaagcagttaaggagaatacagacattaagggcacagttttggattttttcggtgtagctgtaaaggcctatgaattgctagctcgtgttgaagagcttcagttcttggcaaagcgaattgcacgttacaaagatccaatcaagcagtaccgcatccagctaccttataaaaagcctcagtggtcagcaagctgtggatggactgaaactgatgacgctagattgatggttggaattcattggtatggctacgggaattgggagaaaataaggttggatccaaagcttggcctgacaacaaaaattgcgccagcaacacttggagaaagggagacatttttaccacgtgctcccaacttggataaccgcgctagtgctctcctgcaaaaggagtatgctaagtttagcggtaagagcttaaaagtcaaaggaaacacccgccagacagtcaataacgacagtaatagtggagttcgatcaatgaggggccggcaaaaggatgtaccagaaaaagatgataataagccgaacaaagatgacattcagaagcgtagggtaatagtggaagctgaagcaagagaagaaggtgaaatttctgaatcggaggcagagaccaggtatcgtcaggacaaagaggagaagtggcttgaatggtgctctgaagttttagatgaggagcaggaaactttgaagcgcctggataggctgcagaatacaagtgtaaacctcccaaaggaaaaggttctttcaaggattcgcaagtatctcctgataattggggacaaaattggagaagttgtccggcaacacagtgaatcttataggcaatcccgcatggtcatgaggttatggaattatgttgccaccttttcaaacatgtctggggagcaactgcatgatctctatatgaaacttagtcaagaccaactggaaggtggagttggcccatctcatggtggcaatttcacatccattcctcccaataagggaggtaactcaaatcaacttcatccttcgagaaaccaaaggccaactaggtctctccagtacaattctgagtctttccataatgagagctctggaagttctgaagcctggaagcgtcgacggagagctgacacagataatcaatttgacacccagcctttgtgtcaacctccaattatgacaaatggaaataggttgcaggaatctagtagttctgcaggtattcttggttggggtccagttgaaattagacggtatggtaatgagaggccaaaacgtgctgttcatcctagtcatttccctactgggcatggacctttgctgtagctgaaggaagtagatgatgcgaacaaccttgttcattttggcataaccgttcccagtgaatttcagcttccatatagttataaatggtggatctccgtaggaattgaaattctttttccaaaacaaaaaggaataaagagcaacctcacctggatcacagttttgaattatatgccttaaaaggtaatgccaggactctagaggcgacttatggaattgttaacagctacactgaatatccttctgacaccatcacagcaacacaaatacatggtggcttgtgaactgccaagaggatcaatcgaggaagttttgcctgttcagttttgtgatctctcaacaatgatctatagttaaatctcaatacataaattatgctttacattgtaatatattgaaatatggttccgttatgctccctccctctcgatgtgttttgtgccgtttttctaccgtgttgatgtaaaagatgaaagaaatgcatgttctcattttgaggcaacaaaaagttgcagccgggagcataatagtgaaatgcgatggaattatcggatacttatcgattccatagtgttttccctgagacaatgtactgaatgaggtacggttataagaaatggtgataattagcttagtaggtgctcagccattctacaagtcatctggtagtccgaagttgcatgaggcctactttcccctggttgccccacttatgctcagtaagtatgcttctagggttgtatgatgatggcccaattgaatttttaatcctgtgtatgaatggtgatggccaaacacttaaatgtagcactgatttaataataggtaccagttttgtcctttttcaattctgttttctgttggtgttcaaaatgtatataattttaaaaaaggta

SEQ ID NO: 27493 - DNA, 6207 bp, Zea Mays
ccgcatatgattttttcccaacccgaccgagtcgagaccgagacaaatacacgagccaaaaggagtgacactgagactgtgagaggtattccatgtaatgccataatttgtgatggcatttttcagcaactccgggagcaaggccgattcagaagggtacaacttgaatgaaaaggccgatgatgatggcatacacgagtcaatccgggatgggaatgatggcctgaactctaggcagtggaacttaaatgagaaagcagaggatgcttaccacagcgaagcagagcaatatgagtctggccagtcaggtttgtacgcatcaaggcagcatgttcagagaggaggcagatcgtctggtggtccatggggcacaaattttctgaaggattccaggtccaaacagacggccaaggaagttgcatcaaatagcggtagaggaatggatgctgctaactcgcatgatgacatggatggtagcagagaggatgatgaactgaatagagcaaatggtgaggtgcctgctgaggaaatgctctcagatgactattacgagcaggacggagaggatcagattgaatcgttgcatcgtggcgggatgaagcagtcaagctgttccacttctggtggagcagcaaagtctggctcacgacaaatgaagaagatgtcaaagtacaatgcttatgataacgatgagtataatgatgagaatgatgatgacagcgatgcagatgaagatgatcctgctgacatggattttgagccagacggcgaaacagacaaggctactgataaggataagtttatggatagtgagaattctgacggcgacgacgatgatgaccttgaactctcagatgatgaagatgattttgttgagaatcggaggcaacctaaacgacttaagattgtagcaactaaaacttccaagggaggacagttgcccatgccagttcaaccaaaacgaggggtgtctcacagtgatgaagaatatttttcaggaaaagactcagatgttcccagcgattcggatttcaaacacataccgaaaaaacctgacaggttgcatcagaaacctgtgggccgcagtgatgttgccccaatcagttctcataatgagcttagaacttctggaaggaggaggacggtgaaaaagatctcatatgctgaaagcgaagaaagtgatgatagtgaggagaagtcaaataagcgacaaaagctcatcaaggaggaaccggaagaggaggatggagaaacaattgaaaaagttctgtggcatcaacccaagggtgtagcagaagaggcaataaggaatcaccggtcagctcaacctactgttgccagcctaacatcggactttgaccaacaatgggatgaattagagttctatataaaatggaaaggccagtcttacctgcattgtcaatggaagatactatcagagctccaaagtgttagtggattcaagaaggtaataaactacacgaaaagagtttctgaggaacagaggtacaagagggcactatcacgtgaagaggttgaggttgaacggatatttgctgatagggtcagcaaagctgatggagatgatctggttcccgaatatttagtaaaatggcaaggacttccttatgcagaatctacctgggaaaaagatacagatattgattttgctcaagatgcgattgatgaatataaggctcgtgaagctgcctcagctatacttgggaaaacagtagatttccaacgaaagaaaagcaaagctagtttgaggaggcttgatggtcagccagaatggctaaaagctggcaagcttcgtgattatcagctggaaggactaaactttctcgtcaatgggtggagaaacgatactaatgttatacttgctgatgaaatgggtctgggaaaaactatccaatctgtatccatgcttggcttccttcataatgctcaagaaatcaatggcccatttcttgtagtcgtgccactgtcaacattgtcgaactgggcaaaggaatttcggaagtggctgcccaacatgaatgttgttgtttatgttggcaaccgtgccagcagagagatgtgccagcagcatgaatttttttcagacaaaaaaggtgggcgtcatgtaaaattccacacgttgataactacgtacgaggtgattctcaaagacaaagcggttctttccaagataaaatggaactatcttatggttgatgaagcccaccggttgaaaaattgtgaagcgtcactgtatacaacccttttggaattcagcactaagaacaagctgcttatcacgggaacacctttgcagaacagtgtggaagagctttgggcattacttcatttccttgatccagtcaaattcaacagcaaggatagttttgttgagagatacaaaaatttgagttccttcaacgaaactgagctcgcgaatctgcataaggaattgaggcctcatattctacggcgggttataaaagatgttgagaagtctttacctcctaaaatcgagaggattctacgtgttgagatgtcacccctccagaaacagtactacaagtggattttagagcggaattttcagaatctgaataaaggtgttcgtgggaatcagttatttcagttggcacatcttggaattgaatgcaatttggctgtctcagatcttgattggaacaatgttactattctttctcacctactattgctaggtcaagcagttcctcacctgctattgctagctcaagaagtttctcacctggccgtgcattacctatcaaactggagcatgggcaaggccacaaggcaagacttggctgttgtatcacttcttaacattgttgttgaattgaagaaatgctgcaaccatccattcttgtttgaaagtgccgatcatggttatggtggagatagcatcggtgatcggaataaagttgaacgtattgttatgagtagtgggaaacttgtcttgttggacaaactattggtgagactgcgggagactaaccatcgtgtgcttatattctcacagatggttaagatgttggacatccttgcagaatacctctctcttcggggatttcagtttcagaggcttgatggtagtacaagagcagatcttcgtcatcaagccatggaacactttaatgctcctggaagtgatgatttctgttttcttttatccacacgtgccggaggacttggtattaatctagcaactgcagatacagtgataatttttgattcagattggaatccacaaaatgatttgcaggttcttgatcacttggtcattcagaagctaaacgctgagggcaggcttgagaagaaagaatccaaaaaaggtggccccatatttgacaagaacgaactttcagctatcttgaggttcggtgcagaggaattgttcaaggaagacaagactgatgaagagaccaagaggaaccttgaaagtttggacattgatgaaattcttgagagagctgagaaagtcgagacaaagggtggtgaaggggaggaaggaaatgagcttcttagcgctttcaaggtcgcaaacttttccagtgtcgaagatgatgcaacgttctggagtaggttaatacagccagatcctgcagatatagttcaggaaactttggcacctcgtgctgcacgaaataaaaagagctatattgaagatcctcagcttgacaaaaataataacaggaaaagacgggcagttgaaacacaagaaaagccaaggaggctttctggcagaactgtggaaacagttaattcattaccattggttgatggagcagtagctcaagtacgagagtggtcttttggtaatgttccaaagaaggacgcttctcgttttgtacgagcggtcaaaaaatttgggaatgcaacccagattggattaattgtggatgatgttggtggtgtacttgcgaaggtaccgcatgaagcgcagatagaactatttgatttgctggttgatggttgtcaggaagcagttaaggagaatacagacattaagggcacagttttggattttttcggtgtagctgtaaaggcctatgaattgctagctcgtgttgaagagcttcagttcttggcaaagcgaattgcacgttacaaagatccaatcaagcagtaccgcatccagctaccttataaaaagcctcagtggtcagcaagctgtggatggactgaaactgatgacgctagattgatggttggaattcattggtatggctacgggaattgggagaaaataaggttggatccaaagcttggcctgacaacaaaaattgcgccagcaacacttggagaaagggagacatttttaccacgtgctcccaacttggataaccgcgctagtgctctcctgcaaaaggagtatgctaagtttagcggtaagagcttaaaagtcaaaggaaacacccgccagacagtcaataacgacagtaatagtggagttcgatcaatgaggggccggcaaaaggatgtaccagaaaaagatgataataagccgaacaaagatgacattcagaagcgtagggtaatagtggaagctgaagcaagagaagaaggtgaaatttctgaatcggaggcagagaccaggtatcgtcaggacaaagaggagaagtggcttgaatggtgctctgaagttttagatgaggagcaggaaactttgaagcgcctggataggctgcagaatacaagtgtaaacctcccaaaggaaaaggttctttcaaggattcgcaagtatctcctgataattggggacaaaattggagaagttgtccggcaacacagtgaatcttataggcaatcccgcatggtcatgaggttatggaattatgttgccaccttttcaaacatgtctggggagcaactgcatgatctctatatgaaacttagtcaagaccaactggaaggtggagttggcccatctcatggtggcaatttcacatccattcctcccaataagggaggtaactcaaatcaacttcatccttcgagaaaccaaaggccaactaggtctctccagtacaattctgagtctttccataatgagagctctggaagttctgaagcctggaagcgtcgacggagagctgacacagataatcaatttgacacccagcctttgtgtcaacctccaattatgacaaatggaaataggttgcaggaatctagtagttctgcaggtattcttggttggggtccagttgaaattagacggtatggtaatgagaggccaaaacgtgctgttcatcctagtcatttccctactgggcatggacctttgctgtagctgaaggaagtagatgatgcgaacaaccttgttcattttggcataaccgttcccagtgaatttcagcttccatatagttataaatggtggatctccgtaggaattgaaattctttttccaaaacaaaaaggaataaagagcaacctcacctggatcacagttttgaattatatgccttaaaaggtaatgccaggactctagaggcgacttatggaattgttaacagctacactgaatatccttctgacaccatcacagcaacacaaatacatggtggcttgtgaactgccaagaggatcaatcgaggaagttttgcctgttcagttttgtgatctctcaacaatgatctatagttaaatctcaatacataaattatgctttacattgtaatatattgaaatatggttccgttatgctccctccctctcgatgtgttttgtgccgtttttctaccgtgttgatgtaaaagatgaaagaaatgcatgttctcattttgaggcaacaaaaagttgcagccgggagcataatagtgaaatgcgatggaattatcggatacttatcgattccatagtgttttccctgagacaatgtactgaatgaggtacggttataagaaatggtgataattagcttagtaggtgctcagccattctacaagtcatctggtagtccgaagttgcatgaggcctactttcccctggttgccccacttatgctcagtaagtatgcttctagggttgtatgatgatggcccaattgaatttttaatcctgtgtatgaatggtgatggccaaacacttaaatgtagcactgatttaataataggtaccagttttgtcctttttcaattctgttttctgttggtgttcaaaatgtatataattttaaaaaaggta

SEQ ID NO: 27494 - DNA, 3283 bp, Zea Mays
ttatttttttatgtgaatagatacaaaacaaaattacaacctatatttagagaactattggagaactcacatttttttactccaaaagccatttagcaacttcttaaatctataatttagagagctaaaatttagctaactattggagttgctctagagccaacatcgtttcagagtcccatctgaactccgtagcgtgatagcagagggcggcagcagcagcaaatccctgctccttcctcctccccggccccaaaaccgcacaaacccctgctcctcctcccgccgccgccgccgccggggcacgccgggatgcagaagccagtggcctccgtcgtctccctatgtccgcagctatggcaccgccacttccgtcgcgctcccctcctcccccgcgcccgcggcctcccctcctcctctcctatcctcacacgccgccgctccgtactcccccgttccacttccactcacctcgccgcggtgtcaaccgctgccgccgccgccgccgccccatcagccacaccgtacccagtgtacgatcggcttctgccgtgccccttgcaggacgaccctccgagaatcgagcacctcgtggctcgggaggacgaggtggcagccgatttcatcgccaggtcgctcggcctgcctcctctacctcatcgagttcggtgctgtgtactacgcgctcgtcgccccgcagccgcctccctacgcttctccggagcattttaggctctttcgggaagtcaccgagccttccgtcctgcgccggagggcgtccatcaaggggaagacggtgagggaggctcagaagacgttccgggtgacggaccccaaccagcgcctcgaggccggcacctacctgcgggttcatgtgcatcctaaacggtttccaaggtgctatcaaattgactggaaatccagggtaatagcagtcgctgatgaatacgttgttcttgataaacctgccgcaacatcagtatgttcctctttaccttccactttctcgtttgttggtggtttacgggctctaaatttcttagatagttcatgtcgtatcatggaatgcgtgtctgcaacattggcccttcactttgttgaacatagtcttcatgtctttaactcgatgtcgtttgagtcccctatgaattatgatattgatttttctttcaccattaggttatctgcacagaataaaattcacatccactaatatgagtatgtacaatgtactaccactgcaacatttgacgcagccagaagcacgagttcttggtgaagcaagttttggtttattggatgttgtaggcagctaagttacaaatgaccagtcagtcgctaggttacggttgaacttttctgagtttcagatgataacaacaggtgaattttgaacctttaggtgggcggagcaactgataacattgaggaatcctgtgcagtctttacttcgcgtgcattaggattggaaacgccattgctgacgactcaccagattgacaactgctctgaaggctggtttgtctatcactttatttgtatatacttatttgctaaaatgtgggaataggcaagcaatgtcatcctttttcgaaactttgcagtgtggtactatctaaaacgaaagagttctgctctgttttccatggactgataagggagaaacaggttaaaaaactctatcttgcacttactacagcacctgtgtcaacaggaacgattacccattatatgcgcccagttaatcgcgctcctagattagtttctgaaggtaatcttgaactgaaattgttgcttctatatggttactagttcggccaatatgcgttttgtgctttgatgctggcactgttgtcctgacttcaagcatgcatatatctgggtcaggaatattattcatttttgggtgtcgtgaaactgtgtgctctctttatgaacatatgtgcacactgaccaccttttgttgatgctgtggccgctactgaagatagtgaaatgtgaatcagcagtttatatctaaaactcgttgattctgcatcaatcgtgtgcatgttgccttctattgttcttaaccactgttttgttgttaataaactctagaagatgaatgatgcataaactcatggcctgaatgcttccaccagaagttttaaataaccttcttgttttagtgtactgcgttttagttgttacattggaatcctttgttggtacattgatgttcttcttacttaaccagactgtattgaaagatggcatctctgtcaaatggaggtactcgattgtagcaaggtaccatggccaagctcttcgatcaggaaagcttacaatgtaaatggttgtgggtggccacagcaagaagctgcttacgaatgtaaaatcaatctcttgacagggaaaactcaccagataagggcacagcttgctgctataggcgctcctattataggggattctgcatacatgactgcagcaatggcagcgatggccaacccaagcataaacccattcggtagagagaggctgagttacaacagtgaagaggagaaagaagccgccgtcgaagcatggattgcctcccacgggaaggaaccaaaatccgtaattgggctgcaagcgtcagagatctcttgggatcacgagggcaagcaccattcttacaaggctggagttccgtggtggtggcaggatcctgactcctgagtgcgatggtggattggatgggggagttccatatgaacccctggaatctcgcctttttagaggacagatgtttttctacattgttccgagtgctgagcgaccactgtccaacacgaacattggtttggtttggttgctgcgcagaaattgttgggtcaccgaaaactgaatttgggcttgggagatgaaactaagcccgagtctgagctctcgaccaggccaacacgaacaccacaccagagctccttcaactgggaaaagcagatccaggccaacacgaacattgctttgctgttcattctagggcatgcaacgtcattcgttctatgactgtagctgtatggttgtgtgcaaggcctagcttctatttgggacagctctcaataatattccctggagattgagttggggtgagaccgtctctcataaagtcagtgaccgaaacatcaaattttttaaaggcaagcatcttaaaatcgataatggggcgtttggatccctcatttaataggaattgaagttcacttaacaaagtaacctatttgccttatttgccttaattggtatatgtcaaacgatc

SEQ ID NO: 27495 - DNA, 2314 bp, Zea Mays
ttatttttttatgtgaatagatacaaaacaaaattacaacctatatttagagaactattggagaactcacatttttttactccaaaagccatttagcaacttcttaaatctataatttagagagctaaaatttagctaactattggagttgctctagagccaacatcgtttcagagtcccatctgaactccgtagcgtgatagcagagggcggcagcagcagcaaatccctgctccttcctcctccccggccccaaaaccgcacaaacccctgctcctcctcccgccgccgccgccgccggggcacgccgggatgcagaagccagtggcctccgtcgtctccctatgtccgcagctatggcaccgccacttccgtcgcgctcccctcctcccccgcgcccgcggcctcccctcctcctctcctatcctcacacgccgccgctccgtactcccccgttccacttccactcacctcgccgcggtgtcaaccgctgccgccgccgccgccgccccatcagccacaccgtacccagtgtacgatcggcttctgccgtgccccttgcaggacgaccctccgagaatcgagcacctcgtggctcgggaggacgaggtggcagccgatttcatcgccaggtcgctcggcctgcctcctctgtatgctgcagacctcatcgagttcggtgctgtgtactacgcgctcgtcgccccgcagccgcctccctacgcttctccggagcattttaggctctttcgggaagtcaccgagccttccgtcctgcgccggagggcgtccatcaaggggaagacggtgagggaggctcagaagacgttccgggtgacggaccccaaccagcgcctcgaggccggcacctacctgcgggttcatgtgcatcctaaacggtttccaaggtgctatcaaattgactggaaatccagggtaatagcagtcgctgatgaatacgttgttcttgataaacctgccgcaacatcatctttacttcgcgtgcattaggattggaaacgccattgctgacgactcaccagattgacaactgctctgaaggctggtttgtctatcactttatttgtatatacttatttgctaaaatgtgggaataggcaagcaatgtcatcctttttcgaaactttgcagtgtggtactatctaaaacgaaagagttctgctctgttttccatggactgataagggagaaacaggttaaaaaactctatcttgcacttactacagcacctgtgtcaacaggaacgattacccattatatgcgcccagttaatcgcgctcctagattagtttctgaagcaaggtaccatggccaagctcttcgatcaggaaagcttacaatgtaaatggttgtgggtggccacagcaagaagctgcttacgaatgtaaaatcaatctcttgacagggaaaactcaccagataagggcacagcttgctgctataggcgctcctattataggggattctgcatacatgactgcagcaatggcagcgatggccaacccaagcataaacccattcggtagagagaggctgagttacaacagtgaagaggagaaagaagccgccgtcgaagcatggattgcctcccacgggaaggaaccaaaatccgtaattgggctgcaagcgtcagagatctcttgggatcacgagggcaagcaccattcttacaaggctggagttccgtggtggtggcaggatcctgactcctgagtgcgatggtggattggatgggggagttccatatgaacccctggaatctcgcctttttagaggacagatgtttttctacattgttccgagtgctgagcgaccactgtccaacacgaacattggtttggtttggttgctgcgcagaaattgttgggtcaccgaaaactgaatttgggcttgggagatgaaactaagcccgagtctgagctctcgaccaggccaacacgaacaccacaccagagctccttcaactgggaaaagcagatccaggccaacacgaacattgctttgctgttcattctagggcatgcaacgtcattcgttctatgactgtagctgtatggttgtgtgcaaggcctagcttctatttgggacagctctcaataatattccctggagattgagttggggtgagaccgtctctcataaagtcagtgaccgaaacatcaaattttttaaaggcaagcatcttaaaatcgataatggggcgtttggatccctcatttaataggaattgaagttcacttaacaaagtaacctatttgccttatttgccttaattggtatatgtcaaacgatc

SEQ ID NO: 27496 - DNA, 2446 bp, Zea Mays
ttatttttttatgtgaatagatacaaaacaaaattacaacctatatttagagaactattggagaactcacatttttttactccaaaagccatttagcaacttcttaaatctataatttagagagctaaaatttagctaactattggagttgctctagagccaacatcgtttcagagtcccatctgaactccgtagcgtgatagcagagggcggcagcagcagcaaatccctgctccttcctcctccccggccccaaaaccgcacaaacccctgctcctcctcccgccgccgccgccgccggggcacgccgggatgcagaagccagtggcctccgtcgtctccctatgtccgcagctatggcaccgccacttccgtcgcgctcccctcctcccccgcgcccgcggcctcccctcctcctctcctatcctcacacgccgccgctccgtactcccccgttccacttccactcacctcgccgcggtgtcaaccgctgccgccgccgccgccgccccatcagccacaccgtacccagtgtacgatcggcttctgccgtgccccttgcaggacgaccctccgagaatcgagcacctcgtggctcgggaggacgaggtggcagccgatttcatcgccaggtcgctcggcctgcctcctctgtatgctgcagacctcatcgagttcggtgctgtgtactacgcgctcgtcgccccgcagccgcctccctacgcttctccggagcattttaggctctttcgggaagtcaccgagccttccgtcctgcgccggagggcgtccatcaaggggaagacggtgagggaggctcagaagacgttccgggtgacggaccccaaccagcgcctcgaggccggcacctacctgcgggttcatgtgcatcctaaacggtttccaaggtgctatcaaattgactggaaatccagggtaatagcagtcgctgatgaatacgttgttcttgataaacctgccgcaacatcagtgaattttgaacctttaggtgggcggagcaactgataacattgaggaatcctgtgcagtctttacttcgcgtgcattaggattggaaacgccattgctgacgactcaccagattgacaactgctctgaaggctgtgtggtactatctaaaacgaaagagttctgctctgttttccatggactgataagggagaaacaggttaaaaaactctatcttgcacttactacagcacctgtgtcaacaggaacgattacccattatatgcgcccagttaatcgcgctcctagattagtttctgaaggaatattattcatttttgggtgtcgtgaaactgtgtgctctctttatgaacatatgtgcacactgaccaccttttgttgatgctgtggccgctactgaagatagtgaaatactgtattgaaagatggcatctctgtcaaatggaggtactcgattgtagcaaggtaccatggccaagctcttcgatcaggaaagcttacaatgtaaatggttgtgggtggccacagcaagaagctgcttacgaatgtaaaatcaatctcttgacagggaaaactcaccagataagggcacagcttgctgctataggcgctcctattataggggattctgcatacatgactgcagcaatggcagcgatggccaacccaagcataaacccattcggtagagagaggctgagttacaacagtgaagaggagaaagaagccgccgtcgaagcatggattgcctcccacgggaaggaaccaaaatccgtaattgggctgcaagcgtcagagatctcttgggatcacgagggcaagcaccattcttacaaggctggagttccgtggtggtggcaggatcctgactcctgagtgcgatggtggattggatgggggagttccatatgaacccctggaatctcgcctttttagaggacagatgtttttctacattgttccgagtgctgagcgaccactgtccaacacgaacattggtttggtttggttgctgcgcagaaattgttgggtcaccgaaaactgaatttgggcttgggagatgaaactaagcccgagtctgagctctcgaccaggccaacacgaacaccacaccagagctccttcaactgggaaaagcagatccaggccaacacgaacattgctttgctgttcattctagggcatgcaacgtcattcgttctatgactgtagctgtatggttgtgtgcaaggcctagcttctatttgggacagctctcaataatattccctggagattgagttggggtgagaccgtctctcataaagtcagtgaccgaaacatcaaattttttaaaggcaagcatcttaaaatcgataatggggcgtttggatccctcatttaataggaattgaagttcacttaacaaagtaacctatttgccttatttgccttaattggtatatgtcaaacgatc

SEQ ID NO: 27497 - DNA, 2781 bp, Zea Mays
ttatttttttatgtgaatagatacaaaacaaaattacaacctatatttagagaactattggagaactcacatttttttactccaaaagccatttagcaacttcttaaatctataatttagagagctaaaatttagctaactattggagttgctctagagccaacatcgtttcagagtcccatctgaactccgtagcgtgatagcagagggcggcagcagcagcaaatccctgctccttcctcctccccggccccaaaaccgcacaaacccctgctcctcctcccgccgccgccgccgccggggcacgccgggatgcagaagccagtggcctccgtcgtctccctatgtccgcagctatggcaccgccacttccgtcgcgctcccctcctcccccgcgcccgcggcctcccctcctcctctcctatcctcacacgccgccgctccgtactcccccgttccacttccactcacctcgccgcggtgtcaaccgctgccgccgccgccgccgccccatcagccacaccgtacccagtgtacgatcggcttctgccgtgccccttgcaggacgaccctccgagaatcgagcacctcgtggctcgggaggacgaggtggcagccgatttcatcgccaggtcgctcggcctgcctcctctgtatgctgcagacctcatcgagttcggtgctgtgtactacgcgctcgtcgccccgcagccgcctccctacgcttctccggagcattttaggctctttcgggaagtcaccgagccttccgtcctgcgccggagggcgtccatcaaggggaagacggtgagggaggctcagaagacgttccgggtgacggaccccaaccagcgcctcgaggccggcacctacctgcgggttcatgtgcatcctaaacggtttccaaggtgctatcaaattgactggaaatccagggtaatagcagtcgctgatgaatacgttgttcttgataaacctgccgcaacatcagtgggcggagcaactgataacattgaggaatcctgtgcagtctttacttcgcgtgcattaggattggaaacgccattgctgacgactcaccagattgacaactgctctgaagtgtggtactatctaaaacgaaagagttctgctctgttttccatggactgataagggagaaacaggttaaaaaactctatcttgcacttactacagcacctgtgtcaacaggaacgattacccattatatgcgcccagttaatcgcgctcctagattagtttctgaaggtaatcttgaactgaaattgttgcttctatatggttactagttcggccaatatgcgttttgtgctttgatgctggcactgttgtcctgacttcaagcatgcatatatctgggtcaggaatattattcatttttgggtgtcgtgaaactgtgtgctctctttatgaacatatgtgcacactgaccaccttttgttgatgctgtggccgctactgaagatagtgaaatgtgaatcagcagtttatatctaaaactcgttgattctgcatcaatcgtgtgcatgttgccttctattgttcttaaccactgttttgttgttaataaactctagaagatgaatgatgcataaactcatggcctgaatgcttccaccagaagttttaaataaccttcttgttttagtgtactgcgttttagttgttacattggaatcctttgttggtacattgatgttcttcttacttaaccagactgtattgaaagatggcatctctgtcaaatggaggtactcgattgtagcaaggtaccatggccaagctcttcgatcaggaaagcttacaatgtaaatggttgtgggtggccacagcaagaagctgcttacgaatgtaaaatcaatctcttgacagggaaaactcaccagataagggcacagcttgctgctataggcgctcctattataggggattctgcatacatgactgcagcaatggcagcgatggccaacccaagcataaacccattcggtagagagaggctgagttacaacagtgaagaggagaaagaagccgccgtcgaagcatggattgcctcccacgggaaggaaccaaaatccgtaattgggctgcaagcgtcagagatctcttgggatcacgagggcaagcaccattcttacaaggctggagttccgtggtggtggcaggatcctgactcctgagtgcgatggtggattggatgggggagttccatatgaacccctggaatctcgcctttttagaggacagatgtttttctacattgttccgagtgctgagcgaccactgtccaacacgaacattggtttggtttggttgctgcgcagaaattgttgggtcaccgaaaactgaatttgggcttgggagatgaaactaagcccgagtctgagctctcgaccaggccaacacgaacaccacaccagagctccttcaactgggaaaagcagatccaggccaacacgaacattgctttgctgttcattctagggcatgcaacgtcattcgttctatgactgtagctgtatggttgtgtgcaaggcctagcttctatttgggacagctctcaataatattccctggagattgagttggggtgagaccgtctctcataaagtcagtgaccgaaacatcaaattttttaaaggcaagcatcttaaaatcgataatggggcgtttggatccctcatttaataggaattgaagttcacttaacaaagtaacctatttgccttatttgccttaattggtatatgtcaaacgatc

SEQ ID NO: 27498 - DNA, 2646 bp, Zea Mays
ttatttttttatgtgaatagatacaaaacaaaattacaacctatatttagagaactattggagaactcacatttttttactccaaaagccatttagcaacttcttaaatctataatttagagagctaaaatttagctaactattggagttgctctagagccaacatcgtttcagagtcccatctgaactccgtagcgtgatagcagagggcggcagcagcagcaaatccctgctccttcctcctccccggccccaaaaccgcacaaacccctgctcctcctcccgccgccgccgccgccggggcacgccgggatgcagaagccagtggcctccgtcgtctccctatgtccgcagctatggcaccgccacttccgtcgcgctcccctcctcccccgcgcccgcggcctcccctcctcctctcctatcctcacacgccgccgctccgtactcccccgttccacttccactcacctcgccgcggtgtcaaccgctgccgccgccgccgccgccccatcagccacaccgtacccagtgtacgatcggcttctgccgtgccccttgcaggacgaccctccgagaatcgagcacctcgtggctcgggaggacgaggtggcagccgatttcatcgccaggtcgctcggcctgcctcctctgtatgctgcagacctcatcgagttcggtgctgtgtactacgcgctcgtcgccccgcagccgcctccctacgcttctccggagcattttaggctctttcgggaagtcaccgagccttccgtcctgcgccggagggcgtccatcaaggggaagacggtgagggaggctcagaagacgttccgggtgacggaccccaaccagcgcctcgaggccggcacctacctgcgggttcatgtgcatcctaaacggtttccaaggtgctatcaaattgactggaaatccagggtaatagcagtcgctgatgaatacgttgttcttgataaacctgccgcaacatcagttatctgcacagaataaaattcacatccactaatatgagtatgtacaatgtactaccactgcaacatttgacgcagccagaagcacgagttcttggtgaagcaagttttggtttattggatgttgtaggcagctaagttacaaatgaccagtcagtcgctaggttacggttgaacttttctgagtttcagatgataacaacaggtgaattttgaacctttaggtgggcggagcaactgataacattgaggaatcctgtgcagtctttacttcgcgtgcattaggattggaaacgccattgctgacgactcaccagattgacaactgctctgaagtgtggtactatctaaaacgaaagagttctgctctgttttccatggactgataagggagaaacaggttaaaaaactctatcttgcacttactacagcacctgtgtcaacaggaacgattacccattatatgcgcccagttaatcgcgctcctagattagtttctgaaggaatattattcatttttgggtgtcgtgaaactgtgtgctctctttatgaacatatgtgcacactgaccaccttttgttgatgctgtggccgctactgaagatagtgaaatactgtattgaaagatggcatctctgtcaaatggaggtactcgattgtagcaaggtaccatggccaagctcttcgatcaggaaagcttacaatgtaaatggttgtgggtggccacagcaagaagctgcttacgaatgtaaaatcaatctcttgacagggaaaactcaccagataagggcacagcttgctgctataggcgctcctattataggggattctgcatacatgactgcagcaatggcagcgatggccaacccaagcataaacccattcggtagagagaggctgagttacaacagtgaagaggagaaagaagccgccgtcgaagcatggattgcctcccacgggaaggaaccaaaatccgtaattgggctgcaagcgtcagagatctcttgggatcacgagggcaagcaccattcttacaaggctggagttccgtggtggtggcaggatcctgactcctgagtgcgatggtggattggatgggggagttccatatgaacccctggaatctcgcctttttagaggacagatgtttttctacattgttccgagtgctgagcgaccactgtccaacacgaacattggtttggtttggttgctgcgcagaaattgttgggtcaccgaaaactgaatttgggcttgggagatgaaactaagcccgagtctgagctctcgaccaggccaacacgaacaccacaccagagctccttcaactgggaaaagcagatccaggccaacacgaacattgctttgctgttcattctagggcatgcaacgtcattcgttctatgactgtagctgtatggttgtgtgcaaggcctagcttctatttgggacagctctcaataatattccctggagattgagttggggtgagaccgtctctcataaagtcagtgaccgaaacatcaaattttttaaaggcaagcatcttaaaatcgataatggggcgtttggatccctcatttaataggaattgaagttcacttaacaaagtaacctatttgccttatttgccttaattggtatatgtcaaacgatc

SEQ ID NO: 27499 - DNA, 2850 bp, Zea Mays
ttatttttttatgtgaatagatacaaaacaaaattacaacctatatttagagaactattggagaactcacatttttttactccaaaagccatttagcaacttcttaaatctataatttagagagctaaaatttagctaactattggagttgctctagagccaacatcgtttcagagtcccatctgaactccgtagcgtgatagcagagggcggcagcagcagcaaatccctgctccttcctcctccccggccccaaaaccgcacaaacccctgctcctcctcccgccgccgccgccgccggggcacgccgggatgcagaagccagtggcctccgtcgtctccctatgtccgcagctatggcaccgccacttccgtcgcgctcccctcctcccccgcgcccgcggcctcccctcctcctctcctatcctcacacgccgccgctccgtactcccccgttccacttccactcacctcgccgcggtgtcaaccgctgccgccgccgccgccgccccatcagccacaccgtacccagtgtacgatcggcttctgccgtgccccttgcaggacgaccctccgagaatcgagcacctcgtggctcgggaggacgaggtggcagccgatttcatcgccaggtcgctcggcctgcctcctctgtatgctgcagacctcatcgagttcggtgctgtgtactacgcgctcgtcgccccgcagccgcctccctacgcttctccggagcattttaggctctttcgggaagtcaccgagccttccgtcctgcgccggagggcgtccatcaaggggaagacggtgagggaggctcagaagacgttccgggtgacggaccccaaccagcgcctcgaggccggcacctacctgcgggttcatgtgcatcctaaacggtttccaaggtgctatcaaattgactggaaatccagggtaatagcagtcgctgatgaatacgttgttcttgataaacctgccgcaacatcagtatgttcctctttaccttccactttctcgtttgttggtggtttacgggctctaaatttcttagatagttcatgtcgtatcatggaatgcgtgtctgcaacattggcccttcactttgttgaacatagtcttcatgtctttaactcgatgtcgtttgagtcccctatgaattatgatattgatttttctttcaccattaggttatctgcacagaataaaattcacatccactaatatgagtatgtacaatgtactaccactgcaacatttgacgcagccagaagcacgagttcttggtgaagcaagttttggtttattggatgttgtaggcagctaagttacaaatgaccagtcagtcgctaggttacggttgaacttttctgagtttcagatgataacaacaggtgaattttgaacctttaggtgggcggagcaactgataacattgaggaatcctgtgcagtctttacttcgcgtgcattaggattggaaacgccattgctgacgactcaccagattgacaactgctctgaaggctgtgtggtactatctaaaacgaaagagttctgctctgttttccatggactgataagggagaaacaggttaaaaaactctatcttgcacttactacagcacctgtgtcaacaggaacgattacccattatatgcgcccagttaatcgcgctcctagattagtttctgaaggaatattattcatttttgggtgtcgtgaaactgtgtgctctctttatgaacatatgtgcacactgaccaccttttgttgatgctgtggccgctactgaagatagtgaaatactgtattgaaagatggcatctctgtcaaatggaggtactcgattgtagcaaggtaccatggccaagctcttcgatcaggaaagcttacaatgtaaatggttgtgggtggccacagcaagaagctgcttacgaatgtaaaatcaatctcttgacagggaaaactcaccagataagggcacagcttgctgctataggcgctcctattataggggattctgcatacatgactgcagcaatggcagcgatggccaacccaagcataaacccattcggtagagagaggctgagttacaacagtgaagaggagaaagaagccgccgtcgaagcatggattgcctcccacgggaaggaaccaaaatccgtaattgggctgcaagcgtcagagatctcttgggatcacgagggcaagcaccattcttacaaggctggagttccgtggtggtggcaggatcctgactcctgagtgcgatggtggattggatgggggagttccatatgaacccctggaatctcgcctttttagaggacagatgtttttctacattgttccgagtgctgagcgaccactgtccaacacgaacattggtttggtttggttgctgcgcagaaattgttgggtcaccgaaaactgaatttgggcttgggagatgaaactaagcccgagtctgagctctcgaccaggccaacacgaacaccacaccagagctccttcaactgggaaaagcagatccaggccaacacgaacattgctttgctgttcattctagggcatgcaacgtcattcgttctatgactgtagctgtatggttgtgtgcaaggcctagcttctatttgggacagctctcaataatattccctggagattgagttggggtgagaccgtctctcataaagtcagtgaccgaaacatcaaattttttaaaggcaagcatcttaaaatcgataatggggcgtttggatccctcatttaataggaattgaagttcacttaacaaagtaacctatttgccttatttgccttaattggtatatgtcaaacgatc

SEQ ID NO: 27500 - DNA, 2729 bp, Zea Mays
ttatttttttatgtgaatagatacaaaacaaaattacaacctatatttagagaactattggagaactcacatttttttactccaaaagccatttagcaacttcttaaatctataatttagagagctaaaatttagctaactattggagttgctctagagccaacatcgtttcagagtcccatctgaactccgtagcgtgatagcagagggcggcagcagcagcaaatccctgctccttcctcctccccggccccaaaaccgcacaaacccctgctcctcctcccgccgccgccgccgccggggcacgccgggatgcagaagccagtggcctccgtcgtctccctatgtccgcagctatggcaccgccacttccgtcgcgctcccctcctcccccgcgcccgcggcctcccctcctcctctcctatcctcacacgccgccgctccgtactcccccgttccacttccactcacctcgccgcggtgtcaaccgctgccgccgccgccgccgccccatcagccacaccgtacccagtgtacgatcggcttctgccgtgccccttgcaggacgaccctccgagaatcgagcacctcgtggctcgggaggacgaggtggcagccgatttcatcgccaggtcgctcggcctgcctcctctacctcatcgagttcggtgctgtgtactacgcgctcgtcgccccgcagccgcctccctacgcttctccggagcattttaggctctttcgggaagtcaccgagccttccgtcctgcgccggagggcgtccatcaaggggaagacggtgagggaggctcagaagacgttccgggtgacggaccccaaccagcgcctcgaggccggcacctacctgcgggttcatgtgcatcctaaacggtttccaaggtgctatcaaattgactggaaatccagggtaatagcagtcgctgatgaatacgttgttcttgataaacctgccgcaacatcagtatgttcctctttaccttccactttctcgtttgttggtggtttacgggctctaaatttcttagatagttcatgtcgtatcatggaatgcgtgtctgcaacattggcccttcactttgttgaacatagtcttcatgtctttaactcgatgtcgtttgagtcccctatgaattatgatattgatttttctttcaccattaggttatctgcacagaataaaattcacatccactaatatgagtatgtacaatgtactaccactgcaacatttgacgcagccagaagcacgagttcttggtgaagcaagttttggtttattggatgttgtaggcagctaagttacaaatgaccagtcagtcgctaggttacggttgaacttttctgagtttcagatgataacaacaggtgaattttgaacctttaggtgggcggagcaactgataacattgaggaatcctgtgcagtctttacttcgcgtgcattaggattggaaacgccattgctgacgactcaccagattgacaactgctctgaaggctgtgtggtactatctaaaacgaaagagttctgctctgttttccatggactgataagggagaaacaggttaaaaaactctatcttgcacttactacagcacctgtgtcaacaggaacgattacccattatatgcgcccagttaatcgcgctcctagattagtttctgaagactgtattgaaagatggcatctctgtcaaatggaggtactcgattgtagcaaggtaccatggccaagctcttcgatcaggaaagcttacaatgtaaatggttgtgggtggccacagcaagaagctgcttacgaatgtaaaatcaatctcttgacagggaaaactcaccagataagggcacagcttgctgctataggcgctcctattataggggattctgcatacatgactgcagcaatggcagcgatggccaacccaagcataaacccattcggtagagagaggctgagttacaacagtgaagaggagaaagaagccgccgtcgaagcatggattgcctcccacgggaaggaaccaaaatccgtaattgggctgcaagcgtcagagatctcttgggatcacgagggcaagcaccattcttacaaggctggagttccgtggtggtggcaggatcctgactcctgagtgcgatggtggattggatgggggagttccatatgaacccctggaatctcgcctttttagaggacagatgtttttctacattgttccgagtgctgagcgaccactgtccaacacgaacattggtttggtttggttgctgcgcagaaattgttgggtcaccgaaaactgaatttgggcttgggagatgaaactaagcccgagtctgagctctcgaccaggccaacacgaacaccacaccagagctccttcaactgggaaaagcagatccaggccaacacgaacattgctttgctgttcattctagggcatgcaacgtcattcgttctatgactgtagctgtatggttgtgtgcaaggcctagcttctatttgggacagctctcaataatattccctggagattgagttggggtgagaccgtctctcataaagtcagtgaccgaaacatcaaattttttaaaggcaagcatcttaaaatcgataatggggcgtttggatccctcatttaataggaattgaagttcacttaacaaagtaacctatttgccttatttgccttaattggtatatgtcaaacgatc

SEQ ID NO: 27501 - DNA, 2303 bp, Zea Mays
ttatttttttatgtgaatagatacaaaacaaaattacaacctatatttagagaactattggagaactcacatttttttactccaaaagccatttagcaacttcttaaatctataatttagagagctaaaatttagctaactattggagttgctctagagccaacatcgtttcagagtcccatctgaactccgtagcgtgatagcagagggcggcagcagcagcaaatccctgctccttcctcctccccggccccaaaaccgcacaaacccctgctcctcctcccgccgccgccgccgccggggcacgccgggatgcagaagccagtggcctccgtcgtctccctatgtccgcagctatggcaccgccacttccgtcgcgctcccctcctcccccgcgcccgcggcctcccctcctcctctcctatcctcacacgccgccgctccgtactcccccgttccacttccactcacctcgccgcggtgtcaaccgctgccgccgccgccgccgccccatcagccacaccgtacccagtgtacgatcggcttctgccgtgccccttgcaggacgaccctccgagaatcgagcacctcgtggctcgggaggacgaggtggcagccgatttcatcgccaggtcgctcggcctgcctcctctgtgagcacgcctctcacgaactcccagtatgctgcagacctcatcgagttcggtgctgtgtactacgcgctcgtcgccccgcagccgcctccctacgcttctccggagcattttaggctctttcgggaagtcaccgagccttccgtcctgcgccggagggcgtccatcaaggggaagacggtgagggaggctcagaagacgttccgggtgacggaccccaaccagcgcctcgaggccggcacctacctgcgggttcatgtgcatcctaaacggtttccaaggtgctatcaaattgactggaaatccagggtaatagcagtcgctgatgaatacgttgttcttgataaacctgccgcaacatcatctttacttcgcgtgcattaggattggaaacgccattgctgacgactcaccagattgacaactgctctgaaggctgtgtggtactatctaaaacgaaagagttctgctctgttttccatggactgataagggagaaacaggttaaaaaactctatcttgcacttactacagcacctgtgtcaacaggaacgattacccattatatgcgcccagttaatcgcgctcctagattagtttctgaagactgtattgaaagatggcatctctgtcaaatggaggtactcgattgtagcaaggtaccatggccaagctcttcgatcaggaaagcttacaatgtaaatggttgtgggtggccacagcaagaagctgcttacgaatgtaaaatcaatctcttgacagggaaaactcaccagataagggcacagcttgctgctataggcgctcctattataggggattctgcatacatgactgcagcaatggcagcgatggccaacccaagcataaacccattcggtagagagaggctgagttacaacagtgaagaggagaaagaagccgccgtcgaagcatggattgcctcccacgggaaggaaccaaaatccgtaattgggctgcaagcgtcagagatctcttgggatcacgagggcaagcaccattcttacaaggctggagttccgtggtggtggcaggatcctgactcctgagtgcgatggtggattggatgggggagttccatatgaacccctggaatctcgcctttttagaggacagatgtttttctacattgttccgagtgctgagcgaccactgtccaacacgaacattggtttggtttggttgctgcgcagaaattgttgggtcaccgaaaactgaatttgggcttgggagatgaaactaagcccgagtctgagctctcgaccaggccaacacgaacaccacaccagagctccttcaactgggaaaagcagatccaggccaacacgaacattgctttgctgttcattctagggcatgcaacgtcattcgttctatgactgtagctgtatggttgtgtgcaaggcctagcttctatttgggacagctctcaataatattccctggagattgagttggggtgagaccgtctctcataaagtcagtgaccgaaacatcaaattttttaaaggcaagcatcttaaaatcgataatggggcgtttggatccctcatttaataggaattgaagttcacttaacaaagtaacctatttgccttatttgccttaattggtatatgtcaaacgatc

SEQ ID NO: 27502 - DNA, 2306 bp, Zea Mays
ttatttttttatgtgaatagatacaaaacaaaattacaacctatatttagagaactattggagaactcacatttttttactccaaaagccatttagcaacttcttaaatctataatttagagagctaaaatttagctaactattggagttgctctagagccaacatcgtttcagagtcccatctgaactccgtagcgtgatagcagagggcggcagcagcagcaaatccctgctccttcctcctccccggccccaaaaccgcacaaacccctgctcctcctcccgccgccgccgccgccggggcacgccgggatgcagaagccagtggcctccgtcgtctccctatgtccgcagctatggcaccgccacttccgtcgcgctcccctcctcccccgcgcccgcggcctcccctcctcctctcctatcctcacacgccgccgctccgtactcccccgttccacttccactcacctcgccgcggtgtcaaccgctgccgccgccgccgccgccccatcagccacaccgtacccagtgtacgatcggcttctgccgtgccccttgcaggacgaccctccgagaatcgagcacctcgtggctcgggaggacgaggtggcagccgatttcatcgccaggtcgctcggcctgcctcctctacctcatcgagttcggtgctgtgtactacgcgctcgtcgccccgcagccgcctccctacgcttctccggagcattttaggctctttcgggaagtcaccgagccttccgtcctgcgccggagggcgtccatcaaggggaagacggtgagggaggctcagaagacgttccgggtgacggaccccaaccagcgcctcgaggccggcacctacctgcgggttcatgtgcatcctaaacggtttccaaggtgctatcaaattgactggaaatccagggtaatagcagtcgctgatgaatacgttgttcttgataaacctgccgcaacatcagtgggcggagcaactgataacattgaggaatcctgtgcagtctttacttcgcgtgcattaggattggaaacgccattgctgacgactcaccagattgacaactgctctgaaggctgtgtggtactatctaaaacgaaagagttctgctctgttttccatggactgataagggagaaacaggttaaaaaactctatcttgcacttactacagcacctgtgtcaacaggaacgattacccattatatgcgcccagttaatcgcgctcctagattagtttctgaagactgtattgaaagatggcatctctgtcaaatggaggtactcgattgtagcaaggtaccatggccaagctcttcgatcaggaaagcttacaatgtaaatggttgtgggtggccacagcaagaagctgcttacgaatgtaaaatcaatctcttgacagggaaaactcaccagataagggcacagcttgctgctataggcgctcctattataggggattctgcatacatgactgcagcaatggcagcgatggccaacccaagcataaacccattcggtagagagaggctgagttacaacagtgaagaggagaaagaagccgccgtcgaagcatggattgcctcccacgggaaggaaccaaaatccgtaattgggctgcaagcgtcagagatctcttgggatcacgagggcaagcaccattcttacaaggctggagttccgtggtggtggcaggatcctgactcctgagtgcgatggtggattggatgggggagttccatatgaacccctggaatctcgcctttttagaggacagatgtttttctacattgttccgagtgctgagcgaccactgtccaacacgaacattggtttggtttggttgctgcgcagaaattgttgggtcaccgaaaactgaatttgggcttgggagatgaaactaagcccgagtctgagctctcgaccaggccaacacgaacaccacaccagagctccttcaactgggaaaagcagatccaggccaacacgaacattgctttgctgttcattctagggcatgcaacgtcattcgttctatgactgtagctgtatggttgtgtgcaaggcctagcttctatttgggacagctctcaataatattccctggagattgagttggggtgagaccgtctctcataaagtcagtgaccgaaacatcaaattttttaaaggcaagcatcttaaaatcgataatggggcgtttggatccctcatttaataggaattgaagttcacttaacaaagtaacctatttgccttatttgccttaattggtatatgtcaaacgatc

SEQ ID NO: 27503 - DNA, 2540 bp, Zea Mays
ttatttttttatgtgaatagatacaaaacaaaattacaacctatatttagagaactattggagaactcacatttttttactccaaaagccatttagcaacttcttaaatctataatttagagagctaaaatttagctaactattggagttgctctagagccaacatcgtttcagagtcccatctgaactccgtagcgtgatagcagagggcggcagcagcagcaaatccctgctccttcctcctccccggccccaaaaccgcacaaacccctgctcctcctcccgccgccgccgccgccggggcacgccgggatgcagaagccagtggcctccgtcgtctccctatgtccgcagctatggcaccgccacttccgtcgcgctcccctcctcccccgcgcccgcggcctcccctcctcctctcctatcctcacacgccgccgctccgtactcccccgttccacttccactcacctcgccgcggtgtcaaccgctgccgccgccgccgccgccccatcagccacaccgtacccagtgtacgatcggcttctgccgtgccccttgcaggacgaccctccgagaatcgagcacctcgtggctcgggaggacgaggtggcagccgatttcatcgccaggtcgctcggcctgcctcctctgtatgctgcagacctcatcgagttcggtgctgtgtactacgcgctcgtcgccccgcagccgcctccctacgcttctccggagcattttaggctctttcgggaagtcaccgagccttccgtcctgcgccggagggcgtccatcaaggggaagacggtgagggaggctcagaagacgttccgggtgacggaccccaaccagcgcctcgaggccggcacctacctgcgggttcatgtgcatcctaaacggtttccaaggtgctatcaaattgactggaaatccagggtaatagcagtcgctgatgaatacgttgttcttgataaacctgccgcaacatcagttatctgcacagaataaaattcacatccactaatatgagtatgtacaatgtactaccactgcaacatttgacgcagccagaagcacgagttcttggtgaagcaagttttggtttattggatgttgtaggcagctaagttacaaatgaccagtcagtcgctaggttacggttgaacttttctgagtttcagatgataacaacaggtgaattttgaacctttaggtgggcggagcaactgataacattgaggaatcctgtgcagtctttacttcgcgtgcattaggattggaaacgccattgctgacgactcaccagattgacaactgctctgaaggctgtgtggtactatctaaaacgaaagagttctgctctgttttccatggactgataagggagaaacaggttaaaaaactctatcttgcacttactacagcacctgtgtcaacaggaacgattacccattatatgcgcccagttaatcgcgctcctagattagtttctgaagactgtattgaaagatggcatctctgtcaaatggaggtactcgattgtagcaaggtaccatggccaagctcttcgatcaggaaagcttacaatgtaaatggttgtgggtggccacagcaagaagctgcttacgaatgtaaaatcaatctcttgacagggaaaactcaccagataagggcacagcttgctgctataggcgctcctattataggggattctgcatacatgactgcagcaatggcagcgatggccaacccaagcataaacccattcggtagagagaggctgagttacaacagtgaagaggagaaagaagccgccgtcgaagcatggattgcctcccacgggaaggaaccaaaatccgtaattgggctgcaagcgtcagagatctcttgggatcacgagggcaagcaccattcttacaaggctggagttccgtggtggtggcaggatcctgactcctgagtgcgatggtggattggatgggggagttccatatgaacccctggaatctcgcctttttagaggacagatgtttttctacattgttccgagtgctgagcgaccactgtccaacacgaacattggtttggtttggttgctgcgcagaaattgttgggtcaccgaaaactgaatttgggcttgggagatgaaactaagcccgagtctgagctctcgaccaggccaacacgaacaccacaccagagctccttcaactgggaaaagcagatccaggccaacacgaacattgctttgctgttcattctagggcatgcaacgtcattcgttctatgactgtagctgtatggttgtgtgcaaggcctagcttctatttgggacagctctcaataatattccctggagattgagttggggtgagaccgtctctcataaagtcagtgaccgaaacatcaaattttttaaaggcaagcatcttaaaatcgataatggggcgtttggatccctcatttaataggaattgaagttcacttaacaaagtaacctatttgccttatttgccttaattggtatatgtcaaacgatc

SEQ ID NO: 27504 - DNA, 2273 bp, Zea Mays
ttatttttttatgtgaatagatacaaaacaaaattacaacctatatttagagaactattggagaactcacatttttttactccaaaagccatttagcaacttcttaaatctataatttagagagctaaaatttagctaactattggagttgctctagagccaacatcgtttcagagtcccatctgaactccgtagcgtgatagcagagggcggcagcagcagcaaatccctgctccttcctcctccccggccccaaaaccgcacaaacccctgctcctcctcccgccgccgccgccgccggggcacgccgggatgcagaagccagtggcctccgtcgtctccctatgtccgcagctatggcaccgccacttccgtcgcgctcccctcctcccccgcgcccgcggcctcccctcctcctctcctatcctcacacgccgccgctccgtactcccccgttccacttccactcacctcgccgcggtgtcaaccgctgccgccgccgccgccgccccatcagccacaccgtacccagtgtacgatcggcttctgccgtgccccttgcaggacgaccctccgagaatcgagcacctcgtggctcgggaggacgaggtggcagccgatttcatcgccaggtcgctcggcctgcctcctctgtatgctgcagacctcatcgagttcggtgctgtgtactacgcgctcgtcgccccgcagccgcctccctacgcttctccggagcattttaggctctttcgggaagtcaccgagccttccgtcctgcgccggagggcgtccatcaaggggaagacggtgagggaggctcagaagacgttccgggtgacggaccccaaccagcgcctcgaggccggcacctacctgcgggttcatgtgcatcctaaacggtttccaaggtgctatcaaattgactggaaatccagggtaatagcagtcgctgatgaatacgttgttcttgataaacctgccgcaacatcatctttacttcgcgtgcattaggattggaaacgccattgctgacgactcaccagattgacaactgctctgaagtgtggtactatctaaaacgaaagagttctgctctgttttccatggactgataagggagaaacaggttaaaaaactctatcttgcacttactacagcacctgtgtcaacaggaacgattacccattatatgcgcccagttaatcgcgctcctagattagtttctgaagactgtattgaaagatggcatctctgtcaaatggaggtactcgattgtagcaaggtaccatggccaagctcttcgatcaggaaagcttacaatgtaaatggttgtgggtggccacagcaagaagctgcttacgaatgtaaaatcaatctcttgacagggaaaactcaccagataagggcacagcttgctgctataggcgctcctattataggggattctgcatacatgactgcagcaatggcagcgatggccaacccaagcataaacccattcggtagagagaggctgagttacaacagtgaagaggagaaagaagccgccgtcgaagcatggattgcctcccacgggaaggaaccaaaatccgtaattgggctgcaagcgtcagagatctcttgggatcacgagggcaagcaccattcttacaaggctggagttccgtggtggtggcaggatcctgactcctgagtgcgatggtggattggatgggggagttccatatgaacccctggaatctcgcctttttagaggacagatgtttttctacattgttccgagtgctgagcgaccactgtccaacacgaacattggtttggtttggttgctgcgcagaaattgttgggtcaccgaaaactgaatttgggcttgggagatgaaactaagcccgagtctgagctctcgaccaggccaacacgaacaccacaccagagctccttcaactgggaaaagcagatccaggccaacacgaacattgctttgctgttcattctagggcatgcaacgtcattcgttctatgactgtagctgtatggttgtgtgcaaggcctagcttctatttgggacagctctcaataatattccctggagattgagttggggtgagaccgtctctcataaagtcagtgaccgaaacatcaaattttttaaaggcaagcatcttaaaatcgataatggggcgtttggatccctcatttaataggaattgaagttcacttaacaaagtaacctatttgccttatttgccttaattggtatatgtcaaacgatc

SEQ ID NO: 27505 - DNA, 2277 bp, Zea Mays
ttatttttttatgtgaatagatacaaaacaaaattacaacctatatttagagaactattggagaactcacatttttttactccaaaagccatttagcaacttcttaaatctataatttagagagctaaaatttagctaactattggagttgctctagagccaacatcgtttcagagtcccatctgaactccgtagcgtgatagcagagggcggcagcagcagcaaatccctgctccttcctcctccccggccccaaaaccgcacaaacccctgctcctcctcccgccgccgccgccgccggggcacgccgggatgcagaagccagtggcctccgtcgtctccctatgtccgcagctatggcaccgccacttccgtcgcgctcccctcctcccccgcgcccgcggcctcccctcctcctctcctatcctcacacgccgccgctccgtactcccccgttccacttccactcacctcgccgcggtgtcaaccgctgccgccgccgccgccgccccatcagccacaccgtacccagtgtacgatcggcttctgccgtgccccttgcaggacgaccctccgagaatcgagcacctcgtggctcgggaggacgaggtggcagccgatttcatcgccaggtcgctcggcctgcctcctctgtatgctgcagacctcatcgagttcggtgctgtgtactacgcgctcgtcgccccgcagccgcctccctacgcttctccggagcattttaggctctttcgggaagtcaccgagccttccgtcctgcgccggagggcgtccatcaaggggaagacggtgagggaggctcagaagacgttccgggtgacggaccccaaccagcgcctcgaggccggcacctacctgcgggttcatgtgcatcctaaacggtttccaaggtgctatcaaattgactggaaatccagggtaatagcagtcgctgatgaatacgttgttcttgataaacctgccgcaacatcatctttacttcgcgtgcattaggattggaaacgccattgctgacgactcaccagattgacaactgctctgaaggctgtgtggtactatctaaaacgaaagagttctgctctgttttccatggactgataagggagaaacaggttaaaaaactctatcttgcacttactacagcacctgtgtcaacaggaacgattacccattatatgcgcccagttaatcgcgctcctagattagtttctgaagactgtattgaaagatggcatctctgtcaaatggaggtactcgattgtagcaaggtaccatggccaagctcttcgatcaggaaagcttacaatgtaaatggttgtgggtggccacagcaagaagctgcttacgaatgtaaaatcaatctcttgacagggaaaactcaccagataagggcacagcttgctgctataggcgctcctattataggggattctgcatacatgactgcagcaatggcagcgatggccaacccaagcataaacccattcggtagagagaggctgagttacaacagtgaagaggagaaagaagccgccgtcgaagcatggattgcctcccacgggaaggaaccaaaatccgtaattgggctgcaagcgtcagagatctcttgggatcacgagggcaagcaccattcttacaaggctggagttccgtggtggtggcaggatcctgactcctgagtgcgatggtggattggatgggggagttccatatgaacccctggaatctcgcctttttagaggacagatgtttttctacattgttccgagtgctgagcgaccactgtccaacacgaacattggtttggtttggttgctgcgcagaaattgttgggtcaccgaaaactgaatttgggcttgggagatgaaactaagcccgagtctgagctctcgaccaggccaacacgaacaccacaccagagctccttcaactgggaaaagcagatccaggccaacacgaacattgctttgctgttcattctagggcatgcaacgtcattcgttctatgactgtagctgtatggttgtgtgcaaggcctagcttctatttgggacagctctcaataatattccctggagattgagttggggtgagaccgtctctcataaagtcagtgaccgaaacatcaaattttttaaaggcaagcatcttaaaatcgataatggggcgtttggatccctcatttaataggaattgaagttcacttaacaaagtaacctatttgccttatttgccttaattggtatatgtcaaacgatc

SEQ ID NO: 27506 - DNA, 2313 bp, Zea Mays
ttatttttttatgtgaatagatacaaaacaaaattacaacctatatttagagaactattggagaactcacatttttttactccaaaagccatttagcaacttcttaaatctataatttagagagctaaaatttagctaactattggagttgctctagagccaacatcgtttcagagtcccatctgaactccgtagcgtgatagcagagggcggcagcagcagcaaatccctgctccttcctcctccccggccccaaaaccgcacaaacccctgctcctcctcccgccgccgccgccgccggggcacgccgggatgcagaagccagtggcctccgtcgtctccctatgtccgcagctatggcaccgccacttccgtcgcgctcccctcctcccccgcgcccgcggcctcccctcctcctctcctatcctcacacgccgccgctccgtactcccccgttccacttccactcacctcgccgcggtgtcaaccgctgccgccgccgccgccgccccatcagccacaccgtacccagtgtacgatcggcttctgccgtgccccttgcaggacgaccctccgagaatcgagcacctcgtggctcgggaggacgaggtggcagccgatttcatcgccaggtcgctcggcctgcctcctctgtatgctgcagacctcatcgagttcggtgctgtgtactacgcgctcgtcgccccgcagccgcctccctacgcttctccggagcattttaggctctttcgggaagtcaccgagccttccgtcctgcgccggagggcgtccatcaaggggaagacggtgagggaggctcagaagacgttccgggtgacggaccccaaccagcgcctcgaggccggcacctacctgcgggttcatgtgcatcctaaacggtttccaaggtgctatcaaattgactggaaatccagggtaatagcagtcgctgatgaatacgttgttcttgataaacctgccgcaacatcagtgggcggagcaactgataacattgaggaatcctgtgcagtctttacttcgcgtgcattaggattggaaacgccattgctgacgactcaccagattgacaactgctctgaagtgtggtactatctaaaacgaaagagttctgctctgttttccatggactgataagggagaaacaggttaaaaaactctatcttgcacttactacagcacctgtgtcaacaggaacgattacccattatatgcgcccagttaatcgcgctcctagattagtttctgaagactgtattgaaagatggcatctctgtcaaatggaggtactcgattgtagcaaggtaccatggccaagctcttcgatcaggaaagcttacaatgtaaatggttgtgggtggccacagcaagaagctgcttacgaatgtaaaatcaatctcttgacagggaaaactcaccagataagggcacagcttgctgctataggcgctcctattataggggattctgcatacatgactgcagcaatggcagcgatggccaacccaagcataaacccattcggtagagagaggctgagttacaacagtgaagaggagaaagaagccgccgtcgaagcatggattgcctcccacgggaaggaaccaaaatccgtaattgggctgcaagcgtcagagatctcttgggatcacgagggcaagcaccattcttacaaggctggagttccgtggtggtggcaggatcctgactcctgagtgcgatggtggattggatgggggagttccatatgaacccctggaatctcgcctttttagaggacagatgtttttctacattgttccgagtgctgagcgaccactgtccaacacgaacattggtttggtttggttgctgcgcagaaattgttgggtcaccgaaaactgaatttgggcttgggagatgaaactaagcccgagtctgagctctcgaccaggccaacacgaacaccacaccagagctccttcaactgggaaaagcagatccaggccaacacgaacattgctttgctgttcattctagggcatgcaacgtcattcgttctatgactgtagctgtatggttgtgtgcaaggcctagcttctatttgggacagctctcaataatattccctggagattgagttggggtgagaccgtctctcataaagtcagtgaccgaaacatcaaattttttaaaggcaagcatcttaaaatcgataatggggcgtttggatccctcatttaataggaattgaagttcacttaacaaagtaacctatttgccttatttgccttaattggtatatgtcaaacgatc

SEQ ID NO: 27507 - DNA, 2427 bp, Zea Mays
ttatttttttatgtgaatagatacaaaacaaaattacaacctatatttagagaactattggagaactcacatttttttactccaaaagccatttagcaacttcttaaatctataatttagagagctaaaatttagctaactattggagttgctctagagccaacatcgtttcagagtcccatctgaactccgtagcgtgatagcagagggcggcagcagcagcaaatccctgctccttcctcctccccggccccaaaaccgcacaaacccctgctcctcctcccgccgccgccgccgccggggcacgccgggatgcagaagccagtggcctccgtcgtctccctatgtccgcagctatggcaccgccacttccgtcgcgctcccctcctcccccgcgcccgcggcctcccctcctcctctcctatcctcacacgccgccgctccgtactcccccgttccacttccactcacctcgccgcggtgtcaaccgctgccgccgccgccgccgccccatcagccacaccgtacccagtgtacgatcggcttctgccgtgccccttgcaggacgaccctccgagaatcgagcacctcgtggctcgggaggacgaggtggcagccgatttcatcgccaggtcgctcggcctgcctcctctgtatgctgcagacctcatcgagttcggtgctgtgtactacgcgctcgtcgccccgcagccgcctccctacgcttctccggagcattttaggctctttcgggaagtcaccgagccttccgtcctgcgccggagggcgtccatcaaggggaagacggtgagggaggctcagaagacgttccgggtgacggaccccaaccagcgcctcgaggccggcacctacctgcgggttcatgtgcatcctaaacggtttccaaggtgctatcaaattgactggaaatccagggtaatagcagtcgctgatgaatacgttgttcttgataaacctgccgcaacatcagtgggcggagcaactgataacattgaggaatcctgtgcagtctttacttcgcgtgcattaggattggaaacgccattgctgacgactcaccagattgacaactgctctgaaggctgtgtggtactatctaaaacgaaagagttctgctctgttttccatggactgataagggagaaacaggttaaaaaactctatcttgcacttactacagcacctgtgtcaacaggaacgattacccattatatgcgcccagttaatcgcgctcctagattagtttctgaaggaatattattcatttttgggtgtcgtgaaactgtgtgctctctttatgaacatatgtgcacactgaccaccttttgttgatgctgtggccgctactgaagatagtgaaatactgtattgaaagatggcatctctgtcaaatggaggtactcgattgtagcaaggtaccatggccaagctcttcgatcaggaaagcttacaatgtaaatggttgtgggtggccacagcaagaagctgcttacgaatgtaaaatcaatctcttgacagggaaaactcaccagataagggcacagcttgctgctataggcgctcctattataggggattctgcatacatgactgcagcaatggcagcgatggccaacccaagcataaacccattcggtagagagaggctgagttacaacagtgaagaggagaaagaagccgccgtcgaagcatggattgcctcccacgggaaggaaccaaaatccgtaattgggctgcaagcgtcagagatctcttgggatcacgagggcaagcaccattcttacaaggctggagttccgtggtggtggcaggatcctgactcctgagtgcgatggtggattggatgggggagttccatatgaacccctggaatctcgcctttttagaggacagatgtttttctacattgttccgagtgctgagcgaccactgtccaacacgaacattggtttggtttggttgctgcgcagaaattgttgggtcaccgaaaactgaatttgggcttgggagatgaaactaagcccgagtctgagctctcgaccaggccaacacgaacaccacaccagagctccttcaactgggaaaagcagatccaggccaacacgaacattgctttgctgttcattctagggcatgcaacgtcattcgttctatgactgtagctgtatggttgtgtgcaaggcctagcttctatttgggacagctctcaataatattccctggagattgagttggggtgagaccgtctctcataaagtcagtgaccgaaacatcaaattttttaaaggcaagcatcttaaaatcgataatggggcgtttggatccctcatttaataggaattgaagttcacttaacaaagtaacctatttgccttatttgccttaattggtatatgtcaaacgatc

SEQ ID NO: 27508 - DNA, 2570 bp, Zea Mays
ttatttttttatgtgaatagatacaaaacaaaattacaacctatatttagagaactattggagaactcacatttttttactccaaaagccatttagcaacttcttaaatctataatttagagagctaaaatttagctaactattggagttgctctagagccaacatcgtttcagagtcccatctgaactccgtagcgtgatagcagagggcggcagcagcagcaaatccctgctccttcctcctccccggccccaaaaccgcacaaacccctgctcctcctcccgccgccgccgccgccggggcacgccgggatgcagaagccagtggcctccgtcgtctccctatgtccgcagctatggcaccgccacttccgtcgcgctcccctcctcccccgcgcccgcggcctcccctcctcctctcctatcctcacacgccgccgctccgtactcccccgttccacttccactcacctcgccgcggtgtcaaccgctgccgccgccgccgccgccccatcagccacaccgtacccagtgtacgatcggcttctgccgtgccccttgcaggacgaccctccgagaatcgagcacctcgtggctcgggaggacgaggtggcagccgatttcatcgccaggtcgctcggcctgcctcctctgtatgctgcagacctcatcgagttcggtgctgtgtactacgcgctcgtcgccccgcagccgcctccctacgcttctccggagcattttaggctctttcgggaagtcaccgagccttccgtcctgcgccggagggcgtccatcaaggggaagacggtgagggaggctcagaagacgttccgggtgacggaccccaaccagcgcctcgaggccggcacctacctgcgggttcatgtgcatcctaaacggtttccaaggtgctatcaaattgactggaaatccagggtaatagcagtcgctgatgaatacgttgttcttgataaacctgccgcaacatcatctttacttcgcgtgcattaggattggaaacgccattgctgacgactcaccagattgacaactgctctgaagtgtggtactatctaaaacgaaagagttctgctctgttttccatggactgataagggaacgattacccattatatgcgcccagttaatcgcgctcctagattagtttctgaaggaatattattcatttttgggtgtcgtgaaactgtgtgctctctttatgaacatatgtgcacactgaccaccttttgttgatgctgtggccgctactgaagatagtgaaatgtgaatcagcagtttatatctaaaactcgttgattctgcatcaatcgtgtgcatgttgccttctattgttcttaaccactgttttgttgttaataaactctagaagatgaatgatgcataaactcatggcctgaatgcttccaccagaagttttaaataaccttcttgttttagtgtactgcgttttagttgttacattggaatcctttgttggtacattgatgttcttcttacttaaccagactgtattgaaagatggcatctctgtcaaatggaggtactcgattgtagcaaggtaccatggccaagctcttcgatcaggaaagcttacaatgtaaatggttgtgggtggccacagcaagaagctgcttacgaatgtaaaatcaatctcttgacagggaaaactcaccagataagggcacagcttgctgctataggcgctcctattataggggattctgcatacatgactgcagcaatggcagcgatggccaacccaagcataaacccattcggtagagagaggctgagttacaacagtgaagaggagaaagaagccgccgtcgaagcatggattgcctcccacgggaaggaaccaaaatccgtaattgggctgcaagcgtcagagatctcttgggatcacgagggcaagcaccattcttacaaggctggagttccgtggtggtggcaggatcctgactcctgagtgcgatggtggattggatgggggagttccatatgaacccctggaatctcgcctttttagaggacagatgtttttctacattgttccgagtgctgagcgaccactgtccaacacgaacattggtttggtttggttgctgcgcagaaattgttgggtcaccgaaaactgaatttgggcttgggagatgaaactaagcccgagtctgagctctcgaccaggccaacacgaacaccacaccagagctccttcaactgggaaaagcagatccaggccaacacgaacattgctttgctgttcattctagggcatgcaacgtcattcgttctatgactgtagctgtatggttgtgtgcaaggcctagcttctatttgggacagctctcaataatattccctggagattgagttggggtgagaccgtctctcataaagtcagtgaccgaaacatcaaattttttaaaggcaagcatcttaaaatcgataatggggcgtttggatccctcatttaataggaattgaagttcacttaacaaagtaacctatttgccttatttgccttaattggtatatgtcaaacgatc

SEQ ID NO: 27509 - DNA, 2669 bp, Zea Mays
ttatttttttatgtgaatagatacaaaacaaaattacaacctatatttagagaactattggagaactcacatttttttactccaaaagccatttagcaacttcttaaatctataatttagagagctaaaatttagctaactattggagttgctctagagccaacatcgtttcagagtcccatctgaactccgtagcgtgatagcagagggcggcagcagcagcaaatccctgctccttcctcctccccggccccaaaaccgcacaaacccctgctcctcctcccgccgccgccgccgccggggcacgccgggatgcagaagccagtggcctccgtcgtctccctatgtccgcagctatggcaccgccacttccgtcgcgctcccctcctcccccgcgcccgcggcctcccctcctcctctcctatcctcacacgccgccgctccgtactcccccgttccacttccactcacctcgccgcggtgtcaaccgctgccgccgccgccgccgccccatcagccacaccgtacccagtgtacgatcggcttctgccgtgccccttgcaggacgaccctccgagaatcgagcacctcgtggctcgggaggacgaggtggcagccgatttcatcgccaggtcgctcggcctgcctcctctgtatgctgcagacctcatcgagttcggtgctgtgtactacgcgctcgtcgccccgcagccgcctccctacgcttctccggagcattttaggctctttcgggaagtcaccgagccttccgtcctgcgccggagggcgtccatcaaggggaagacggtgagggaggctcagaagacgttccgggtgacggaccccaaccagcgcctcgaggccggcacctacctgcgggttcatgtgcatcctaaacggtttccaaggtgctatcaaattgactggaaatccagggtaatagcagtcgctgatgaatacgttgttcttgataaacctgccgcaacatcagtgggcggagcaactgataacattgaggaatcctgtgcagtctttacttcgcgtgcattaggattggaaacgccattgctgacgactcaccagattgacaactgctctgaaggctgtgtggtactatctaaaacgaaagagttctgctctgttttccatggactgataagggagaaacaggttaaaaaactctatcttgcacttactacagcacctgtgtcaacaggaacgattacccattatatgcgcccagttaatcgcgctcctagattagtttctgaaggaatattattcatttttgggtgtcgtgaaactgtgtgctctctttatgaacatatgtgcacactgaccaccttttgttgatgctgtggccgctactgaagatagtgaaatgtgaatcagcagtttatatctaaaactcgttgattctgcatcaatcgtgtgcatgttgccttctattgttcttaaccactgttttgttgttaataaactctagaagatgaatgatgcataaactcatggcctgaatgcttccaccagaagttttaaataaccttcttgttttagtgtactgcgttttagttgttacattggaatcctttgttggtacattgatgttcttcttacttaaccagactgtattgaaagatggcatctctgtcaaatggaggtactcgattgtagcaaggtaccatggccaagctcttcgatcaggaaagcttacaatgtaaatggttgtgggtggccacagcaagaagctgcttacgaatgtaaaatcaatctcttgacagggaaaactcaccagataagggcacagcttgctgctataggcgctcctattataggggattctgcatacatgactgcagcaatggcagcgatggccaacccaagcataaacccattcggtagagagaggctgagttacaacagtgaagaggagaaagaagccgccgtcgaagcatggattgcctcccacgggaaggaaccaaaatccgtaattgggctgcaagcgtcagagatctcttgggatcacgagggcaagcaccattcttacaaggctggagttccgtggtggtggcaggatcctgactcctgagtgcgatggtggattggatgggggagttccatatgaacccctggaatctcgcctttttagaggacagatgtttttctacattgttccgagtgctgagcgaccactgtccaacacgaacattggtttggtttggttgctgcgcagaaattgttgggtcaccgaaaactgaatttgggcttgggagatgaaactaagcccgagtctgagctctcgaccaggccaacacgaacaccacaccagagctccttcaactgggaaaagcagatccaggccaacacgaacattgctttgctgttcattctagggcatgcaacgtcattcgttctatgactgtagctgtatggttgtgtgcaaggcctagcttctatttgggacagctctcaataatattccctggagattgagttggggtgagaccgtctctcataaagtcagtgaccgaaacatcaaattttttaaaggcaagcatcttaaaatcgataatggggcgtttggatccctcatttaataggaattgaagttcacttaacaaagtaacctatttgccttatttgccttaattggtatatgtcaaacgatc

SEQ ID NO: 27510 - DNA, 2423 bp, Zea Mays
ttatttttttatgtgaatagatacaaaacaaaattacaacctatatttagagaactattggagaactcacatttttttactccaaaagccatttagcaacttcttaaatctataatttagagagctaaaatttagctaactattggagttgctctagagccaacatcgtttcagagtcccatctgaactccgtagcgtgatagcagagggcggcagcagcagcaaatccctgctccttcctcctccccggccccaaaaccgcacaaacccctgctcctcctcccgccgccgccgccgccggggcacgccgggatgcagaagccagtggcctccgtcgtctccctatgtccgcagctatggcaccgccacttccgtcgcgctcccctcctcccccgcgcccgcggcctcccctcctcctctcctatcctcacacgccgccgctccgtactcccccgttccacttccactcacctcgccgcggtgtcaaccgctgccgccgccgccgccgccccatcagccacaccgtacccagtgtacgatcggcttctgccgtgccccttgcaggacgaccctccgagaatcgagcacctcgtggctcgggaggacgaggtggcagccgatttcatcgccaggtcgctcggcctgcctcctctgtatgctgcagacctcatcgagttcggtgctgtgtactacgcgctcgtcgccccgcagccgcctccctacgcttctccggagcattttaggctctttcgggaagtcaccgagccttccgtcctgcgccggagggcgtccatcaaggggaagacggtgagggaggctcagaagacgttccgggtgacggaccccaaccagcgcctcgaggccggcacctacctgcgggttcatgtgcatcctaaacggtttccaaggtgctatcaaattgactggaaatccagggtaatagcagtcgctgatgaatacgttgttcttgataaacctgccgcaacatcagtgggcggagcaactgataacattgaggaatcctgtgcagtctttacttcgcgtgcattaggattggaaacgccattgctgacgactcaccagattgacaactgctctgaagtgtggtactatctaaaacgaaagagttctgctctgttttccatggactgataagggagaaacaggttaaaaaactctatcttgcacttactacagcacctgtgtcaacaggaacgattacccattatatgcgcccagttaatcgcgctcctagattagtttctgaaggaatattattcatttttgggtgtcgtgaaactgtgtgctctctttatgaacatatgtgcacactgaccaccttttgttgatgctgtggccgctactgaagatagtgaaatactgtattgaaagatggcatctctgtcaaatggaggtactcgattgtagcaaggtaccatggccaagctcttcgatcaggaaagcttacaatgtaaatggttgtgggtggccacagcaagaagctgcttacgaatgtaaaatcaatctcttgacagggaaaactcaccagataagggcacagcttgctgctataggcgctcctattataggggattctgcatacatgactgcagcaatggcagcgatggccaacccaagcataaacccattcggtagagagaggctgagttacaacagtgaagaggagaaagaagccgccgtcgaagcatggattgcctcccacgggaaggaaccaaaatccgtaattgggctgcaagcgtcagagatctcttgggatcacgagggcaagcaccattcttacaaggctggagttccgtggtggtggcaggatcctgactcctgagtgcgatggtggattggatgggggagttccatatgaacccctggaatctcgcctttttagaggacagatgtttttctacattgttccgagtgctgagcgaccactgtccaacacgaacattggtttggtttggttgctgcgcagaaattgttgggtcaccgaaaactgaatttgggcttgggagatgaaactaagcccgagtctgagctctcgaccaggccaacacgaacaccacaccagagctccttcaactgggaaaagcagatccaggccaacacgaacattgctttgctgttcattctagggcatgcaacgtcattcgttctatgactgtagctgtatggttgtgtgcaaggcctagcttctatttgggacagctctcaataatattccctggagattgagttggggtgagaccgtctctcataaagtcagtgaccgaaacatcaaattttttaaaggcaagcatcttaaaatcgataatggggcgtttggatccctcatttaataggaattgaagttcacttaacaaagtaacctatttgccttatttgccttaattggtatatgtcaaacgatc

SEQ ID NO: 27511 - DNA, 2383 bp, Zea Mays
ttatttttttatgtgaatagatacaaaacaaaattacaacctatatttagagaactattggagaactcacatttttttactccaaaagccatttagcaacttcttaaatctataatttagagagctaaaatttagctaactattggagttgctctagagccaacatcgtttcagagtcccatctgaactccgtagcgtgatagcagagggcggcagcagcagcaaatccctgctccttcctcctccccggccccaaaaccgcacaaacccctgctcctcctcccgccgccgccgccgccggggcacgccgggatgcagaagccagtggcctccgtcgtctccctatgtccgcagctatggcaccgccacttccgtcgcgctcccctcctcccccgcgcccgcggcctcccctcctcctctcctatcctcacacgccgccgctccgtactcccccgttccacttccactcacctcgccgcggtgtcaaccgctgccgccgccgccgccgccccatcagccacaccgtacccagtgtacgatcggcttctgccgtgccccttgcaggacgaccctccgagaatcgagcacctcgtggctcgggaggacgaggtggcagccgatttcatcgccaggtcgctcggcctgcctcctctgtatgctgcagacctcatcgagttcggtgctgtgtactacgcgctcgtcgccccgcagccgcctccctacgcttctccggagcattttaggctctttcgggaagtcaccgagccttccgtcctgcgccggagggcgtccatcaaggggaagacggtgagggaggctcagaagacgttccgggtgacggaccccaaccagcgcctcgaggccggcacctacctgcgggttcatgtgcatcctaaacggtttccaaggtgctatcaaattgactggaaatccagggtaatagcagtcgctgatgaatacgttgttcttgataaacctgccgcaacatcatctttacttcgcgtgcattaggattggaaacgccattgctgacgactcaccagattgacaactgctctgaagtgtggtactatctaaaacgaaagagttctgctctgttttccatggactgataagggagaaacaggttaaaaaactctatcttgcacttactacagcacctgtgtcaacaggaacgattacccattatatgcgcccagttaatcgcgctcctagattagtttctgaaggaatattattcatttttgggtgtcgtgaaactgtgtgctctctttatgaacatatgtgcacactgaccaccttttgttgatgctgtggccgctactgaagatagtgaaatactgtattgaaagatggcatctctgtcaaatggaggtactcgattgtagcaaggtaccatggccaagctcttcgatcaggaaagcttacaatgtaaatggttgtgggtggccacagcaagaagctgcttacgaatgtaaaatcaatctcttgacagggaaaactcaccagataagggcacagcttgctgctataggcgctcctattataggggattctgcatacatgactgcagcaatggcagcgatggccaacccaagcataaacccattcggtagagagaggctgagttacaacagtgaagaggagaaagaagccgccgtcgaagcatggattgcctcccacgggaaggaaccaaaatccgtaattgggctgcaagcgtcagagatctcttgggatcacgagggcaagcaccattcttacaaggctggagttccgtggtggtggcaggatcctgactcctgagtgcgatggtggattggatgggggagttccatatgaacccctggaatctcgcctttttagaggacagatgtttttctacattgttccgagtgctgagcgaccactgtccaacacgaacattggtttggtttggttgctgcgcagaaattgttgggtcaccgaaaactgaatttgggcttgggagatgaaactaagcccgagtctgagctctcgaccaggccaacacgaacaccacaccagagctccttcaactgggaaaagcagatccaggccaacacgaacattgctttgctgttcattctagggcatgcaacgtcattcgttctatgactgtagctgtatggttgtgtgcaaggcctagcttctatttgggacagctctcaataatattccctggagattgagttggggtgagaccgtctctcataaagtcagtgaccgaaacatcaaattttttaaaggcaagcatcttaaaatcgataatggggcgtttggatccctcatttaataggaattgaagttcacttaacaaagtaacctatttgccttatttgccttaattggtatatgtcaaacgatc

SEQ ID NO: 27512 - DNA, 2376 bp, Zea Mays
ttatttttttatgtgaatagatacaaaacaaaattacaacctatatttagagaactattggagaactcacatttttttactccaaaagccatttagcaacttcttaaatctataatttagagagctaaaatttagctaactattggagttgctctagagccaacatcgtttcagagtcccatctgaactccgtagcgtgatagcagagggcggcagcagcagcaaatccctgctccttcctcctccccggccccaaaaccgcacaaacccctgctcctcctcccgccgccgccgccgccggggcacgccgggatgcagaagccagtggcctccgtcgtctccctatgtccgcagctatggcaccgccacttccgtcgcgctcccctcctcccccgcgcccgcggcctcccctcctcctctcctatcctcacacgccgccgctccgtactcccccgttccacttccactcacctcgccgcggtgtcaaccgctgccgccgccgccgccgccccatcagccacaccgtacccagtgtacgatcggcttctgccgtgccccttgcaggacgaccctccgagaatcgagcacctcgtggctcgggaggacgaggtggcagccgatttcatcgccaggtcgctcggcctgcctcctctacctcatcgagttcggtgctgtgtactacgcgctcgtcgccccgcagccgcctccctacgcttctccggagcattttaggctctttcgggaagtcaccgagccttccgtcctgcgccggagggcgtccatcaaggggaagacggtgagggaggctcagaagacgttccgggtgacggaccccaaccagcgcctcgaggccggcacctacctgcgggttcatgtgcatcctaaacggtttccaaggtgctatcaaattgactggaaatccagggtaatagcagtcgctgatgaatacgttgttcttgataaacctgccgcaacatcatctttacttcgcgtgcattaggattggaaacgccattgctgacgactcaccagattgacaactgctctgaaggctgtgtggtactatctaaaacgaaagagttctgctctgttttccatggactgataagggagaaacaggttaaaaaactctatcttgcacttactacagcacctgtgtcaacaggaacgattacccattatatgcgcccagttaatcgcgctcctagattagtttctgaaggaatattattcatttttgggtgtcgtgaaactgtgtgctctctttatgaacatatgtgcacactgaccaccttttgttgatgctgtggccgctactgaagatagtgaaatactgtattgaaagatggcatctctgtcaaatggaggtactcgattgtagcaaggtaccatggccaagctcttcgatcaggaaagcttacaatgtaaatggttgtgggtggccacagcaagaagctgcttacgaatgtaaaatcaatctcttgacagggaaaactcaccagataagggcacagcttgctgctataggcgctcctattataggggattctgcatacatgactgcagcaatggcagcgatggccaacccaagcataaacccattcggtagagagaggctgagttacaacagtgaagaggagaaagaagccgccgtcgaagcatggattgcctcccacgggaaggaaccaaaatccgtaattgggctgcaagcgtcagagatctcttgggatcacgagggcaagcaccattcttacaaggctggagttccgtggtggtggcaggatcctgactcctgagtgcgatggtggattggatgggggagttccatatgaacccctggaatctcgcctttttagaggacagatgtttttctacattgttccgagtgctgagcgaccactgtccaacacgaacattggtttggtttggttgctgcgcagaaattgttgggtcaccgaaaactgaatttgggcttgggagatgaaactaagcccgagtctgagctctcgaccaggccaacacgaacaccacaccagagctccttcaactgggaaaagcagatccaggccaacacgaacattgctttgctgttcattctagggcatgcaacgtcattcgttctatgactgtagctgtatggttgtgtgcaaggcctagcttctatttgggacagctctcaataatattccctggagattgagttggggtgagaccgtctctcataaagtcagtgaccgaaacatcaaattttttaaaggcaagcatcttaaaatcgataatggggcgtttggatccctcatttaataggaattgaagttcacttaacaaagtaacctatttgccttatttgccttaattggtatatgtcaaacgatc

SEQ ID NO: 27513 - DNA, 2802 bp, Zea Mays
cgctccctccccttcctccgtctccacgtcgatcgcgcccccccagaggccagaccgtgcgtcgcgcgccaaggggaagatgctgagctcgtcggcgtcgaggcgggaggccgcggcggcgcgggcaaccaagaacggcgagctccccaagtcggccgctgccgtcgcctggaaggacgtcgcggccaccgccaggagcggcgagctgtccaaggcggtgactggcgccgagctctccaaggcggtggccgccgtcagggacgccgcggccgtgcaacacgaggggtggatggtgcgctacggccgccggaagatcggcaggtccttcttccacacgcgctacttcgtgctcgagagcaggctgctcgcctactacaagaagaagcccaaagacaacatggtgcccctcaagtcactgctgatagatgggaattgcagggtggaggatagggggctaaaaaatcatcatgggcaaatgatttatgttctctgcgtttataaccagaaagagaaggagcatcaaatcacgatgggtgcacatgatatcgaagatgcattggcctggaaaaagaaaatagagctcctcattgatcagcaaccagactctgcagttaaaacccataagtcgttcgctacaatagactttgacatggaccttggagggcagttctccttgtcagatcatgacagtgcagctgaagatgaagaggaacgacctactttagttcgcaggacaactatagggaatggtcctcccgattcaatacatgattggaccaaagatgctgattttggtatgtccggtcagaatgagcccactcaactctattctaagaagaattggcgactacttcgatgccaaaatgggttgcgcatttatgaagaacttctggaagttgaataccttgcaagaagctgtagccgagctatgagggctgttggagtagtggaagccacatgtgaagccatttttgggctgatgatgagcatggatgcaacaagatatgagtgggactgtagctttcgccagggtagtttagttgaagaggttgatggtcacactgcagtactatatcataggttgcaattgcattggtgtccaaggttgatctggcctagggatctgtgttacgttcgatattggcgacgtaatgatgatggaagctatgttgtgctatttcggtctacagaacatccaaactgcatccgtcagcgaggatttgtgagagcttttattgaaagtggagggttcaagatttgtcctcttaagtgtcgcaatggaagaccccggactcaggttcagcaccttatgcagattgatctgaagggatggttcttgaactactctacttcctttcagtatcattctttgctgcagatactgaactgtgttgccgatgatattcatataactccaaggattcctgcaatggagagcatggctgatgtgaatttagcacaaaaggacgagaagcttaaagaagttgactccaaaactaaaccagaagatcaacaacaagcagaaaataaaaatatgggaacaattgatgaagaatcagatgacgatgaggactatcatgttcctgaagctgatatagaggaaatcactaacaaatctgacaatgaagctaaacacacagatgagcctccagaaaaaattgatttatcttgcttttctgggatacttcatcatgatccggatgagaaaagccgcaactgttggacagtacctgatagcaagcttttcaagttcgtagcaagaatttcccaaatgacaaatcgaagatacctgctgcaagttatctcatggagcttgcagccattgattggtttaaggacaccaagcgtatggataatgttggcaggcagaaaaattgtgttgctcaggttgctgctgagaaagggatgcatacattcattgtcaacttacagattcccgggtcaactcactatagcatggtcatgtatttcgtcacaagttccttgaaaaagggatcattactgcagcgcttctttgatggcgatgatgacttccgtaacagcaggctgaagctcataccatcggttccaaagggctcatggatagtgcgacagagtgttggcagcaccccttgtttgttggggaaggctgtggattgtaactattttcgaagtcctgggtatttggaggtggacgtcgacattggttcttctgcagtagcaaacggagttttgggcttggtgtttggtgttgtcacaacattagtagttgatatggctttcctaatacaggcaaacacatatgaggagctcccagagcaagttataggcgcagctcgtctatctaacgtggaaccgtctacagcagtagttcctgaccttgaaaataacagcgacggcaacaaagataacagcagtaacgacgctacgtcctctgaggatgattcgtcaaagaagaccaactgattctacctttctttaaagatttcgaaagaccaactgattcaacctttatttgaagatttcgatgagagccgcaggtgtctagttcattttttctccttttaacttctgtgctgtgcacgtatcttcgcgggcttgcaccagattgcagtctggtacatctcctttggcgccttcaattgagtccagaatttcacatgatctcctgtatccttctccattacagtccgctcttgccttatccatgtacatgctgctaccagacttggtgtagatagtactatgtgatgaacacgttcaactcagtaactgatcatctgagttgtagtgcttgctttgtgtgggtaaccaacacatgat

SEQ ID NO: 27514 - DNA, 1622 bp, Zea Mays
cacgtcaacccgtcgccactcacataaaacgtcttgacctctctgctcgccgccggcgaggagacagtagcccgccgctgcacgcacgcgccgcgaggaggtctggagcggctagctcgtctagagctaagtcagcgaatctcccggaccgtcccttctcagttctcatggccgtccgccgcaggcccgcggctgctgctgccggggacctgcctccgcaggcgccaccggcagatgcagcgccgacgccggcgccagacgaactggtcctccggccgccaaacctccgcgtggccgctgtggcggcggtgctcttcctcgcgcccttctcttatctctcgttcgtgcgctaccgcttgggcgccgatctgcagcgatccatcttaaaatgcggcgccatgagcctcattgggttctgcgtcgcgctcaagctcatccctgtcgcggccagctaccacctccgccgccggatgttcggctacgacatcaacaagaaaggcttgcccacgggccaaattaaagtgcctgaagcactaggtcttgttgtggggattatctacttggtcattgctattatatttcagcagtttcactatgccccagactccatttggcttgttgaatataatgcagcgttggcatcagtctgttttatgattcttcttggatttgtcgatgatgttcttgatgttccatggagagtgaaactggcattgccaacgtttgcagcactcccattgctaatggcatatgctggtggcacttccatcatcattccaaagcccttaactccttatgttggactaacggttttggagctaggtttattttacaagctattcatgctcttgttagcagtcttttgtacaaactcgataaatatacatgctggtctaaatggacttgaagttgggcagactattgttatatctgctgcgatatcgaaactcagcaagctcatgaattctctatttatcttgtcttgccattcctaaccatttcattagctttgctagcttttaactggtatccctcgattgtttttgttggtgatacctacacctattttgctggaatggctttggctgtgataggaattttgggacatttcagcgagacattattgctcttctttttacctcaagttcttaatttcctatgttcagtcccacagctctttcactttgttccttgcccaagacataggttgccgaggtttgatcctgaaacgggtctgttgactggtaccaaagatggtaatctggtgaacatattccttaggttatttgggaagtgctcggagaaggccctttgcataaggctccttatttttcaggctctatgttgcgtattctgcttctggctaagatacatgctcaccggatggaacatgggatctgcagaggagcaattggaaggctgaaagagcagaaggttgagcgggaggagtaatctgattaattgaattttgtttgtgattaggccttattgggcctggggtttgggccgtctggccttgtaaggagggtgtacttaaaccctgaatcttctggtaattggcaggaagaaaatagaagaaaaaccaccaaacagaatttctgtttacctgcgcttgtcctccc

SEQ ID NO: 27515 - DNA, 2366 bp, Zea Mays
cacgtcaacccgtcgccactcacataaaacgtcttgacctctctgctcgccgccggcgaggagacagtagcccgccgctgcacgcacgcgccgcgaggaggtctggagcggctagctcgtctagagctaagtcagcgaatctcccggaccgtcccttctcagttctcatggccgtccgccgcaggcccgcggctgctgctgccggggacctgcctccgcaggcgccaccggcagatgcagcgccgacgccggcgccagacgaactggtcctccggccgccaaacctccgcgtggccgctgtggcggcggtgctcttcctcgcgcccttctcttatctctcgttcgtgcgctaccgcttgggcgccgatctgcagcgatccatcttaaaatgcggcgccatgagcctcattgggttctgcgtcgcgctcaagctcatccctgtcgcggccagctaccacctccgccgccggatgttcggctacgacatcaacaagaaaggcttgcccacgggccaaattaaagtgcctgaagcactaggtcttgttgtggggattatctacttggtcattgctattatatttcagcagtttcactatgccccagactccatttggcttgttgaatataatgcagcgttggcatcagtctgttttatgattcttcttggatttgtcgatgatgttcttgatgttccatggagagtgaaactggcattgccaacgtttgcagcactcccattgctaatggcatatgctggtggcacttccatcatcattccaaagcccttaactccttatgttggactaacggttttggagctaggtacgtgtatcccctttaaacaggttgaaagtgtatatttactctttggtggttgcagcacttgtgtttgttttttgctgttataaaaccaagagacggttaagaaatccacaggcatagcagatctcactatgaaatccttatgcatttgttagtcattcaatcttgattataagttataaaatagaatttgtttgtcagtgtctatgtttttcaacagtcaacaccatattttatctagtgtagtgtcaatcaagttttgcctgctgatactggtttattttgttcctcatttttatggcagaggttccctgtacgtctttgatctttagcttttttccattgtccaaaataagccacccactttggatttttgtcaaagtgtgccactccttataggtacattaacttataatatttctggaaaactttaaatgtttttatgggatatttttacattatgtagtattttggagatttgtgggactttagaagttgactttattatatcatcaggatccatatgcttaccatctcttgcaactctgttatttgtatttttaagagactcacaacctgtttactgacattttgtttagtatctgacattttgtattgactgagcatgataattctgtaatagcataacattttgcttcattactggcgacagtgctttatgcttggtgtgcggatgctgattggtttattttacaagctattcatgctcttgttagcagtcttttgtacaaactcgataaatatacatgctggtctaaatggacttgaagttgggcagactattgttatatctgctgcggttttgatacataatgtaatgcgcatagcatcttctacagatatcgaaactcagcaagctcatgaattctctatttatcttgtcttgccattcctaaccatttcattagctttgctagcttttaactggtatccctcgattgtttttgttggtgatacctacacctattttgctggaatggctttggctgtgataggaattttgggacatttcagcgagacattattgctcttctttttacctcaagttcttaatttcctatgttcagtcccacagctctttcactttgttccttgcccaagacataggttgccgaggtttgatcctgaaacgggtctgttgactggtaccaaagatggtaatctggtgaacatattccttaggttatttgggaagtgctcggagaaggccctttgcataaggctccttatttttcaggctctatgttgcgtattctgcttctggctaagatacatgctcaccggatggaacatgggatctgcagaggagcaattggaaggctgaaagagcagaaggttgagcgggaggagtaatctgattaattgaattttgtttgtgattaggccttattgggcctggggtttgggccgtctggccttgtaaggagggtgtacttaaaccctgaatcttctggtaattggcaggaagaaaatagaagaaaaaccaccaaacagaatttctgtttacctgcgcttgtcctccc

SEQ ID NO: 27516 - DNA, 1665 bp, Zea Mays
caccacgtcaacccgtcgccactcacataaaacgtcttgacctctctgctcgccgccggcgaggagacagtagcccgccgctgcacgcacgcgccgcgaggaggtctggagcggctagctcgtctagagctaagtcagcgaatctcccggaccgtcccttctcagttctcatggccgtccgccgcaggcccgcggctgctgctgccggggacctgcctccgcaggcgccaccggcagatgcagcgccgacgccggcgccagacgaactggtcctccggccgccaaacctccgcgtggccgctgtggcggcggtgctcttcctcgcgcccttctcttatctctcgttcgtgcgctaccgcttgggcgccgatctgcagcgatccatcttaaaatgcggcgccatgagcctcattgggttctgcgtcgcgctcaagctcatccctgtcgcggccagctaccacctccgccgccggatgttcggctacgacatcaacaagaaaggcttgcccacgggccaaattaaagtgcctgaagcactaggtcttgttgtggggattatctacttggtcattgctattatatttcagcagtttcactatgccccagactccatttggcttgttgaatataatgcagcgttggcatcagtctgttttatgattcttcttggatttgtcgatgatgttcttgatgttccatggagagtgaaactggcattgccaacgtttgcagcactcccattgctaatggcatatgctggtggcacttccatcatcattccaaagcccttaactccttatgttggactaacggttttggagctaggtttattttacaagctattcatgctcttgttagcagtcttttgtacaaactcgataaatatacatgctggtctaaatggacttgaagttgggcagactattgttatatctgctgcggttttgatacataatgtaatgcgcatagcatcttctacagatatcgaaactcagcaagctcatgaattctctatttatcttgtcttgccattcctaaccatttcattagctttgctagcttttaactggtatccctcgattgtttttgttggtgatacctacacctattttgctggaatggctttggctgtgataggaattttgggacatttcagcgagacattattgctcttctttttacctcaagttcttaatttcctatgttcagtcccacagctctttcactttgttccttgcccaagacataggttgccgaggtttgatcctgaaacgggtctgttgactggtaccaaagatggtaatctggtgaacatattccttaggttatttgggaagtgctcggagaaggccctttgcataaggctccttatttttcaggctctatgttgcgtattctgcttctggctaagatacatgctcaccggatggaacatgggatctgcagaggagcaattggaaggctgaaagagcagaaggttgagcgggaggagtaatctgattaattgaattttgtttgtgattaggccttattgggcctggggtttgggccgtctggccttgtaaggagggtgtacttaaaccctgaatcttctggtaattggcaggaagaaaatagaagaaaaaccaccaaacagaatttctgtttacctgcgcttgtcctccc

SEQ ID NO: 27517 - DNA, 1814 bp, Zea Mays
caccacgtcaacccgtcgccactcacataaaacgtcttgacctctctgctcgccgccggcgaggagacagtagcccgccgctgcacgcacgcgccgcgaggaggtctggagcggctagctcgtctagagctaagtcagcgaatctcccggaccgtcccttctcagttctcatggccgtccgccgcaggcccgcggctgctgctgccggggacctgcctccgcaggcgccaccggcagatgcagcgccgacgccggcgccagacgaactggtcctccggccgccaaacctccgcgtggccgctgtggcggcggtgctcttcctcgcgcccttctcttatctctcgttcgtgcgctaccgcttgggcgccgatctgcagcgatccatcttaaaatgcggcgccatgagcctcattgggttctgcgtcgcgctcaagctcatccctgtcgcggccagctaccacctccgccgccggatgttcggctacgacatcaacaagaaaggcttgcccacgggccaaattaaagtgcctgaagcactaggtcttgttgtggggattatctacttggtcattgctattatatttcagcagtttcactatgccccagactccatttggcttgttgaatataatgcagcgttggcatcagtctgttttatgattcttcttggatttgtcgatgatgttcttgatgttccatggagagtgaaactggcattgccaacgtttgcagcactcccattgctaatggcatatgctggtggcacttccatcatcattccaaagcccttaactccttatgttggactaacggttttggagctagcataacattttgcttcattactggcgacagtgctttatgcttggtgtgcggatgctgattggtttattttacaagctattcatgctcttgttagcagtcttttgtacaaactcgataaatatacatgctggtctaaatggacttgaagttgggcagactattgttatatctgctgcggtataaacaaaatatattccttatgtgacatacatgaattttgcataccactcatgtcttgttggcgtgtggttgtggttttttccaggttttgatacataatgtaatgcgcatagcatcttctacagatatcgaaactcagcaagctcatgaattctctatttatcttgtcttgccattcctaaccatttcattagctttgctagcttttaactggtatccctcgattgtttttgttggtgatacctacacctattttgctggaatggctttggctgtgataggaattttgggacatttcagcgagacattattgctcttctttttacctcaagttcttaatttcctatgttcagtcccacagctctttcactttgttccttgcccaagacataggttgccgaggtttgatcctgaaacgggtctgttgactggtaccaaagatggtaatctggtgaacatattccttaggttatttgggaagtgctcggagaaggccctttgcataaggctccttatttttcaggctctatgttgcgtattctgcttctggctaagatacatgctcaccggatggaacatgggatctgcagaggagcaattggaaggctgaaagagcagaaggttgagcgggaggagtaatctgattaattgaattttgtttgtgattaggccttattgggcctggggtttgggccgtctggccttgtaaggagggtgtacttaaaccctgaatcttctggtaattggcaggaagaaaatagaagaaaaaccaccaaacagaatttctgtttacctgcgcttgtcctccc

SEQ ID NO: 27518 - DNA, 1685 bp, Zea Mays
gtattattatatttaactaaacactattattaaaggcagtggtggttgcaattggaattaattatagatgtggcaacagaattagaaacaataataaagtattgctttcggctccaatcatatgaatagttctccaatcctataatgagtaataaaaatttgggacaagtgcagactaacaatagttctacgatgaaaaacaattacctttggtattggattctctaatagcaaattgatagaaccagcccctaaagtgttttccactgcaccttgcacaacttgttgttccttgaggtccttctcaagctaaagaatccgcataagatgattttatgagtctacactatggaagattcagtagaaaaacaagaagtaggaggctaggggaaaatgggctttcacctttttctaacagattatttgagcatttttagctaacttcaagggaggtaacacttttagagtgtcaacaaatatgttatgtcatttagtgaagttaggaataaaagacttgaatgaacgaaaatgacatatatgatgatttgtacttctcaaaggaaaagatctctttcttccgacctagccttatgtgccaatactctgtgtctatctccagctccacaggtggaggctttgttgcaaccaatccattcaccaccgtctgcttgagacacttaaacataccaaacaagaccctcctagcttttgttggcaccagcggaacagcaacattcagcaccaagatcaagagcataccttgttgggtgcataggtgagcacatacctgaatattatattagagcctgcaatccactgttcttctcaaacatggtgatttttttaacagcgccaaaaacagaaaacacctaaaaatatcacattaatgtaactatacaactggctttcatgtcagctctttatttgaattaaacaaaaggtattgagttattcttacagtttgcagaacatccaccgtcacagcatattgcatgttctcaaatctcaactaatcctaaaagcacgctgctcttaggctccggcctatcgtgggctgcaaaatcccctcaattattatttggttgacaaaaaggtcaggattggtgtaatcccttttaaagcaacaaaacagtgtcacaattcacaagggatacttagttaatattatcttcgaagcattatcaataggaagccgcaaaatgtagcatatgacacttatcaacatgaagtggtaagactctgcctataccactttctagtacctgttgtggtgcgactaaaatttgatattcaaatctttatgtgcaaaaaggctatggacatgtggcaggcgtcgttatgttcgggaaggaaatatatgaaggagagtaagtcgcataagtaatttcatatcacaggcttgataatccacaatagcaattagtaaattcgtaaaatgcattacttggggatgcttactccatccaatgactttttaacttcaagagtagttggggcattagtatattggataagtgtctatcaaaagtctgacagttaagctcactgcaaaatagaaaagtgtttggcaaaaacacaagttctgaatggataaatataaaacaatgttctgaatggataaaatagagaagtgttctacaaaaacacaggtctacaaaagcacaatgactttttagcttcaatat

SEQ ID NO: 27519 - DNA, 1601 bp, Zea Mays
cttgtgcgtccctgtcctcctgctttcattcttatcgcgcggaaacttcctcccttccactctgccggcaggtcccgccggtgccggtgggacccacgcaataatttagacccaatcaaaccacccacacaacgcaacgtggcgcggcgcccacagaaaatccgtccgagcccccgtttagttcagctggcagctgactggctataaacacccgacccagctccgcagcgcggcacggcacacggcttttggcagctacaaaccacccaaaagccacccccagaaaccggcggtccttgggtgttccggatctgagccagcagctgagaagaggatgagcgccgtggccgccatggcgacgtcgtcgctgaaccccaacgcgccgctcttcatcccggcggcgtaccggcaggtggaggaattctcgcccgagtggtatgagctcgtcaacaccaccgcctggttccgggaccactggttccgccagcaccagcaccacgaggccgccttcgccgccgccgccgacgccgagctcgacgtcgccgcgctcctccccgacgactccgtcgacctcctcgacaccgacgacctcttctacgcgcctgacgtccaccacccccacaacgccaagccggcgctgctgcccgggtacgacctcgacatgctcagggcgctgagcctcagctccccccgggccgccgccgcgccgtcgccgtcgccgttgctgcgcgcccagcagcagaggcacgcggacaggccggcgcaccacgccaggggcgccgcgcgccgcgtcatcatccaccagcctcgctagaagcagcctgctcatggcgggccgccgccatggctgttgtgcctagtgtaacctcaagcaagtctagtctgtttctgtctgtgtatacgactaaaaaaacaacagatggaagattcggacgaggcggccagtgctctctcctcgtagccagcttctcctgttccagctcagttcttgttcatccagcagagcacccaaaaaaaaaaaaacaggcggagtgatgtacttactattcctcctcctcctcctcccatgtccatgttgttgaatatatatatgatggcaagcagcctgatcttttcaattcttcttccattactacctcgctttgcttcagttgtcctatgattcagatggaactgagttgtcaacgactccaggatgctacatgtgccgagctactctccagatgactttcgggatgtctagctgtcagcatccactgaagaagaatcggtccttgaaacgaaggccgtaggaagcactgatggaccactgattttaccaccaaacaacaggtgtaacataaagcaacctacgccagttgcactgtctgtcagcaggtataaccgatggtagtttagcaacagattgcaaccagactagctcagtttgctccagaacatttgcgctataccagatttcctaagtcgcagccacttcagtccattcctcagaaagccacaaagagaagtccatgtcggccgcacaccttccttacagacgtcaggacgactccttgacagggacatgacaccttcaaaacgaataattcgaagctttttat

SEQ ID NO: 27520 - DNA, 2295 bp, Zea Mays
cactgtagcacatgcctacagatggtcatcgagatgacgccaccctcctccggccgtctctcggccctcctccgccggtgcgcagcgagcggcgcgctctccccaggcgcgcagctccacgcgcaggcactggtcggcgggcgccttccggacaccaccctggacacagacctcgtcctgctctacagccgctgcggggcgctccaccgcgcccgcgaggtgttcgacggaatgccctctccgtccatgcacgcgtacaacgtcctcctcgcggcctcccctcccgatgcggccgtgaagctcgtgtcccgcctcgtcgcctcgggcctgcgccccgacaggtactccgtccccgccgtgctccgcgcgtgcgccgagtcgcgcgacgcgctcctcggttccgtgctccacggtttcgccgtccggctcgggttgctggccaatgtcgtggtctccggcgcgctgctggacatgtacgctaagaccgggacgctgggtgacgcgggcagagtgttcgacgagatgccggagagagacgccgtcgcgtggaactgcatggttactgggtacgcgagggctgggaggtcagaggaaaccctggaactctttcggaaggcgcagatcgagtccgcgggtatggcgagggatctgcgggccgtgccgagcgtgctgaatgtctgcgcagacgaagggcagctgatgaaagggagagagatccatggcaggatggcgcggtgccttgcttctagttcagataccgtggtggggaacgcgttgatagacatgtacggtaagtgtggccaggttgacggagcgcaggcggtgttcgcgagcatggaggagaagaacgtggtgagctggtcgtcgctgatatcttgctacggcgtccatggcatgggaaaggaagcgctgagggtttacgaggagatggtgtccgttggggtgaagccaaactgcgtcacgttcgtctcaatcctgtcgagttgcagccactccgggctcgtgagcgatggccggaggatcttcgagtcgatgcgcaaggtccacgcggtagagcccaccgctgaccactacgcatgcatggttgatctcttggggcgtgccggagccatcgaggaagctgttgggctggtaaacgagatgcctatggagcccggtgctagtctgtggggagcgttgctctctgcctgcgcgatccataacaacgtcgatgtcggagaggttgcggcttataggctgttcgagttggaagaagacaatgctagcaactacgtcactctatgtggcatatacgatgcgattggccgatctgacagtgttgcagggttaaggtcgaggatgagagagctcggcatggtgaagacgcctggctgcagttgggttcatgtgaagggaagagcctacgccttctaccaggggtgcgtgccacggtacttgaggagacagatgcttcgcgttttaggccatctgctcgaggatatggctggttcaggatatgagaatgaacatctgagcatgtgccatgggatagttgggtactgaatccgtgatgtgcagttccagtgttgcagagtcgttttaatctgaggatagtaaaagcaagcattctgaaagccagttggcttagctttaatccgtatcggacagctgcagcagtccgaacatctggcttgagttgattgacactgtgctgcacgtggacagttttctatgatgcgcagcaagggattttatgtgttgttctgcccagttctagaggacttggaatacgtcatgaccaaatctgtagtattgtgctgaatcgtgaagtgtggtggttcattgaaggaaagaaatgtattctctaactcccaccgcagcaacaggagattctgcggtcgagctatacagcaggtgtctgaaaccaagtgattgtgaacatctgtggtagatagggaggaaagagaaatgatggacttgtctatatagcaacatgctggggttgatgctgcttgtggtggtcatcacgaccgggaatgtttttcagtcacaggagagacatgcacagacgacccaagtgtagaaatttgtcgcgttgattagtaccagttctgttcgctgttgatggttcttgtgcttgtattgtaccctctatctatatgcagggaagagatgacagacaaggaaaccaatggattgttgtgcccttttgttgaccgaaattaaatgcgtttggttctcgtggccgttcgccagaagcgctgaactgaactgaactgaagcaaatggtcaaccggtggatgcaatgcacatgct

SEQ ID NO: 27521 - DNA, 3954 bp, Zea Mays
ttgaccggtccttgggagttccagcactgggaaaatttcctcttcgctgtgccatgcgcttccgcttcagtggcatctgttctctccattagtgtcatctccgtttttatcatcctttgtgcttctgaatttaggagggaatatgatggcgcctcccttcagatgaggatggcatattgccctgctgcccactttttcctttttcttgtgcagtggacagactgcaaccttgctggtgcacttgggctgttgaggattctaatttataaggtttacgctgatgggacaaccaccatgtgtactcatgaaagaaaagcaagcattagggaattttatgctgtcatatttccctccttgatgcaattacatgaaagaatcaatgaagtggaggatagaaaacagaaagcaatatgtctagagaggtacagaagacgagatgaggatccgaaaactgtggtatcagagattgatgataatatagaggaggaatgtggcatatgcatggaaataaatgtcaaagttgttcttccaacctgtagccacgctatgtgcattaaatgctatcgtgaatggtacgaatctgcactcccgtttctaaaggttttgataattttagctattatgttgttcagacagttatgcactcctgcctgctcaagatgaaatactacgacatgtggaataatttctagtgtaacatgttgggatacatgtatattgttatgaatgttcaatatgagggcactaggcctgaatatatacaccgagaggatagagaccgtgtacaacaaggacttcatatatgagacaacatacaacaagacatatgcatagacatctaacacccccctcaaattcaaggtggatcaaacataccaaatttggagagataaaacctatgctaagttgtggtcttcttcttcttgaagaaatcaatgaactaaagctttgaaggcacatagcgaagatcattcatatcatcctatggtggctgcatgtggacctcttcacgtggctcaccattgagaaaggcattcttgatatcaagttgagagatgaaccactcacgagcaagaagagtgcaaacaatggtcatgtgagcaataggcgtaaaagtcccatcggtgtcatgaccatgttcctgttggaagccacgggtagctaggtgagccttataacgctcaaaagagccatcagagcaggtcttaatctttatagacccacttgtgatatggcagacatgtggtggacaaggaacaagtttccacgtgccggtacgctaaagagctgcaatctctttagccattgcatgttgtcatttctaatgaagaataacatcatgataaatggttggctcaggaagaagagtagcagcaaaacctaaaggaaagtattggtcaggttgctaacaaaatgatgattctgtctaagggtcagctgcggtgaagaattagcagaagaagctagttcaataggagttgtctcatcaaatgaaggtgaatcatcagagggaagatgactcaacagcaaaagatgacacaacaaaagagggtagctcaacagagaaagatggtgtaccagaagaatctatgacccgacgagtgtagacatgtgtcaccagaggcttcctattgtagtcagaaaccaaggaaggagattatgaaggacacacaaagggaggtaccactaaagaaggcacaacagaagttggaaggactccaccaaggggtgctctaagcgtgagacatacggtaggagtaggagcatccaggaagaacaaaaaagaaaggggatcaaccaaggatgttgatgaagcatcagaagaaggacatggataaaaaggacgaacctcatcaaagacaacatcccaaaagatcctcatctgacgagcaactggatcccaacaatgatatcccttatgctcaacactatacccgatataacacactcaaccgactcaacaattgacttagtgcgctaacgaggtgggagcgacacatagcagacacaagcaaacaaacaaagacttgaatggtcaggcgtcttaccacaaagacgctcaaaagaaaaatctttctctgaagagctgaggaaggtttaatgttagtcaagtggcagtagaaacaacctcgacctaaaaatgaggagggatggaagaggcaagcataggagcacaagtctcaagaagaagacaatgcttgcgcttagccacaccattctgagcatgagcaccaagacttgaaaactaggcaaaagtcccttgctcaaaaagtacctgacaaagaacatcagaggactcacatgtagagtcaacgcgaaagacacaaatagaggcatcaaaataagtgtgaactatagcagagtcttgccaaaggggctctagcctagtggttaaggacttccgagtagcacctccaagtcgtgggttcgattcccctcgggtgcgaattttcaggcttggttaaaaaaaatcccctcgctgtgccccatccgctctcgggttacgatgtcctgtgcgccaccctccggttgggccgttgcagagtggacggttgacgccggcccgttagtgatggggtgccagggttcggggattttctcggccgggaccattgtttcggtctcttcttaatataataccgggagggcaatctttccctccccggccgagttttttttctatagcagagtcttataaatggataacctcactattatgtttcatgaaataaatctatgtggtgaaaaaatcatctataaaaatgatatagtaccaatggctcctttaggaacaaaacaagcagaaccccatacatgagtgagcaagatcaaaaggatgctgagaaacagactcactagaatggtaagaaaattgtacctactttcctaaccgacaacttttgcactgatgtaaagattcacgacctataccgaacctaaatgaccatgaataatcaaagtgcataatagggagccacaaatatggcccagacgatgatgccactgagtaaaaacgaagtcaacacagaaaaaacggaccaacaagatcggcaaacacatcgaaagaaagacaaagccagtgaatcccagaggcactgagtcacagtggtgagatgtttgataaatttatggattgttagtactaaactgaaaagaagtgtcttggtcggtgtgtcattttttgtttgccatgagctccatattacattacaagatcaattcacccttatgaatcattgaccatgaatcttgatggtatgtccgtaactgccattttgctttgctagccattctgtccttcattcttttgccactgtgttccataagttagtggttgatcttcacacgagattagttgagcaacaaactgtaatgggaaaaaaggttgctaattttttttatggctaactaatatcagcttccattcttgcttttcgatgtttacttgctcttgatgtaataatacaatcctatggcatgaggtaggagttttagggcagaacttgaagttatttttcaatacacattttaccacgataccagaattcaggaatgggcgctgcagacttgaataatagtctgataatgtaatgtaacttcaataataaaatgacaacataaggattaggttagaacaatagattaacagcttgtagtgagcctaaaggagaccaagatccatattgtggacttctcttgaacatggttaggctatcttcagcagattccgcatctttcctatttcaaactttattttgtaaacagtgcagtctacattgcaaaatagtgttttgcacggtcatatgcacgatctgctgaggacggccttaggcctgaatttaatgatatcggcggcgactggtgactggtctgtatgttccaatggtgttcctatgtgtcaaccctgcactgcgtgccttgagatatccactgggcttgtttacttgcatgtat

SEQ ID NO: 27522 - DNA, 4265 bp, Zea Mays
actagagtctagactagagccgcccgcccgcccgcccgcccgtgtgccgtttaccggagcacaacacaacgcggccccctcacggcgtggagtggattgggccgacgccgatcgagagcagaggagaggagcgcggtcggatagggtttgtctgggtgaggttttgagcgagagcgcagggcgagggaaggaggaggaggaggactggctcctggaggaggaggccggccggggcttggatggtcgcggagcgctcccgtaggtggtgtccatgggaaggtcgttcagggactcgctcaaggtgctcgaggccgacatccagcacgccaactccatgtgagtagccaagctcgcattccttctcgcgccatgtccagtgctcacttgctcagctcagaggagacctttgaccggtccttgggagttccagtgcttctgaatttaggagggaatatgatggcgcctcccttcagatgaggatggcatattgccctgctgcccactttttcctttttcttgtgcagtggacagactgcaaccttgctggtgcacttgggctgttgaggattctaatttataaggtttacgctgatgggacaaccaccatgtgtactcatgaaagaaaagcaagcattagggaattttatgctgtcatatttccctccttgatgcaattacatgaaagaatcaatgaagtggaggatagaaaacagaaagcaatatgtctagagaggtacagaagacgagatgaggatccgaaaactgtggtatcagagattgatgataatatagaggaggaatgtggcatatgcatggaaataaatgtcaaagttgttcttccaacctgtagccacgctatgtgcattaaatgctatcgtgaatggtacgaatctgcactcccgtttctaaaggttttgataattttagctattatgttgttcagacagttatgcactcctgcctgctcaagatgaaatactacgacatgtggaataatttctagtgtaacatgttgggatacatgtatattgttatgaatgttcaatatgagggcactaggcctgaatatatacaccgagaggatagagaccgtgtacaacaaggacttcatatatgagacaacatacaacaagacatatgcatagacatctaacacccccctcaaattcaaggtggatcaaacataccaaatttggagagataaaacctatgctaagttgtggtcttcttcttcttgaagaaatcaatgaactaaagctttgaaggcacatagcgaagatcattcatatcatcctatggtggctgcatgtggacctcttcacgtggctcaccattgagaaaggcattcttgatatcaagttgagagatgaaccactcacgagcaagaagagtgcaaacaatggtcatgtgagcaataggcgtaaaagtcccatcggtgtcatgaccatgttcctgttggaagccacgggtagctaggtgagccttataacgctcaaaagagccatcagagcaggtcttaatctttatagacccacttgtgatatggcagacatgtggtggacaaggaacaagtttccacgtgccggtacgctaaagagctgcaatctctttagccattgcatgttgtcatttctaatgaagaataacatcatgataaatggttggctcaggaagaagagtagcagcaaaacctaaaggaaagtattggtcaggttgctaacaaaatgatgattctgtctaagggtcagctgcggtgaagaattagcagaagaagctagttcaataggagttgtctcatcaaatgaaggtgaatcatcagagggaagatgactcaacagcaaaagatgacacaacaaaagagggtagctcaacagagaaagatggtgtaccagaagaatctatgacccgacgagtgtagacatgtgtcaccagaggcttcctattgtagtcagaaaccaaggaaggagattatgaaggacacacaaagggaggtaccactaaagaaggcacaacagaagttggaaggactccaccaaggggtgctctaagcgtgagacatacggtaggagtaggagcatccaggaagaacaaaaaagaaaggggatcaaccaaggatgttgatgaagcatcagaagaaggacatggataaaaaggacgaacctcatcaaagacaacatcccaaaagatcctcatctgacgagcaactggatcccaacaatgatatcccttatgctcaacactatacccgatataacacactcaaccgactcaacaattgacttagtgcgctaacgaggtgggagcgacacatagcagacacaagcaaacaaacaaagacttgaatggtcaggcgtcttaccacaaagacgctcaaaagaaaaatctttctctgaagagctgaggaaggtttaatgttagtcaagtggcagtagaaacaacctcgacctaaaaatgaggagggatggaagaggcaagcataggagcacaagtctcaagaagaagacaatgcttgcgcttagccacaccattctgagcatgagcaccaagacttgaaaactaggcaaaagtcccttgctcaaaaagtacctgacaaagaacatcagaggactcacatgtagagtcaacgcgaaagacacaaatagaggcatcaaaataagtgtgaactatagcagagtcttgccaaaggggctctagcctagtggttaaggacttccgagtagcacctccaagtcgtgggttcgattcccctcgggtgcgaattttcaggcttggttaaaaaaaatcccctcgctgtgccccatccgctctcgggttacgatgtcctgtgcgccaccctccggttgggccgttgcagagtggacggttgacgccggcccgttagtgatggggtgccagggttcggggattttctcggccgggaccattgtttcggtctcttcttaatataataccgggagggcaatctttccctccccggccgagttttttttctatagcagagtcttataaatggataacctcactattatgtttcatgaaataaatctatgtggtgaaaaaatcatctataaaaatgatatagtaccaatggctcctttaggaacaaaacaagcagaaccccatacatgagtgagcaagatcaaaaggatgctgagaaacagactcactagaatggtaagaaaattgtacctactttcctaaccgacaacttttgcactgatgtaaagattcacgacctataccgaacctaaatgaccatgaataatcaaagtgcataatagggagccacaaatatggcccagacgatgatgccactgagtaaaaacgaagtcaacacagaaaaaacggaccaacaagatcggcaaacacatcgaaagaaagacaaagccagtgaatcccagaggcactgagtcacagtggtgagatgtttgataaatttatggattgttagtactaaactgaaaagaagtgtcttggtcggtgtgtcattttttgtttgccatgagctccatattacattacaagatcaattcacccttatgaatcattgaccatgaatcttgatggtatgtccgtaactgccattttgctttgctagccattctgtccttcattcttttgccactgtgttccataagttagtggttgatcttcacacgagattagttgagcaacaaactgtaatgggaaaaaaggttgctaattttttttatggctaactaatatcagcttccattcttgcttttcgatgtttacttgctcttgatgtaataatacaatcctatggcatgaggtaggagttttagggcagaacttgaagttatttttcaatacacattttaccacgataccagaattcaggaatgggcgctgcagacttgaataatagtctgataatgtaatgtaacttcaataataaaatgacaacataaggattaggttagaacaatagattaacagcttgtagtgagcctaaaggagaccaagatccatattgtggacttctcttgaacatggttaggctatcttcagcagattccgcatctttcctatttcaaactttattttgtaaacagtgcagtctacattgcaaaatagtgttttgcacggtcatatgcacgatctgctgaggacggccttaggcctgaatttaatgatatcggcggcgactggtgactggtctgtatgttccaatggtgttcctatgtgtcaaccctgcactgcgtgccttgagatatccactgggcttgtttacttgcatgtat

SEQ ID NO: 27523 - DNA, 1161 bp, Zea Mays
ttcgatcgttgcggttgccgggcgggcgcgtcgtaaggcaaggcaaggtaagtgacgagacaaagatggtgcaggaggagctgccgcaggcatggtggttcgacagccacaacctcgcgaggccgtcgccatggctgaacagcacgctctcagagctggatgacaagaccaagcaaatgctgaagctgatcgaccaagacgcggactcgttcgcccagcgcgccgaaatgtactacaagaagcggccggtgctggtggacatgctcggcgacctgtaccgcacgcaccgctcgctggcggagcagtacgacctgctgaagcacggcagcggcacacggcacacggtgttcggcctgtcttcctgcacacagagccggtcgtcgacgaacggcaggaccactcctcgctcctcctgctcggcctctacgtacgactcggagtccgaagtggacgaccccgggcaggaagaatacgaggcagagcagctggcgcgtgcggggatggccaagacggagtcgccgccgccgccgccggagcagcagcagcaagaacagcgtgagcaggcggagcagcagatgcgcgcggagatcgagaggctcaaggcgcagaacgcggcgctgcagaaggcggccgaggagagcgcggcggcgctcagggcggagctggccgggaaggacgaggagaagcgggaggtgatcaggcagctggcgtcgtccatggacgtgatgaggcaggagaacctcacgctgcgcgagcacatcagcaggggatcgtcgaagcgttcctctgcgccccgcgcgggagctgcgttcgatctcaggaaggtggccaggggcctcttctccgcgaggctgttcaccgcgcactgcaggcctacgggccccatcgtcgcgctctgagcaggatgccaggatcgtgaagagagacagcgtagatatgcatttgttgtaggcgagtgatgtgcatattataggatggcatcgatcgatattccctccgctgtctgtttctcaggttcaactaaactagagggagcactcgttttttactatgatggcgtagtagtagtagttaactgtagttaaatatttactagtcatatggatgcatgtttgtatgatggcgttaattattgttaagtattattttgtcagttcctca

SEQ ID NO: 27524 - DNA, 1388 bp, Zea Mays
catgaacctagggccctgtccgaacgcgcctcccacggcggcgcgtgcgactccccaacatgggaaataaatagatgtcccaattacccatcgagccgtcgtcgtggagcggcaggatttgaaaaatctcgcgagagggccttgtccttgtccacttcctccgcttcgccgtccctcaaagcagcggaaggggagaggccagggtgcagcagcaggaccccaacggcaacctccgccacgcaccacggagcaaccaagcagcaggcaaggcaaggtaagtgacgagacaaagatggtgcaggaggagctgccgcaggcatggtggttcgacagccacaacctcgcgaggccgtcgccatggctgaacagcacgctctcagagctggatgacaagaccaagcaaatgctgaagctgatcgaccaagacgcggactcgttcgcccagcgcgccgaaatgtactacaagaagcggccggtgctggtggacatgctcggcgacctgtaccgcacgcaccgctcgctggcggagcagtacgacctgctgaagcacggcagcggcacacggcacacggtgttcggcctgtcttcctgcacacagagccggtcgtcgacgaacggcaggaccactcctcgctcctcctgctcggcctctacgtacgactcggagtccgaagtggacgaccccgggcaggaagaatacgaggcagagcagctggcgcgtgcggggatggccaagacggagtcgccgccgccgccgccggagcagcagcagcaagaacagcgtgagcaggcggagcagcagatgcgcgcggagatcgagaggctcaaggcgcagaacgcggcgctgcagaaggcggccgaggagagcgcggcggcgctcagggcggagctggccgggaaggacgaggagaagcgggaggtgatcaggcagctggcgtcgtccatggacgtgatgaggcaggagaacctcacgctgcgcgagcacatcagcaggggatcgtcgaagcgttcctctgcgccccgcgcgggagctgcgttcgatctcaggaaggtggccaggggcctcttctccgcgaggctgttcaccgcgcactgcaggcctacgggccccatcgtcgcgctctgagcaggatgccaggatcgtgaagagagacagcgtagatatgcatttgttgtaggcgagtgatgtgcatattataggatggcatcgatcgatattccctccgctgtctgtttctcaggttcaactaaactagagggagcactcgttttttactatgatggcgtagtagtagtagttaactgtagttaaatatttactagtcatatggatgcatgtttgtatgatggcgttaattattgttaagtattattttgtcagttcctca

SEQ ID NO: 27525 - DNA, 1635 bp, Zea Mays
gttaaactctcttatatctctcttcattaaattgtatgacatattatctttttggcttatatggcatgttatcgtttttatttccatctcctttaagaaccttcatcctacgcattaaatcaaaggacgaaggtccaaatacttaacttgttttcgacacctttagaaaatcaaatatcaacagtagacatatatgtagaatacatacagctctggtaaacgctgagccaaaatagcgggcttcgcgctcaactacggggcggcgtgctgctgctgctgcatggccatctacagactacagagtgtctttgtactggcacccaccatcgacctacaacaactacaagacagtagcgacgagtgagggtgacgaccgtgcgagttgtaggcctctatcgtcccctctccctttcgcgccatcaatcctgtgcctcctccgtcctcactgcaacaaatcgcgctcgtcccaaccagatcccccgggggtcttgtccgctgccgtgatccgccgcaggtggcggaagccatgtccgacgcggacgcggccggcagcaaggaggcgccgagatgcgactactgcatgggcctgccggccgtggtgtactgccgggccgactccgcgaggctgtgcctgccgtgcgaccgccacgtgcacggcgccaacacggtgtccacccgccacgcccgggcgccgctctgcgccaggtgccgcgcagccgccgccaccgccgtcgcgtccccccgcggcggcggcggcggcttcgtctgcgccgactgctactgcttggagaaggaggacgaggagaagggggaggagcaccgggacccgcggccgctccaccacgaccatgacgcggtggaagagtacgccgggtgcccttcgatcgccgagctcgcggccatcctcggcgtcgccgggtacgacgagaaggcggcggcggcgggcggggacgtcggttggtggtccacctgggaggagccccaggtggtgtgcttggaggacgtggtcgttcctaccacatcttgtcatggcctccatccgctcctcgcaccgccgtccccaaagaaccggagctccggcggtgagctggctgacgtggtaatccggcagctggaggagctcgccaagtcggaggcggcggccgtggcggcgtcttacgcggagctggagccgggtgacggcgagcagctgcctccatgggcgtcgccggagctcgacattggagccgccgcagacttcggggctctcgacgctgctgacgctgacgccgcctggcatgatgcagcgaccatggctttcgcagcagtgccttcccacgaggaggcgtggatcgcgaccgcctgtgacgtcgacgcgcgccgggcggaggtggaggtggaggaggcgcgcgagcaggctgctccggcgccggacgagccgtgcctgtcctcgttcgtggacatgtcggagatcttccccgccagcgtcacgctcagcagcggcggcgacgtggacaatagcggcaacaagccagacgaggaaacggccccgcgaccgcagctgttggccacgacggcgctggtgccggtgacggaaaagaagggcggctacgacgtggcccaccccgaccgcggcacggtgatctcgcgctacaa

SEQ ID NO: 27526 - DNA, 1531 bp, Zea Mays
ctcgttctcagtcggtgggcgacggtggaaccagaccaggtagcagcgcacaagacgagatcccaacctcgcgatccactccgagtcgcccctccccttccgccgccgatggcgctgccgtcgagcgcctcgcattcggcgcggctgcggctgctcaccgtgccggcgctgcttctgctgttgtcctccgccgcgctgctcgtcttcctcgtcctcccctcgctctccccctcctcggcctcctcctccgccgcctccgggcacctctgtgcctgctcgccccccgccacccacaccaccaccaccgtcaccaccaccaccaccaccgcctcccctgcgcccgtcaccacctcccccgcggacgtcgcctggctgaaggcccagctcgcgtccaactccctcctcctcgccgctggcggcggccacgacgcctggcaccgcctgcgcaagggcatcaacccccgcacacgagagcagcagctcttcgacatcaacaggtatgcctggcctgcacctgcactcctagtcccgaatcgctgctactcttgtccgtggagttgacatcttagtgttgcacaaccgcactgtagacaccatggcatctctcactatccggacgaagaggcaaccaaccacaccgcgctgccgtgccccggcgagctccttgtggaagagcaccacagcaactacggcgagccctgggccggtggccgtgacgtcttcgagttcctcgctaacgcctccgtgctgacgccaacggagcaggtccttgaaatcggatgtggtacgcttcgtgtcggcctgcatttcatccggtaccttgaggctgggaggttccactgcctggagcgggacgagctgtccctcatggctgcgctccggtacgaactgccggcgcaggggctgctttacaagcggccgatgattgtgagaggggaggatatggacttcagcaagtttggggacacagttatgtatgatctcatctatgcgagcgccgtgttcctccatatcccagacaagcttgtttggactgggcttgagaggcttgcggggaagctgaggccacatagaggccggatttttgtctcacataacattaagttttgctcaagactgggaggcgatgagtgcacacgacggcttgccaaattgggccttgagtatgtggggaagcacactcatgatagcttgttgtttaaccactacgaggtctggtttgaattccgcaggccaaaagtttagatcttgatggtacagaaagagagagtggttggcttctgtgatgcaattttggcagtttcaagcacagattaagccatgccttgtactgtttgaacactactgggacctgacttgagattgagattgatgttcgctcggtgcctaattcaagcatatgcatatacaccaaaagtcatgattgagcaatgctgtggtgcttcagtgtgtcttcccagtttcattcgaatcgatttacttcctgggactgggtggctgggcaataatttgatgtgtctccactttggag

SEQ ID NO: 27527 - DNA, 659 bp, Zea Mays
atgccgaggagactcaagactaaacttggaggtgctactgaagaatgtgactttgattcaaagggaaatctcggaaacctgctcctgatcattgtcccgactgtatgcgacgaagacgggaacccgtttggggatgattcaagcacttgccgctcacgcagtctctcctacttgtccttgtccatggctctgggttgcctcttcatatggacgcacacgtacagcctgatgcagaagtccggcaagctgtacaacaagatgcagtctaaaagcatccagtgcccagccgacagtgacgaggagcatgagcacgcgaaagaagatgggccagctggctgcgctgacgaggaggcacctcttccgacgtcagtcaagcctcgcgagcacgagcacggggaagaggaagaacaccaaatggaggcccctcccttgtcctgcgagagcgaggtcgctgacaaggggttctggacgaagctgaaagacgctatccaccagttcatcgaggagctgatggcaccgcgcaccatatccgcgataattgggttcgttgttggcctggtcccatggctgaaatccctaatcgttggcgacggagctcctttaaaagttatacaggattccctccagctgatgggcgacggcacgatcccttgcatcac

SEQ ID NO: 27528 - DNA, 1790 bp, Zea Mays
attcatcccgttcttcatcggatgcgtcccgtccatcgcagatttgggattgcgttcctgatctaagcccggcatgaagggctgctcagagcgtttgctgctcctgctgctgctggcatcgtcgttgttactgtccgtcgtggttgccgcgcagcagacttgccctgccgacctcgacagcaaatgcgacggtggcgcgcctgatgactgggagggggaattcttccccggcgtcccgaaaatcaagtatgagggtccaacaagcaagaaccctcttgcttataagtggtataacaaggaggaagtcattctcggaaagaagatgaaggactggatgcgcttcagtgttgcgttctggcacacgttccgtggtactggtgctgatccttttggtgcgcctacaaaggtttggccttgggaggacggcacaaattcgttggccatggctaagagaagaatgagagctcactttgagttcatggagaagctgggggttgacaaatggtgcttccatgatagggatattgcccctgatgggaaaactctcgaagaaacaaatgctaacttggatgagatagttgagctggcaaagcagctccagggtgagaccaatataaagccattgtggggtactgcacagctctttatgcatcctcgttacatgcacggagctgctactagcccagaggttaaagtatatgcatatgcggctgcacaagttaagaaagctttggaggtcactcactacctaggtggtgaaaactatgtgttttggggtggaagagagggttaccaaactcttctgaacactgatcttaagagagaacttgaccatttggctaactttcttcaagctgctgttgactacaagaagaagattggattcaacggaacactgttgatagagcctaaaccacaggaacctacaaaacaccagtatgactgggatgttgcaactacgtttgcttttctacagaagtatggtcttaccggagagttcaagattaatgttgagtgcaaccatgctactctatctggacatagctgccatcatgaactggagactgcacgcattaatgggctgcttgggaacattgatgcaaacactggtgatcctcaagttggctgggacacggatcagttcatgacagacattgcagaggctactttggttatgtcaactgtggttaagaatggtggacttgcacctggtggcttcaactttgacgccaaattgcggagggaaagcactgatgttgaggacttgtttcttgctcatatctccggaatggacaccctggcccgtggcctccgcaacgccgccaagctgatcgaggatggttccctagatgctctcgtccgcaagcggtaccagagctttgatagtgagattggtgccttgatcgaggctgggaaaggagactttgaggcgctagagaagaaggtccttgagtggggtgagcccactgttccgtccggcaaacaggaactggcggagattctgttccactctgctctatagatggcgccatgtccgtagcggtagctcctggaataagcaagcactgagcctgcgccctcccaacgcgcgcggtcgtcctcaccagtcaccaccaagggaatgtttctggttgcgcgcgatgaaccatgtacaatacaccgtggaactgaaataaattgaaatagctagtcagaatttttagaactgttgcctctttgtttggaacggaatgaaactgaacttggttagtttgagcttatccttgcattttttctttgatgcggtggtt

SEQ ID NO: 27529 - DNA, 2100 bp, Zea Mays
cgtgtcacatgcgctcgagaatttttaggaaagcgtttcatctgcgagagtttcatttgggggctctaaaatagcctcaccctcctcgtgccttatcttcatctcacctgctctttctcctccgtgctgatcggcagtctctaagctttgcaacaactgatagccgaattccgcgcgccggtccctaaaaaaatgcaagtactaggaagtagataagatgcatttccctgtaatttttcgttattatatatactcagcacgggaaggaggggagacactctgttcaaccaccagccgagttcgcagcggcactccagggtccaggcccagcagcctcttcggctcttcgttgggggggattgcgttcctgatctaagcccggcatgaagggctgctcagagcgtttgctgctcctgctgctgctggcatcgtcgttgttactgtccgtcgtggttgccgcgcagcagacttgccctgccgacctcgacagcaaatgcgacggtggcgcgcctgatgactgggagggggaattcttccccggcgtcccgaaaatcaagtatgagggtccaacaagcaagaaccctcttgcttataagtggtataacaaggaggaagtcattctcggaaagaagatgaaggactggatgcgcttcagtgttgcgttctggcacacgttccgtggtactggtgctgatccttttggtgcgcctacaaaggtttggccttgggaggacggcacaaattcgttggccatggctaagagaagaatgagagctcactttgagttcatggagaagctgggggttgacaaatggtgcttccatgatagggatattgcccctgatgggaaaactctcgaagaaacaaatgctaacttggatgagatagttgagctggcaaagcagctccagggtgagaccaatataaagccattgtggggtactgcacagctctttatgcatcctcgttacatgcacggagctgctactagcccagaggttaaagtatatgcatatgcggctgcacaagttaagaaagctttggaggtcactcactacctaggtggtgaaaactatgtgttttggggtggaagagagggttaccaaactcttctgaacactgatcttaagagagaacttgaccatttggctaactttcttcaagctgctgttgactacaagaagaagattggattcaacggaacactgttgatagagcctaaaccacaggaacctacaaaacaccagtatgactgggatgttgcaactacgtttgcttttctacagaagtatggtcttaccggagagttcaagattaatgttgagtgcaaccatgctactctatctggacatagctgccatcatgaactggagactgcacgcattaatgggctgcttgggaacattgatgcaaacactggtgatcctcaagttggctgggacacggatcagttcatgacagacattgcagaggctactttggttatgtcaactgtggttaagaatggtggacttgcacctggtggcttcaactttgacgccaaattgcggagggaaagcactgatgttgaggacttgtttcttgctcatatctccggaatggacaccctggcccgtggcctccgcaacgccgccaagctgatcgaggatggttccctagatgctctcgtccgcaagcggtaccagagctttgatagtgagattggtgccttgatcgaggctgggaaaggagactttgaggcgctagagaagaaggtccttgagtggggtgagcccactgttccgtccggcaaacaggaactggcggagattctgttccactctgctctatagatggcgccatgtccgtagcggtagctcctggaataagcaagcactgagcctgcgccctcccaacgcgcgcggtcgtcctcaccagtcaccaccaagggaatgtttctggttgcgcgcgatgaaccatgtacaatacaccgtggaactgaaataaattgaaatagctagtcagaatttttagaactgttgcctctttgtttggaacggaatgaaactgaacttggttagtttgagcttatccttgcattttttctttgatgcggtggtt

SEQ ID NO: 27530 - DNA, 1546 bp, Zea Mays
cttgacaatgcctcaatagacaaataatatgcatgcatatgtgatggtttacttacatactgactgatgagcacaatagcaatatcctcccttgcagtaaattctttgaacgcgtcctcgatttgtttaactgtcgtctctgtggaataaaaaacaaactgtattcatactaaaccattggatcattgcaacagtagaggaaacaagcatgaaccctgttgctgaaggcatgctataaacagtttgggtaaaaaattcagggatccctagatttgaacacaaaaaaggaagtagaaatcactagcggggaaaagccaggttcagtcagagttagcatgggagttagagactcacagtatggttaagggtgagatcttagtgttctttaatgagcaggcacgcaaaagggcctctagccgagttggttaggtggtctgagtaacactccgcaggttctgggtcgactacccgtgggagcgaattttcagtctgtggttaaaaaaattccctcttctgtcccacgccaaatcacaggtctaagactcggccccggtcgcggtcgttctcacatgggctacggtgccactgtgtatgggtggggaccttgtgccatgtcatgatttcgaccatccgatcctaagttgccacccatcctaaccgtcagtttcacttcagatttatcttcaagttcataaagtcatgtcaccccatagtgcagcttttcatttcatctttcagcaactaatgcgcgcatgctgccctatttgtgcagcttttcatttcatcttccaacatgtaatgcatgtgtgttgcccttaattatgcatcagggcataatgaacttccccacaagacaccataccataaccaaacaaacaaatccaaaggtcagagaaaccattgaagactaattaaattgtgtgcatgaatggagacacttattgatcttgccttatgtagactttttaaatagcaatccaccaagtagaagccactgtcataccagattgttctcctcacctacgattctactcctgcatcccctcctcggctcctctgaaatgtaagctgcagcatcacagttgacaatccaaagatttgttgcacatcggcaattctctgatcatcaccttcctttcccttttccctcaccatatgcgcccatctactagcacttcatcgactagagctttgctgcatgcacagcattaagtgatggcctccagccacaagcaccactgcatgtgaccgatcgatttacacggccagcccatatgcacgatctggtggccgtagcctaattgagccgagcaaattgtgctgaggactgaccctaaggtgttctgcgggccatcaaggttcggcagggaagtggggaaattcagtacttaggtcctgtcttcggaggataaatccataatagcaatatttattgaagataaattatggggctcaacaataatagtatgcagcagtcaagaagatactcgttttactcactgttgtcgacgaggaggtaattggttttcttgcgcagatcaacatt

SEQ ID NO: 27531 - DNA, 1288 bp, Zea Mays
tccaccagcacaacacatacactgatacacataggttcagctgctcagctcatgcaaaatacactgcacaatgttccctttcccttaaacagtactgtgcaacatgacaatcgcattttattactctctattaaccaaccaaatacagtacaaagcaacaaaatagcattccaaccttttatgaaagaaaaaaaggtgttggtttggttccacaaccattattattgtttgctgtctcgctcggacgcatgccacttcttttcaatacataacaaaacagatacaccaaagggtactactacacaaggatgccttcatcgcctatcagacgccaccgattccgcagagaagagatacttcactcgagacagcaccgagtcgtgcgctggatcatatggatggtccttggatgggatctccagaatagcagggactggcttgttgtagctatccaccagaaatcttatcatgttggcaatctgtcacacgcaatagacatcagcagggatacagcttataagatggacgtttctctgatcacctagctactaccacattgcatgatttccacaatgctcctaaaacctttttcctcctttctcgtattaatcaacgcacactcttacgcataagggcatgtacaaccctaacatcatggtaggttttttaagtagaaaacacaattaagacacatgtaggtacgatgagatgtatctaaaccttatgccttatttaatactaagacatgactctttatgtgagttgtactagtgaagctgtatcttggatttagaaaaccgagatagaggtgtgtcttcatgaagacacttaaccccctagacagaccttaagacacggtgcattaatatgcattgttcatgccctaagagtatccaaaagcaaattgcccaacaattgacactactaatgaacatgcattgattgcagctttggtttaaaagagctggaagaaaggttcggtaaatgaagatgcaagtaaaaagagccaccaacaaggaaggcaacgagtgtactaaataaaaggagatgagagtaccaaagaatgatactagaaaaaaggaactggaatataagtcaactgtcaaagtattatcctgatcaaaatgccaaatttatcctgaagcacaacaatctagtaggagtctgaaaagcaagccaactttagagccactattcttagtatacgagttttaaatattaaaaacaactcgaggacaacctttaagcttccaacaaactgactagaatggtttacatttcatagaag

SEQ ID NO: 27532 - DNA, 2328 bp, Zea Mays
gtcgttacatgtgttcagttcacggatggttgagtttgaaaaaaaaaaatagaaagaaaagtccacgcctcattttagctcactggaaagcccaccccgactaaccaaagcttctatgagcccagcccacctaacctaccaaacaggccgagccatcaacacccggcagcccgccacgccatccatgcaacgacccacactgagacgtcccctccccgctccgtcctctctcctctgccgccgagacgacgcgatggcggggtccgccgccttgccgccgctcgccgccttcgcgtcgctccttaccgcgcggcgcttcgccgccgccaggtccgcgctccggtccctgctcacgccgcgcctactggcggtgccgttcgcggacctcgctgcctcgtcgctcccgcgcggcgcgccgccgcacgccgtggcggcgttccacgatatgctcttccgcgcgtacgcggacgcgggcgcggcgtgccgcgcggccgaggcgctcgacgccgccgtgtcccgcctcggcagcctcgacccgcgctcgctcacgtcctcgctgctctcgctccgccgcgccgggcgcctcgcggacgccgcgggcctcctggagcgggcgctcggctcgtgcccgggctccgtctcgccgctcgccgcgtccgtcgtcgtcgacgggctctgcaagtcggggcgcgtggacgacgcgcgccggctgctcgacgatatgcctcgccacggcgtgagtctgaatgcgctgtgctacaactcgctgcttgactgttacgtgcgacaaaaggatgacgggcgggtccaggagattctagagatcatggagaacgaaggcatcgaggcgacggtcgggacgtatacgatccttgtggatagtttgtcgaccgccagggacatcagcaaggtcgaggctctgtttaatgagatgaaggcgaataatgttgtgggggatgtgtacctgtacaccgccgtcatcaacgcgtattgccgagcagggaacatgcggagggccgccaaggttttggatgaatgcgttggcaatggcgtcgagccaaacgagcgtacatatggtgtattgatcaacgggttctgcaagattgggcagatggaggctgcagagatgttgctggcagacatgcaagggcaaggtgtagggcttaaccaaatcattttcaataccatgattgatggctattgtcgcaaagggatggtggacgatgctcttaaaataaaggcggccatggagaaaatgggcgtcgaactggacatctacacatacaacacactggcctgtggactgtgcagggtgaatagattggatgaggcaaagactctattgcacatcatgatcgagatgggtgtcgtgccaaattacgtcacttacactacactgatcagcatacactgcaaggatggcgacatggtggaggctagaaggctgttccgagaaatggcagagaaaggggcgacgcccagtgttgtgacctacaatgttatgattgatgggtacaccaagaaggggagcatccgtgaggctgagaggttcagaaaggagatggagaagaaagggtttgttccagatgtatacacctatgcatcgctagttcatgggcactgtgtcaatggaaaggtggatgtggcgctgaagctattcgaagagatgaagcagaggggaacggaacctaatgtcgtggcctatacggctctgatatcaggtctggcgaaggaagggagatcagaggcggcgttccagctgtatgatgatatgctgaaagctggattgatcccagatgactccctatattctgcccttgtaggaagccttcacacagataaccggaaagatgttaaggtttcttaggcagcttcgcttttaagggaaagcaacctaagtttttgtaagttaccctgtagcaactgaagaggtcggaagtccagaattaactccataatgttattcagtttacaaggtgggatggagtactagactgttgcatttcagttaaatgacataaggagatctcagctagctgtgatgaagcagcaaaattgcagaaatgattacatgctgacgtgcaatattacatggccacctccagattccaattcctcattgggatggtgtgctgctcctgctagagaccagaccaaaggtaaaaaggaatagaagtcgacagaatgggagggcgcaccgatttcagctgttccacttcagagtcaagtcctttcttgagatcctggagttcctgtaagcaacacaattcaattcaccggtggtatggggtgttcgttactacaagcagcagcagccttgaatttcca

SEQ ID NO: 27533 - DNA, 491 bp, Zea Mays
tgcagcagcattgtgatcaagaaactagtgtgtactggggaagaaaaaacgcgcgagattctcgacaaacttgaaaaatctacctgcagcacaaatccaatttcaacaccagctgttgagaaggttatgaatgcgctcaaagcaagctgtgctgacctccacagcattgtggaggatccccttccagctgcaaaggcagttgcagatgagttattggctgcgaggatggaaaaaagagttagcttgaatgctgaagtaggaggtcagccaacaacttgtggcgctgcaggtccgagtattcataatgacaaagacaacggtccaggtataggcaaacctcacagccttatggagcgaaacgcaacagcacgaacctctcagtgggaggagtcacatggtcttgatggttcggaaccaccatcaccaccgagaccgcgcttgcctagcccaaggagactaccaccttctcctttgccaccgcctgaacaaaa

SEQ ID NO: 27534 - DNA, 553 bp, Zea Mays
ggctcgaggcgttggctatgcggatcgtcggggatggggccgtcgagacatgggctgccgcagatgaggccatgcgtgccaacttgcgcatcttggctggggaagaaaaaacgcgcgagattctcgacaaacttgaaaaatctacctgcagcacaaatccaatttcaacaccagctgttgagaaggttatgaatgcgctcaaagcaagctgtgctgacctccacagcattgtggaggatccccttccagctgcaaaggcagttgcagatgagttattggctgcgaggatggaaaaaagagttagcttgaatgctgaagtaggaggtcagccaacaacttgtggcgctgcaggtccgagtattcataatgacaaagacaacggtccaggtataggcaaacctcacagccttatggagcgaaacgcaacagcacgaacctctcagtgggaggagtcacatggtcttgatggttcggaaccaccatcaccaccgagaccgcgcttgcctagcccaaggagactaccaccttctcctttgccaccgcctgaacaaaa

SEQ ID NO: 27535 - DNA, 1387 bp, Zea Mays
ccgcccatacagcacaacctagggcatcaggagtgggaatcctcttcttctcgcgcagcatcgcctcccaagtccacaacttacgccgccgctcgctccaccgcgcaagaggctgctgctgccgctcacccacccccgctcgcgcagaaggccgccgcagctcttactactggtgccctaaacgccgatatccctgttcgcctccctttccccacccaaaaccccggccttcagggttccggcaccatgccgcagggagatcacatcgagctgcaccagaagcgccatggcaagcgcctggaccacgaagagcgcaagcgcaagcgcgaggcccgcgaggtgcacaggcgctcgaaggatgcccgcaatttgattggtgctaagggcaagaggttcgccaagaaacgctatgctgagaaggcacagatgaagaagacaaggttgatgatgatgtccaagagggtgctcttcctccgtatctgctggatcgtgatcagacacagcgcgctaaggttctcagcaacacaataaagcaaaagaggaaggaaaaggctggcaaatgggatgttcctctgccaaaggtcaggcctgtagctgaagaagaaatgttcaaggttctacgaactggcaagcgaaaaaccaagcagtggaagagaatggttactaaagccacctttgttggagctggatttacaaggaaaccaccaaagtatgaacggttcattcggccaactggtctgcgtttcaccaaagctcatgtgactcacccagagctgaagtgcactttcaaccttgacataatttctgtgaagaaaaacccaaatggtccaatgtacacttctcttggtgttatgacaaggggaacgatcattgaggtaaatgtcagtgagcttggtctggtaactcccgctggaaaagttgtttgggggaaatatgctcaagttacaaacaacccggagaacgatggctgtatcaatgctgttttgctagtgtagagccatagtgagattttgttgatggtggtgaatcgtcccatttgtatctgctccgatatgctattttttgaccatgtcatggctaatcccagtagtttgttgtgcaccatgggcataatgagcattctgtattcacgctgtgtgctacaaacatatatggagtaatataaattagcagtattttctttcgagctacaacgtactgtcttcgaaacagtgtcaaattggactgtttgaaatactacatagtggcatcgtgtgaatgttacatgctgatatatcgtttttgtttaattgtttgtttagcatgtttaattggtcttgtagtctatggtctgtttactcctaataatagccaaacgtttaggcgatatctgcctcgaataaagaag

SEQ ID NO: 27536 - DNA, 1301 bp, Zea Mays
ccgcccatacagcacaacctagggcatcaggagtgggaatcctcttcttctcgcgcagcatcgcctcccaagtccacaacttacgccgccgctcgctccaccgcgcaagaggctgctgctgccgctcacccacccccgctcgcgcagaaggccgccgcagctcttactactggtgccctaaacgccgatatccctgttcgcctccctttccccacccaaaaccccggccttcagggttccggcaccatgttgattggtgctaagggcaagaggttcgccaagaaacgctatgctgagaaggcacagatgaagaagaccctgaaaatgcacgacgaatcaaataaacgacagaaggttgatgatgatgtccaagagggtgctcttcctccgtatctgctggatcgtgatcagacacagcgcgctaaggttctcagcaacacaataaagcaaaagaggaaggaaaaggctggcaaatgggatgttcctctgccaaaggtcaggcctgtagctgaagaagaaatgttcaaggttctacgaactggcaagcgaaaaaccaagcagtggaagagaatggttactaaagccacctttgttggagctggatttacaaggaaaccaccaaagtatgaacggttcattcggccaactggtctgcgtttcaccaaagctcatgtgactcacccagagctgaagtgcactttcaaccttgacataatttctgtgaagaaaaacccaaatggtccaatgtacacttctcttggtgttatgacaaggggaacgatcattgaggtaaatgtcagtgagcttggtctggtaactcccgctggaaaagttgtttgggggaaatatgctcaagttacaaacaacccggagaacgatggctgtatcaatgctgttttgctagtgtagagccatagtgagattttgttgatggtggtgaatcgtcccatttgtatctgctccgatatgctattttttgaccatgtcatggctaatcccagtagtttgttgtgcaccatgggcataatgagcattctgtattcacgctgtgtgctacaaacatatatggagtaatataaattagcagtattttctttcgagctacaacgtactgtcttcgaaacagtgtcaaattggactgtttgaaatactacatagtggcatcgtgtgaatgttacatgctgatatatcgtttttgtttaattgtttgtttagcatgtttaattggtcttgtagtctatggtctgtttactcctaataatagccaaacgtttaggcgatatctgcctcgaataaagaag

SEQ ID NO: 27537 - DNA, 1416 bp, Zea Mays
ccgcccatacagcacaacctagggcatcaggagtgggaatcctcttcttctcgcgcagcatcgcctcccaagtccacaacttacgccgccgctcgctccaccgcgcaagaggctgctgctgccgctcacccacccccgctcgcgcagaaggccgccgcagctcttactactggtgccctaaacgccgatatccctgttcgcctccctttccccacccaaaaccccggccttcagggttccggcaccatgccgcagggagatcacatcgagctgcaccagaagcgccatggcaagcgcctggaccacgaagagcgcaagcgcaagcgcgaggcccgcgaggtgcacaggcgctcgaaggatgcccgcaatttgattggtgctaagggcaagaggttcgccaagaaacgctatgctgagaaggcacagatgaagaagaccctgaaaatgcacgacgaatcaaataaacgacagaaggttgatgatgatgtccaagagggtgctcttcctccgtatctgctggatcgtgatcagacacagcgcgctaaggttctcagcaacacaataaagcaaaagaggaaggaaaaggctggcaaatgggatgttcctctgccaaaggcctgtagctgaagaagaaatgttcaaggttctacgaactggcaagcgaaaaaccaagcagtggaagagaatggttactaaagccacctttgttggagctggatttacaaggaaaccaccaaagtatgaacggttcattcggccaactggtctgcgtttcaccaaagctcatgtgactcacccagagctgaagtgcactttcaaccttgacataatttctgtgaagaaaaacccaaatggtccaatgtacacttctcttggtgttatgacaaggggaacgatcattgaggtaaatgtcagtgagcttggtctggtaactcccgctggaaaagttgtttgggggaaatatgctcaagttacaaacaacccggagaacgatggctgtatcaatgctgttttgctagtgtagagccatagtgagattttgttgatggtggtgaatcgtcccatttgtatctgctccgatatgctattttttgaccatgtcatggctaatcccagtagtttgttgtgcaccatgggcataatgagcattctgtattcacgctgtgtgctacaaacatatatggagtaatataaattagcagtattttctttcgagctacaacgtactgtcttcgaaacagtgtcaaattggactgtttgaaatactacatagtggcatcgtgtgaatgttacatgctgatatatcgtttttgtttaattgtttgtttagcatgtttaattggtcttgtagtctatggtctgtttactcctaataatagccaaacgtttaggcgatatctgcctcgaataaagaag

SEQ ID NO: 27538 - DNA, 1318 bp, Zea Mays
ccgcccatacagcacaacctagggcatcaggagtgggaatcctcttcttctcgcgcagcatcgcctcccaagtccacaacttacgccgccgctcgctccaccgcgcaagaggctgctgctgccgctcacccacccccgctcgcgcagaaggccgccgcagctcttactactggtgccctaaacgccgatatccctgttcgcctccctttccccacccaaaaccccggccttcagggttccggcaccatgccgcagggagatcacatcgagctgcaccagaagcgccatggcaagcgcctggaccacgaagagcgcaagcgcaagcgcgaggcccgcgaggtgcacaggcgctcgaaggatgcccgcaatttgattggtgctaagggcaagaggttcgccaagaaacgctatgctgagaaggcacagatgaagaagaccctgaaaatgcacgacgaatcaaataaacgacagaaggttgatgatgatgtccaagagggtgctcttcctccgtatctgctggatcgtgatcagacacagcgcgctaaggttctcagcaacacaataaagcaaaagaggaaggaaaaggctggcaaatgggatgttcctctgccaaaggtcaggcctgtagctgaagaagaaatgttcaaggttctacgaactggcaagcgaaaaaccaagcagtggaagagaatggttactaaagccacctttgttggagctggatttacaaggaaaccaccaaaaaaaacccaaatggtccaatgtacacttctcttggtgttatgacaaggggaacgatcattgaggtaaatgtcagtgagcttggtctggtaactcccgctggaaaagttgtttgggggaaatatgctcaagttacaaacaacccggagaacgatggctgtatcaatgctgttttgctagtgtagagccatagtgagattttgttgatggtggtgaatcgtcccatttgtatctgctccgatatgctattttttgaccatgtcatggctaatcccagtagtttgttgtgcaccatgggcataatgagcattctgtattcacgctgtgtgctacaaacatatatggagtaatataaattagcagtattttctttcgagctacaacgtactgtcttcgaaacagtgtcaaattggactgtttgaaatactacatagtggcatcgtgtgaatgttacatgctgatatatcgtttttgtttaattgtttgtttagcatgtttaattggtcttgtagtctatggtctgtttactcctaataatagccaaacgtttaggcgatatctgcctcgaataaagaag

SEQ ID NO: 27539 - DNA, 1634 bp, Zea Mays
ccgattggaggcctcttcctggagtcctggaccatcatctatcgtcaatcgtcgcgactcgcgacgaggcgcgccttctccctccgcttccgctccgtttggtttccaccctttccgcgtactccacgtcgccttctcccatctcctctttcctacccaccgccgccgctccagggccccgaaatgtcggacgaaggcggcaccggcgagccgctcagcgacagccagaagcgggagatcgccgtctggttcctctccaacgcacccgccggcgagatccactacgtcgccaaagatgtgcgcgcgctgctaggggacgacgcggtgtacgaggccgccgccgcggaggccttcccggagtacaacaaggcccgcctcgtgtccctcgagctccccgaccgcagtggcgacataatcatcacagcttatggggagattgacaagaacaattatctggaccccaggactgcgcaagttgctagtatagatcatatgaaacagacttgtacgaaactgaggcccgctgaagatgaagagcttccatcggcttacattgaagagtttaggtagactacctgtgcgtctttcctttgacttattccagttaccatattatatcacaactgcacacatgttgtctaatcttatgtattaaaacaggtgtgctttagatgttgaattgtcaaaatatgttgctgaagcttatcccaaagggacctgtgccgtttattgtactagtggaaaggatatagagggaccaggagcagatttctgtttcgcagcagttatttctgctactaagcgtagcccacagaacttttggtcaactgaatattgtgtcatccagcaatggcagttggcgttcaatttggactatggaattcaattatgagttgcagtttgttgatattaaaggaaatatacaggtagatgctcactattttgaagagggaaatgtccagctggatactaacattgatcgcaaggactccaccataatgcagtcacctgacgactgtgcagtttcaataactagcatcattcgacatcacgagtctgaatatttgtcatctctcgaggaatcttacttaaatttgtctgatgcaactttcaaggatcttcggagaaaacttccagtgacccgtactcttttcccatggcataacacactggcagtcagtcttacgagagaccttgccaaacaattagcgcttggaaaatgaagtctttgcaggccatgtcaccggatggcttcaagtgtttttttaatatccatgtgctgttctgtagtaatcagcattcttcatctctgagcttcccaatcccattgtaaatcaagaacacacttttttttttgtggagatgtaaaagatttcgccttccctagggtttctttggatgccgttaggaaccaaacagcctcttactgacgggtgtgaatcatatgtttcttcatcaatgctccaatctgatggattattgtaggtgttctgtatgagtttaaaaacaaggaccattcaaaaggaatgtgtgcgaaactatcctttggatagagattgatctttgagctcagacgaaggatgcacatatgtggtaacaattaggaaatgcttcgagggtggtgtttgtggttt

SEQ ID NO: 27540 - DNA, 1421 bp, Zea Mays
ccgattggaggcctcttcctggagtcctggaccatcatctatcgtcaatcgtcgcgactcgcgacgaggcgcgccttctccctccgcttccgctccgtttggtttccaccctttccgcgtactccacgtcgccttctcccatctcctctttcctacccaccgccgccgctccagggccccgaaatgtcggacgaaggcggcaccggcgagccgctcagcgacagccagaagcgggagatcgccgtctggttcctctccaacgcacccgccggcgagatccactacgtcgccaaagataatcatcacagcttatggggagattgacaagaacaattatctggaccccaggactgcgcaagttgctagtatagatcatatgaaacagacttgtacgaaactgaggcccgctgaagatgaagagcttccatcggcttacattgaagagtttaggtgtgctttagatgttgaattgtcaaaatatgttgctgaagcttatcccaaagggacctgtgccgtttattgtactagtggaaaggatatagagggaccaggagcagatttctgtttcgcagcagttatttctgctactaagcgtagcccacagaacttttgcaatggcagttggcgttcaatttggactatggaattcaattatgagttgcagtttgttgatattaaaggaaatatacaggttggcttttttacttaacaaggtagatgctcactattttgaagagggaaatgtccagctggatactaacattgatcgcaaggactccaccataatgcagtcacctgacgactgtgcagtttcaataactagcatcattcgacatcacgagtctgaatatttgtcatctctcgaggaatcttacttaaatttgtctgatgcaactttcaaggatcttcggagaaaacttccagtgacccgtactcttttcccatggcataacacactggcagtcagtcttacgagagaccttgccaaacaattagcgcttggaaaatgaagtctttgcaggccatgtcaccggatggcttcaagtgtttttttaatatccatgtgctgttctgtagtaatcagcattcttcatctctgagcttcccaatcccattgtaaatcaagaacacacttttttttttgtggagatgtaaaagatttcgccttccctagggtttctttggatgccgttaggaaccaaacagcctcttactgacgggtgtgaatcatatgtttcttcatcaatgctccaatctgatggattattgtaggtgttctgtatgagtttaaaaacaaggaccattcaaaaggaatgtgtgcgaaactatcctttggatagagattgatctttgagctcagacgaaggatgcacatatgtggtaacaattaggaaatgcttcgagggtggtgtttgtggttt

SEQ ID NO: 27541 - DNA, 2020 bp, Zea Mays
ccgattggaggcctcttcctggagtcctggaccatcatctatcgtcaatcgtcgcgactcgcgacgaggcgcgccttctccctccgcttccgctccgtttggtttccaccctttccgcgtactccacgtcgccttctcccatctcctctttcctacccaccgccgccgctccagggccccgaaatgtcggacgaaggcggcaccggcgagccgctcagcgacagccagaagcgggagatcgccgtctggttcctctccaacgcacccgccggcgagatccactacgtcgccaaagatgtgcgcgcgctgctaggggacgacgcggtgtacgaggccgccgccgcggaggccttcccggagtacaacaaggcccgcctcgtgtccctcgagctccccgaccgcagtggcgacataatcatcacagcttatggggagattgacaagaacaattatctggaccccaggactgcgcaagttgctagtatagatcatatgaaacagacttgtacgaaactgaggcccgctgaagatgaagagcttccatcggcttacattgaagagtttaggtgtgctttagatgttgaattgtcaaaatatgttgctgaagcttatcccaaagggacctgtgccgtttattgtactagtggaaaggatatagagggaccaggagcagatttctgtttcgcagcagttatttctgctactaagcgtagcccacagaacttttggtattgtctggttcatgccttctgtcttttccttattcctgaagaaatttgtcatattttcttaaatcttgcacatatggatcagttaggtttgctctgcattagaaaaagactaaaaaatttaacagatcctctttagcctttaaggcgatttagggatcctctgtttctagattctctttagttatagaattatattcaggaaattccttatactttagtttcctatcagtgtctccttgcactcctttgagcatacaacttttagtcttcagatttttcatgggtgtcattttcttgagaattgttgtttgttttgagtatattattttatcattggcctagaaccttatgacttgtttaatgcctgcccgttctttctgtttctctaccagaggaattgcttcacatcatctcaatagaactgttaagtgtgctccaaaaagatttgactttttaatcatttagcctctgatgaaggtcaactgaatattgtgtcatccagcaatggcagttggcgttcaatttggactatggaattcaattatgagttgcagtttgttgatattaaaggaaatatacaggtagatgctcactattttgaagagggaaatgtccagctggatactaacattgatcgcaaggactccaccataatgcagtcacctgacgactgtgcagtttcaataactagcatcattcgacatcacgagtctgaatatttgtcatctctcgaggaatcttacttaaatttgtctgatgcaactttcaaggatcttcggagaaaacttccagtgacccgtactcttttcccatggcataacacactggcagtcagtcttacgagagaccttgccaaacaattagcgcttggaaaatgaagtctttgcaggccatgtcaccggatggcttcaagtgtttttttaatatccatgtgctgttctgtagtaatcagcattcttcatctctgagcttcccaatcccattgtaaatcaagaacacacttttttttttgtggagatgtaaaagatttcgccttccctagggtttctttggatgccgttaggaaccaaacagcctcttactgacgggtgtgaatcatatgtttcttcatcaatgctccaatctgatggattattgtaggtgttctgtatgagtttaaaaacaaggaccattcaaaaggaatgtgtgcgaaactatcctttggatagagattgatctttgagctcagacgaaggatgcacatatgtggtaacaattaggaaatgcttcgagggtggtgtttgtggttt

SEQ ID NO: 27542 - DNA, 1536 bp, Zea Mays
ccgattggaggcctcttcctggagtcctggaccatcatctatcgtcaatcgtcgcgactcgcgacgaggcgcgccttctccctccgcttccgctccgtttggtttccaccctttccgcgtactccacgtcgccttctcccatctcctctttcctacccaccgccgccgctccagggccccgaaatgtcggacgaaggcggcaccggcgagccgctcagcgacagccagaagcgggagatcgccgtctggttcctctccaacgcacccgccggcgagatccactacgtcgccaaagatgtgcgcgcgctgctaggggacgacgcggtgtacgaggccgccgccgcggaggccttcccggagtacaacaaggcccgcctcgtgtccctcgagctccccgaccgcagtggcgacataatcatcacagcttatggggagattgacaagaacaattatctggaccccaggactgcgcaagttgctagtatagatcatatgaaacagacttgtacgaaactgaggcccgctgaagatgaagagcttccatcggcttacattgaagagtttaggtgtgctttagatgttgaattgtcaaaatatgttgctgaagcttatcccaaagggacctgtgccgtttattgtactagtggaaaggatatagagggaccaggagcagatttctgtttcgcagcagttatttctgctactaagcgtagcccacagaacttttggtcaactgaatattgtgtcatccagcaatggcagttggcgttcaatttggactatggaattcaattatgagttgcagtttgttgatattaaaggaaatatacaggtagatgctcactattttgaagagggaaatgtccagctggatactaacattgatcgcaaggactccaccataattcacctgacgactgtgcagtttcaataactagcatcattcgacatcacgagtctgaatatttgtcatctctcgaggaatcttacttaaatttgtctgatgcaactttcaaggatcttcggagaaaacttccagtgacccgtactcttttcccatggcataacacactggcagtcagtcttacgagagaccttgccaaacaattagcgcttggaaaatgaagtctttgcaggccatgtcaccggatggcttcaagtgtttttttaatatccatgtgctgttctgtagtaatcagcattcttcatctctgagcttcccaatcccattgtaaatcaagaacacacttttttttttgtggagatgtaaaagatttcgccttccctagggtttctttggatgccgttaggaaccaaacagcctcttactgacgggtgtgaatcatatgtttcttcatcaatgctccaatctgatggattattgtaggtgttctgtatgagtttaaaaacaaggaccattcaaaaggaatgtgtgcgaaactatcctttggatagagattgatctttgagctcagacgaaggatgcacatatgtggtaacaattaggaaatgcttcgagggtggtgtttgtggttt

SEQ ID NO: 27543 - DNA, 1550 bp, Zea Mays
ccgattggaggcctcttcctggagtcctggaccatcatctatcgtcaatcgtcgcgactcgcgacgaggcgcgccttctccctccgcttccgctccgtttggtttccaccctttccgcgtactccacgtcgccttctcccatctcctctttcctacccaccgccgccgctccagggccccgaaatgtcggacgaaggcggcaccggcgagccgctcagcgacagccagaagcgggagatcgccgtctggttcctctccaacgcacccgccggcgagatccactacgtcgccaaagatgtgcgcgcgctgctaggggacgacgcggtgtacgaggccgccgccgcggaggccttcccggagtacaacaaggcccgcctcgtgtccctcgagctccccgaccgcagtggcgacataatcatcacagcttatggggagattgacaagaacaattatctggaccccaggactgcgcaagttgctagtatagatcatatgaaacaggctttattgttgttgttgccttctcatgataaaagacttgtacgaaactgaggcccgctgaagatgaagagcttccatcggcttacattgaagagtttaggtgtgctttagatgttgaattgtcaaaatatgttgctgaagcttatcccaaagggacctgtgccgtttattgtactagtggaaaggatatagagggaccaggagcagatttctgtttcgcagcagttatttctgctactaagcgtagcccacagaacttttgcaatggcagttggcgttcaatttggactatggaattcaattatgagttgcagtttgttgatattaaaggaaatatacaggtagatgctcactattttgaagagggaaatgtccagctggatactaacattgatcgcaaggactccaccataatgcagtcacctgacgactgtgcagtttcaataactagcatcattcgacatcacgagtctgaatatttgtcatctctcgaggaatcttacttaaatttgtctgatgcaactttcaaggatcttcggagaaaacttccagtgacccgtactcttttcccatggcataacacactggcagtcagtcttacgagagaccttgccaaacaattagcgcttggaaaatgaagtctttgcaggccatgtcaccggatggcttcaagtgtttttttaatatccatgtgctgttctgtagtaatcagcattcttcatctctgagcttcccaatcccattgtaaatcaagaacacacttttttttttgtggagatgtaaaagatttcgccttccctagggtttctttggatgccgttaggaaccaaacagcctcttactgacgggtgtgaatcatatgtttcttcatcaatgctccaatctgatggattattgtaggtgttctgtatgagtttaaaaacaaggaccattcaaaaggaatgtgtgcgaaactatcctttggatagagattgatctttgagctcagacgaaggatgcacatatgtggtaacaattaggaaatgcttcgagggtggtgtttgtggttt

SEQ ID NO: 27544 - DNA, 1099 bp, Zea Mays
ggaagatgatgagagccaggttccattccgttttggcatgcaaaaaggtgactgtttttagccaagaagatgatgagatccactgctcaaagcaagggcaagagttcaaagctcaagcccagagtctccacatcgagatcctccaatccccatggctgtgtagctgaataatggtgcaatggagctctttggcgacggcgacgacgacaggccaacgctctcgtccaacctcttggacttcatgcgtgttgatattagccttacatgttccataatccatatgcctggtgagtttgcacttctgacgagtacagtgctctgtagacagacttggattaagagcacaatgcatccttctctgtcctctctatttaaaatccataaccaaactcttcatccttccatgttttatttatttacaggacacaatgtttgatccggtctctctttcatgtggccacatattctgctacctatgctgctgttctgctgcatccgtcacaccagttgatgttcagcaaggggtcttttctgacgctatgcacctggatgcactcaacatgctgctgagacacaggtaagcacaagcccttagaagagaacgcggttggagcgagttgaacgtgttcgcctggctaaggagcattgggagtcactgtgcagagcatttttaggcatctaagtagccagtcagtcacatttctactggtgggaagatgattcgatttgttaagattgctattggtttgccacaagtttttgtgaaatggggtgatctaccctctatcagcattcaatgttctgccttgtgctcctagctaactagagaaatagagaaactgtagtggttggtggtttgttgttcaagtgcagacatgtgtccagctcggtacagctttatgatttgaacctgaaaagtttgaagttgctcctaggttcacagttgtttatccatctgcaaccaaaaacttcccaaatacataaaacgctcacgaaatgttaatactggggagtcgtgcaatcactagctttagtttccacgacaacatatgagttgaaataaacacaaaacaaaactaagtgtcagttccttgcacta

SEQ ID NO: 27545 - DNA, 710 bp, Zea Mays
catcggcaagtgtggcgccgcacaagaacttaggacacaatgtttgatccggtctctctttcatgtggccacatattctgctacctatgctgctgttctgctgcatccgtcacaccagttgatgttcagcaaggggtcttttctgacgctatgcacctggatgcactcaacatgctgctgagacacaggtaagcacaagcccttagaagagaacgcggttggagcgagttgaacgtgttcgcctggctaaggagcattgggagtcactgtgcagagcatttttaggcatctaagtagccagtcagtcacatttctactggtgggaagatgattcgatttgttaagattgctattggtttgccacaagtttttgtgaaatggggtgatctaccctctatcagcattcaatgttctgccttgtgctcctagctaactagagaaatagagaaactgtagtggttggtggtttgttgttcaagtgcagacatgtgtccagctcggtacagctttatgatttgaacctgaaaagtttgaagttgctcctaggttcacagttgtttatccatctgcaaccaaaaacttcccaaatacataaaacgctcacgaaatgttaatactggggagtcgtgcaatcactagctttagtttccacgacaacatatgagttgaaataaacacaaaacaaaactaagtgtcagttccttgcacta

SEQ ID NO: 27546 - DNA, 879 bp, Zea Mays
gcgaaggtaacataggcaccgccgccatttcttcgtctcacatcttcatcttcctcgtagcgccggcgctccatctttcgttccctccctactcacgctcggcacgcaggcgacggtagcgacactcgggcttgggctctcagcgatggcatggacagcttcctctcccgcctcgcctcgcaccctcgcctccaaccctccatcgaccgaccggtgaccctgaatccagctatgtctgcaagcattagccttcctcccatagatgggaaatcaggatacggttattggcttggagtctagagaagatgatttgggacttcaccacgaaagctaaaagctttgattgctacatctggtctatgtaaagaagataagggtgttgagttggatggtgtccttcgcgcaaagcctctagaaattggaatcgtaaatggcatggatgtttatgaatgggatccttcaacagataagtacatcagcgtgaaattggaatcgtaaatggcatgctgtaattctgcaaaataatgttgactgccttttctacatttatcctttttgtgctcatcgatcacattctcaataggtatgttggcaatatccatcttcaagtgacggacgcagtactgcaggaattcttccaaagcattggtccaatagaagggtgcaagctcatcagaaaagaaaagatccccacgtccagagttacaagaagatcaagcttggctgtggttgctgctgtgttgcctcctcttgttggaccgaagagagggaggggagaagcagctggcgtgcagacttctactcaggtggaagtactggctaggatgacaagatctcgctcaatagatatatgcattatcatttcaagtctatattgag

SEQ ID NO: 27547 - DNA, 801 bp, Zea Mays
attcctccagcgaaggtaacataggcaccgccgccatttcttcgtctcacatcttcatcttcctcgtagcgccggcgctccatctttcgttccctccctactcacgctcggcacgcaggcgacggtagcgacactcgggcttgggctctcagcgatggcatggacagcttcctctcccgcctcgcctcgcaccctcgcctccaaccctccatcgaccgaccggtgaccctgaatccagctatgtctgcaagcattagccttcctcccatagatgggaaatcaggatacggttattggcttggagtctagagaagatgatttgggacttcaccacgaaagctaaaagctttgattgctacatctggtctatgtaaagaaggaactcacatctggcctagataagggtgttgagttggatggtgtccttcgcgcaaagcctctagaaattggaatcgtaaatggcatggatgtttatgaatgggatccttcaacagattctcaataggtatgttggcaatatccatcttcaagtgacggacgcagtactgcaggaattcttccaaagcattggtccaatagaagggtgcaagctcatcagaaaagaaaagatccccacgtccagagttacaagaagatcaagcttggctgtggttgctgctgtgttgcctcctcttgttggaccgaagagagggaggggagaagcagctggcgtgcagacttctactcaggtggaagtactggctaggatgacaagatctcgctcaatagatatatgcattatcatttcaagtctatattgag

SEQ ID NO: 27548 - DNA, 784 bp, Zea Mays
gcgaaggtaacataggcaccgccgccatttcttcgtctcacatcttcatcttcctcgtagcgccggcgctccatctttcgttccctccctactcacgctcggcacgcaggcgacggtagcgacactcgggcttgggctctcagcgatggcatggacagcttcctctcccgcctcgcctcgcaccctcgcctccaaccctccatcgaccgaccggtgaccctgaatccagctatgtctgcaagcattagccttcctcccatagatgggaaatcaggatacggttattggcttggagtctagagaagatgatttgggacttcaccacgaaagctaaaagctttgattgctacatctggtctatgtaaagaaggtttggcactagcgatgttttttttgctacgcgataatgacctactcacctacctgtatgtacatacgtttgacctgttcaacatgtctgctttaaatcaggtcttagatcaggttgtagaactattgaagaactagtataaagtggttgagacatttttctcgattgaaagtatagcctgtatttttggttgctcaacttattttgcctgagtaaaaatgactataagacatgatttagtgtaacaaaggggacgggatttgattggttattgatcctccttttaaaattttagatatcatgctaagaatattttagaacaaaagtttaatttcagctggtgactacaatcaacattgcactattcttcttttactggaatgaatgcacaaatgcaaacgatgttgatctgtg

SEQ ID NO: 27549 - DNA, 1720 bp, Zea Mays
aaaagcaacacaacatccaatgggagttgggaggtgagcttaccctgcatcgtattcgtcggcacccaccagcaatctagcgcggaccaaccaactctacagcacatcttcttcctccttcctcgcttgctttgcttgatccatagcatagcctcgcacagcaggacgcatcacaagaaccaacaaaatattcacacatgacacaacgcggtggcgggcacgcacacggccggctcaagcagctcggtccagaacagcgcggcgtcggcgccgtcgtccttcaccacctccaccacggacacggcgtcggcgagcctaaccacgctcactttggccacgacgccgccctcctccccctccacgcgcacgcccctcttcccttccttccgcacgcggtaccctcccttccgcccggccgcctccacgcggcccagcacgcccgcggcggcctcgcccacgaacacccgctccttgcaccccccgcccaggaacagcgccgacaggtcgcacccgggggagaagctcaggatgtcgaacgcggtcggctccctgcccgcgtcgtcctcgtccgccgccgccccgacccacgcttcttcgtcttcatctcctccgccgccgtgcatcaggcgtcccatctcctcgtcgctggcgccgtgccggaaccaggggtgcgccacgatgctgtccgcgtcagcgcgcgccgacgggtccgggtgcagcacgcgccgcagcaggtcgcgcagcgcgggcgagaaccacgcggggcaccggaacctgcccgcgtagatcttgcggtacatgttcaccaggctcgcgtcgttgaagggcaggtacccggccgccagcacgaacagcacgacgccgcaggaccagatgtccaccttcgccgggtcgtactcgtaccccttccgcgacaggatctccggcgccacgtacgccggggtgccgcacgtcgtgtgccggaggaggtccccgccggcgccggccactgcgccgagcccgaagtcggccaccttcagcgcgccggccccgtccagcaggaggttctcgggcttgatgtcgcggtggcacacgccgcgcgcgtggcagtagcgcacggcgcacaccagctgccggaaatagtgccgcgccaggtcctccgtcatgcggcccgacgcgtccacgagcgagagcagctcgccgccggcggcgaggtcgagaacgaagtgaacctttgtgcgcgtcgccagaatctcgtggagccgcaccacgtggcggtgccgcaggcgccggaggatgcctgcttcccgctcgatggccacgggccggtcgctggcggcgcgcgggttggggaacgacttgatggccacggaccggccggtgcgcaggtcccgcgccaggtacaccttggcggacgcgccgcggcccaggaggccgccgagctcgtacctcccaaggagcacggtcccggcggcggatgcgacggcgccggtggcgggcggcatcgtggcggcggcgtttgctcggccggcgccgttgtaatggtcgggcgcgacggggtaattttcacgtaccacctcacgggccgatgatcgtggttgtgctgggtggctggctggcgggtggcggcagtcggagttgagaggtttgccgccacggccgtgcccgtatttatgtatcgcgaaggtgtccgtctgcggttaggaggcgctgacgagtcggcccgggagttaacagcctg

SEQ ID NO: 27550 - DNA, 386 bp, Zea Mays
gtgagattgaaacggggcctaagtgacaatttcgagtgatcctcgtagtgtatttatctatcatcatgatgaggtggcagcagaataatggctacgttactacgtatagtgctgggaattggatcgggccggcccgaacccatcatgctttataccaaacatgttcggactaaaaatgatggttgtttgggagtactgaagttggccacgtacgataaggaggcgttgtcgtgccctttagatgatatgcctcaaaacatagtcttgtacttgttgttgacttgtgtccacttaatttctgctgaaagccgagaacagggcagaaggctccgtcacgtaccatagccgctaacaaggggttgcccatgctagctaacttagcttag

SEQ ID NO: 27551 - DNA, 2276 bp, Zea Mays
tatacagcagctcaacgagggatcccacccacatcctcgccgcccgtcggcttgcattgcagttgcagcagcgcacaattaattggaagcgatcttctttcccgggtcatcaagtcctctcctcatcggccaaccatcacacagcacctccgcgagggatcccgcctctgcctggccgccgcccgtcgcctttgcagcaaggaagaagcgatcttctctcccgacaagtcctcgccggatctaagctagcgtgtggatcttgatgaccttgaagctcaagagtatctttcacacgatggcttcttggatcaccatcttgggggagacgattgaagtcttgcattggtcctctttttcttgtcaaggataagcaagtacccgcgcgctatctgtgtgcacacacacgggcatgcatgcatgcaagatgatggcgggacataataaaagaaacattattctcatgcacaagtatgagatggggagattgcttggtcaagggaccttcgctaaggtctaccatgctcgcaacaccaggacctcagtaagtgtcgcgatcaaggtgatcgacaaggggaaggttgtgaaagtcggcctcgtcgaccagatcaagcgagagatttctgcgatgaagctcgtcaggcacccaaacgtcgtgcagcttaacgaggtcatagccaccaagaccaaaatatacttcgtgttggagtatgttaaaggcggggagctcttggctaaagtaaagcgaggaaggcttaaggaagatgtggcgaggaagtacttccaacagttgatctgtgcgctggacttctgccatagcaggggtgtctaccatcgggacttgaagctagaaaaccttttgctcgatgagaatagcgacctcaaggtatcggattttggtctaagcgcgcttgctgaatgccgaaggcaggatggcctgctccacacgacctgcggcacgccggcctatgttgctccggaggtgattaacagaaagggttacgatggtgcaaaagcagacatatggtcatgcggggtcatcctctttgtgctattggctggttatcttcctttctatgataagaacttgattgacttgtataagaagattgacagtgcagatttcagatgcccgacctggttttctactcatgttcggaggcttttgctaaggattcttgatcctactcctggtacaaggatctcaatagaaaaaatcatggagaatccctggtttaggcagggcttagatcatgcaaacctactacttagatataatttaaagactaatgatgcccctcaagtggacacggacaagaatgaagattttgatccaccgagcaccaacataacaacagatagcaagcaagaagacgaaaagaagcctgccaacatgaatgcatttgatataatatctcatctatcaagtggtttggatctctcaggtttattccaagaatctgacaagaaaacagaatctaaattcacttctaccaacacaagctcggcaatcatatcaaagattgaggatattgccaaggatttgcgactgaagttgactaaaaaggatggtggtttgttaaagatggaagcttcaaagcctggaaggaaaggggtgatgcgtatcgatgctgagatatttgaagttagcccaaacttccatctcgtggagatcaaaaagactaatggtgacactctagagtatcaaaaggtcatgcaccaagaaatgaggcctgcacttaaggacatagtatgggcttggcaaggtgagcaattaaagcagcagcaggaacaacaacaatagtcgtgttaaaaactatgagatagtgtataacgttttttaggcagattccaatattacatgcatttgtgtagttctcacttcattatcaattcttgttccccttgtattaccccctgcaacctgttttaactcggcgcgtcgactaaaacaggttgtcggatgcgtcatccaccccacgtctgtgcgcgcaaaaaaggaatgcatgcatgagtcaaacacgttccgtgcatgcgcgtaaatttaagaaatagatgtgtggcggtttctatttttaaatgctttattttctctataaatataggatcagtgcaacagtcatgcattttattacccgctgcatgcgcacaaatttatgatgtaaagaatatgcaataaaagaaaataaattggtatgcatagaaacaaaaaatgtatccaatgctttatttcctccataaatataggatcccttcaacagccatgcaactaaactcgt

SEQ ID NO: 27552 - DNA, 3141 bp, Zea Mays
gagaaggggaagacgaccaacgaaaataagaataacgagaaatcttttcctgcctcggagtcggagggcagcgaaaacccctctccgattccgcccggggcgccttttccactcgctccgatcggatcccttgttgctcgctccaataatggcggcggcggcgtacttgggcggccgcggccagggagcagacggcgggtggttcgtgccaggcgccggcgacgggtgggcgcccccgtgggggaggcgcggtgggggaggagcggcggcggcggcagctgcagcagcaggcgagagggagacgctggcggtggtgatggcgaggagggcgcctccgccgtcggcgatccgccgggacgcggtgcgcgttgcggaggcggccgccggcgaggtgctgctgcgcgtccaccccaccagggaggcggagcgccgccgccaggacgtcatcgcctacctcacacgactcatcggatcctccctcggctgcgaggtctttgcgtttgggtcagtgccgctgaggacgtatctccccgacggcgacgttgatataactgtactggggaacacatggttaaacagtacactcattgacgatgttcgcagcatgctccagtcggaacaggaaaactgtgacgctgagttgaaactaacaggcctgcacttcatcgacgctgaggttaagctcataaaatgtgtgattgagaatattatcgtggatgtctctttcaaccagattggcggtgtgtccacgttctgcttccttgagctggttgaccgtcaggttgggaaaaaccatttgttcaaaaggagcattatgttaaccaaggcttggtgctaccacgaaagtcgcatattaggagcccatcatggactgatatctacttatgccttggaaacacttgttctttacatattcaatatgttccacaagtctctgcatggacctctggaggtcctttataagtttttggaatattttagcaagtttgactgggatcgatatggcattagcttaaatggtcctgttgatttgtcatcattgccgagcttaactgtggaacccacagaagtacaaggtgagttattgcttggcaaggacttccatcaaggctctctggatagactcgttgtaattccaaatgagtttgacggatgcgacacacaatttcgccagaagtttttaaatatagtcgatccactcaaggcgaataataatctcggcagaagtgtcagcaaagcaaacttttatcgtattcggagtgctttctcattcggagcacaaaagcttggtcaaattctcttgttaccatccgagtacatttgtgatgaaatttacggatttttctcaaatacactgaagagacacggaaagggtgaaagactagacattgacgctagtagtgcattccaacccttgcttggtcccgagagtacacttagtgaagatggatcgatgtttaaatcttcttgcataaatgagggtgaaaacggaagttcatgtcattcatcagaactgcctgacatgggctcgagtgtgacagatgtgcataagaattcaggtaagtatttgcctggtctttttcaggatcttccttggaataaaatctggttcatggaatatgcatctgatttgaaagaaaatccacaaacttcagcaagttcaaggagccactcatccttttctcaagataatggtaatggcaacagtaaagagtgcttcgagaattatgcagcagaggaaggtttacaccagatcagtagattaaatgtgccgcaacagatttatgcagggcatccatcgcatagattggctaactcgactagtgcaaatatcttggatttctccagttcttgttttgttgatgagtcagattggactgctccccttgcaggaaaaaagctactcccacccttgttgctgtcaaatatgctggatctctcaggtgatctggagttgtacttgggatgccttcgcaaagttcagtaccacctggagtcattgtttgatgaactcctacaggctgttgaagaagcatgttttgctgatgtgctagatgaggattccttcaatatgccagacatgatcttgaagttaaaaactagcactagatcctcaagcctgccattagattcatctactgatagcgagagaaggaaattatctcctgtgtattgttctcatagcataggagatgattcacaacaatcacatggcgaggcacaagtggatatgttttggcagcagaacgtgccattgtcccccaatggatcaacatttccttcatctccttcaaccaattcagataattatcctgtttcttggttttgtttctctcctaagacgcatggaaccggcacatacattcccaatgtgagttatcaaacatacagggagcgtatcatgcttgaaagagataccatacgagcaagaaaacaaagacagaggttacctggtcgccggtattactcagccgagcaaggattttccggttcacaaaccgaagaagacaccatagctcaaagtgcaacgaaccaatcgcccaagaagcaaaacagtgtgcagcagagtggctattcaggcaagagcacagttccggatgcagatttcgtttgtttcagggagcatgtggcaacagaaggtggaaccaaacagctggcagtaggaagagagacaatgcctccatcatcgtcatcagggatagcacttgctcaaaacggccaaggaaatcgtatctgcgagccttcctcacccgccacagcagatttgttacatgcggcagaaagtttggagtttggatccttggggcctttctcgttgggacttgtctcaacttcaacacagtttgaggaagcattcccagcgctccccactagaaagagagctgaaggagccgagaaccactaaggctgcagtttaggatcccggatattaagtctctgaagttttgttgtaccagaagcaagaaaacgtgcaggttagaagaagcaactgagaaagagatgaagctggttgccgttgagagttgagactgacaggacagtgtaatcgtagtggtagaagttggatgtcagggcagtcggagatttccgttcccagcgtcggctcggccggcgcccatacgctgcgcagtccctactgcg

SEQ ID NO: 27553 - DNA, 2949 bp, Zea Mays
atggcggcggcggcgtacttgggcggccgcggccagggagcagacggcgggtggttcgtgccaggcgccggcgacgggtgggcgcccccgtgggggaggcgcggtgggggaggagcggcggcggcggcagctgcagcagcaggcgagagggagacgctggcggtggtgatggcgaggagggcgcctccgccgtcggcgatccgccgggacgcggtgcgcgttgcggaggcggccgccggcgaggtgctgctgcgcgtccaccccaccagggaggcggagcgccgccgccaggacgtcatcgcctacctcacacgactcatcggatcctccctcggctgcgaggtctttgcgtttgggtcagtgccgctgaggacgtatctccccgacggcgacgttgatataactgtactggggaacacatggttaaacagtacactcattgacgatgttcgcagcatgctccagtcggaacaggaaaactgtgacgctgagttgaaactaacaggcctgcacttcatcgacgctgaggttaagctcataaaatgtgtgattgagaatattatcgtggatgtctctttcaaccagattggcggtgtgtccacgttctgcttccttgagctggttgaccgtcaggttgggaaaaaccatttgttcaaaaggagcattatgttaaccaaggcttggtgctaccacgaaagtcgcatattaggagcccatcatggactgatatctacttatgccttggaaacacttgttctttacatattcaatatgttccacaagtctctgcatggacctctggaggtcctttataagtttttggaatattttagcaagtttgactgggatcgatatggcattagcttaaatggtcctgttgatttgtcatcattgccgagcttaactgttggcaacttgcagtggaacccacagaagtacaaggtgagttattgcttggcaaggacttccatcaaggctctctggatagactcgttgtaattccaaatgagtttgacggatgcgacacacaatttcgccagaagtttttaaatatagtcgatccactcaaggcgaataataatctcggcagaagtgtcagcaaagcaaacttttatcgtattcggagtgctttctcattcggagcacaaaagcttggtcaaattctcttgttaccatccgagtacatttgtgatgaaatttacggatttttctcaaatacactgaagagacacggaaagggtgaaagactagacattgacgctagtagtgcattccaacccttgcttggtcccgagagtacacttagtgaagatggatcgatgtttaaatcttcttgcataaatgagggtgaaaacggaagttcatgtcattcatcagaactgcctgacatgggctcgagtgtgacagatgtgcataagaattcaggtaagtatttgcctggtctttttcaggatcttccttggaataaaatctggttcatggaatatgcatctgatttgaaagaaaatccacaaacttcagcaagttcaaggagccactcatccttttctcaagataatggtaatggcaacagtaaagagtgcttcgagaattatgcagcagaggaaggtttacaccagatcagtagattaaatgtgccgcaacagatttatgcagggcatccatcgcatagattggctaactcgactagtgcaaatatcttggatttctccagttcttgttttgttgatgagtcagattggactgctccccttgcaggaaaaaagctactcccacccttgttgctgtcaaatatgctggatctctcaggtgatctggagttgtacttgggatgccttcgcaaagttcagtaccacctggagtcattgtttgatgaactcctacaggctgttgaagaagcatgttttgctgatgtgctagatgaggattccttcaatatgccagacatgatcttgaagttaaaaactagcactagatcctcaagcctgccattagattcatctactgatagcgagagaaggaaattatctcctgtgtattgttctcatagcataggagatgattcacaacaatcacatggcgaggcacaagtggatatgttttggcagcagaacgtgccattgtcccccaatggatcaacatttccttcatctccttcaaccaattcagataattatcctgtttcttggttttgtttctctcctaagacgcatggaaccggcacatacattcccaatgtgagttatcaaacatacagggagcgtatcatgcttgaaagagataccatacgagcaagaaaacaaagacagaggttacctggtcgccggtattactcagccgagcaaggattttccggttcacaaaccgaagaagacaccatagctcaaagtgcaacgaaccaatcgcccaagaagcaaaacagtgtgcagcagagtggctattcaggcaagagcacagttccggatgcagatttcgtttgtttcagggagcatgtggcaacagaaggtggaaccaaacagctggcagtaggaagagagacaatgcctccatcatcgtcatcagggatagcacttgctcaaaacggccaaggaaatcgtatctgcgagccttcctcacccgccacagcagatttgttacatgcggcagaaagtttggagtttggatccttggggcctttctcgttgggacttgtctcaacttcaacacagtttgaggaagcattcccagcgctccccactagaaagagagctgaaggagccgagaaccactaaggctgcaggtattcatttccatctcatattttagaattttatgaaatcggtaccttgcaaagttatttactgcttggtgttcgtgttgttacagtttaggatcccggatattaagtctctgaagttttgttgtaccagaagcaagaaaacgtgcaggttagaagaagcaactgagaaa

SEQ ID NO: 27554 - DNA, 2845 bp, Zea Mays
atggcggcggcggcgtacttgggcggccgcggccagggagcagacggcgggtggttcgtgccaggcgccggcgacgggtgggcgcccccgtgggggaggcgcggtgggggaggagcggcggcggcggcagctgcagcagcaggcgagagggagacgctggcggtggtgatggcgaggagggcgcctccgccgtcggcgatccgccgggacgcggtgcgcgttgcggaggcggccgccggcgaggtgctgctgcgcgtccaccccaccagggaggcggagcgccgccgccaggacgtcatcgcctacctcacacgactcatcggatcctccctcggctgcgaggtctttgcgtttgggtcagtgccgctgaggacgtatctccccgacggcgacgttgatataactgtactggggaacacatggttaaacagtacactcattgacgatgttcgcagcatgctccagtcggaacaggaaaactgtgacgctgagttgaaactaacaggcctgcacttcatcgacgctgaggttaagctcataaaatgtgtgattgagaatattatcgtggatgtctctttcaaccagattggcggtgtgtccacgttctgcttccttgagctggttgaccgtcaggttgggaaaaaccatttgttcaaaaggagcattatgttaaccaaggcttggtgctaccacgaaagtcgcatattaggagcccatcatggactgatatctacttatgccttggaaacacttgttctttacatattcaatatgttccacaagtctctgcatggacctctggaggtcctttataagtttttggaatattttagcaagtttgactgggatcgatatggcattagcttaaatggtcctgttgatttgtcatcattgccgagcttaactgtggaacccacagaagtacaaggtgagttattgcttggcaaggacttccatcaaggctctctggatagactcgttgtaattccaaatgagtttgacggatgcgacacacaatttcgccagaagtttttaaatatagtcgatccactcaaggcgaataataatctcggcagaagtgtcagcaaagcaaacttttatcgtattcggagtgctttctcattcggagcacaaaagcttggtcaaattctcttgttaccatccgagtacatttgtgatgaaatttacggatttttctcaaatacactgaagagacacggaaagggtgaaagactagacattgacgctagtagtgcattccaacccttgcttggtcccgagagtacacttagtgaagatggatcgatgtttaaatcttcttgcataaatgagggtgaaaacggaagttcatgtcattcatcagaactgcctgacatgggctcgagtgtgacagatgtgcataagaattcaggtaagtatttgcctggtctttttcaggatcttccttggaataaaatctggttcatggaatatgcatctgatttgaaagaaaatccacaaacttcagcaagttcaaggagccactcatccttttctcaagataatggtaatggcaacagtaaagagtgcttcgagaattatgcagcagaggaaggtttacaccagatcagtagattaaatgtgccgcaacagatttatgcagggcatccatcgcatagattggctaactcgactagtgcaaatatcttggatttctccagttcttgttttgttgatgagtcagattggactgctccccttgcaggaaaaaagctactcccacccttgttgctgtcaaatatgctggatctctcaggtgatctggagttgtacttgggatgccttcgcaaagttcagtaccacctggagtcattgtttgatgaactcctacaggctgttgaagaagcatgttttgctgatgtgctagatgaggattccttcaatatgccagacatgatcttgaagttaaaaactagcactagatcctcaagcctgccattagattcatctactgatagcgagagaaggaaattatctcctgtgtattgttctcatagcataggagatgattcacaacaatcacatggcgaggcacaagtggatatgttttggcagcagaacgtgccattgtcccccaatggatcaacatttccttcatctccttcaaccaattcagataattatcctgtttcttggttttgtttctctcctaagacgcatggaaccggcacatacattcccaatgtgagttatcaaacatacagggagcgtatcatgcttgaaagagataccatacgagcaagaaaacaaagacagaggttacctggtcgccggtattactcagccgagcaaggattttccggttcacaaaccgaagaagacaccatagctcaaagtgcaacgaaccaatcgcccaagaagcaaaacagtgtgcagcagagtggctattcaggcaagagcacagttccggatgcagatttcgtttgtttcagggagcatgtggcaacagaaggtggaaccaaacagctggcagtaggaagagagacaatgcctccatcatcgtcatcagggatagcacttgctcaaaacggccaaggaaatcgtatctgcgagccttcctcacccgccacagcagatttgttacatgcggcagaaagtttggagtttggatccttggggcctttctcgttgggacttgtctcaacttcaacacagtttgaggaagcattcccagcgctccccactagaaagagagctgaaggagccgagaaccactaaggcttttaggatcccggatattaagtctctgaagttttgttgtaccagaagcaagaaaacgtgcaggttagaagaagcaactgagaaa

SEQ ID NO: 27555 - DNA, 2814 bp, Zea Mays
cttttcctgcctcggagtcggagggcagcgaaaacccctctccgattccgcccggggcgccttttccactcgctccgatcggatcccttgttgctcgctccaataatggcggcggcggcgtacttgggcggccgcggccagggagcagacggcgggtggttcgtgccaggcgccggcgacgggtgggcgcccccgtgggggaggcgcggtgggggaggagcggcggcggcggcagctgcagcagcaggcgagagggagacgctggcggtggtgatggcgaggagggcgcctccgccgtcggcgatccgccgggacgcggtgcgcgttgcggaggcggccgccggcgaggtgctgctgcgcgtccaccccaccagggaggcggagcgccgccgccaggacgtcatcgcctacctcacacgactcatcggatcctccctcggctgcgaggtctttgcgtttgggtcagtgccgctgaggacgtatctccccgacggcgacgttgatataactgtactggggaacacatggttaaacagtacactcattgacgatgttcgcagcatgctccagtcggaacaggaaaactgtgacgctgagttgaaactaacaggcctgcacttcatcgacgctgaggttaagctcataaaatgtgtgattgagaatattatcgtggatgtctctttcaaccagattggcggtgtgtccacgttctgcttccttgagctggttgaccgtcaggttgggaaaaaccatttgttcaaaaggagcattatgttaaccaaggcttggtgctaccacgaaagtcgcatattaggagcccatcatggactgatatctacttatgccttggaaacacttgttctttacatattcaatatgttccacaagtctctgcatggacctctggaggtcctttataagtttttggaatattttagcaagtttgactgggatcgatatggcattagcttaaatggtcctgttgatttgtcatcattgccgagcttaactgtggaacccacagaagtacaaggtgagttattgcttggcaaggacttccatcaaggctctctggatagactcgttgtaattccaaatgagtttgacggatgcgacacacaatttcgccagaagtttttaaatatagtcgatccactcaaggcgaataataatctcggcagaagtgtcagcaaagcaaacttttatcgtattcggagtgctttctcattcggagcacaaaagcttggtcaaattctcttgttaccatccgagtacatttgtgatgaaatttacggatttttctcaaatacactgaagagacacggaaagggtgaaagactagacattgacgctagtagtgcattccaacccttgcttggtcccgagagtacacttagtgaagatggatcgatgtttaaatcttcttgcataaatgagggtgaaaacggaagttcatgtcattcatcagaactgcctgacatgggctcgagtgtgacagatgtgcataagaattcagcaagttcaaggagccactcatccttttctcaagataatggtaatggcaacagtaaagagtgcttcgagaattatgcagcagaggaaggtttacaccagatcagtagattaaatgtgccgcaacagatttatgcagggcatccatcgcatagattggctaactcgactagtgcaaatatcttggatttctccagttcttgttttgttgatgagtcagattggactgctccccttgcaggaaaaaagctactcccacccttgttgctgtcaaatatgctggatctctcaggtgatctggagttgtacttgggatgccttcgcaaagttcagtaccacctggagtcattgtttgatgaactcctacaggctgttgaagaagcatgttttgctgatgtgctagatgaggattccttcaatatgccagacatgatcttgaagttaaaaactagcactagatcctcaagcctgccattagattcatctactgatagcgagagaaggaaattatctcctgtgtattgttctcatagcataggagatgattcacaacaatcacatggcgaggcacaagtggatatgttttggcagcagaacgtgccattgtcccccaatggatcaacatttccttcatctccttcaaccaattcagataattatcctgtttcttggttttgtttctctcctaagacgcatggaaccggcacatacattcccaatgtgagttatcaaacatacagggagcgtatcatgcttgaaagagataccatacgagcaagaaaacaaagacagaggttacctggtcgccggtattactcagccgagcaaggattttccggttcacaaaccgaagaagacaccatagctcaaagtgcaacgaaccaatcgcccaagaagcaaaacagtgtgcagcagagtggctattcaggcaagagcacagttccggatgcagatttcgtttgtttcagggagcatgtggcaacagaaggtggaaccaaacagctggcagtaggaagagagacaatgcctccatcatcgtcatcagggatagcacttgctcaaaacggccaaggaaatcgtatctgcgagccttcctcacccgccacagcagatttgttacatgcggcagaaagtttggagtttggatccttggggcctttctcgttgggacttgtctcaacttcaacacagtttgaggaagcattcccagcgctccccactagaaagagagctgaaggagccgagaaccactaaggctgcagaagcaagaaaacgtgcaggttagaagaagcaactgagaaa

SEQ ID NO: 27556 - DNA, 5292 bp, Zea Mays
aggcaaaggtagaggtggagataggctgggtctgggtgtgatgcgcaccgacaatgatggtgagtttacctgtgttgagttcgaggagtactacgccaaacatggcgtcgagcgacaacacacgaggagtactgcgccaaacacgacatcgagaggtagcaaacaacgtcgtacacgccacgacagcaacagaaccaggggcgaagccagacaacaaagccatcagggttggcatatgaacagtttgtgttttgtgatatatttcaccaaaaggaatcaggatggagagactgctcattttgtgggaagcgcctccattgtgggtgtgttgcttcaaagaactcttatgatctacttgacagtggaggagttcattgtgtcacttgcatgaaaaattcattagcccagtccgcttctggtcaagtggttccaaagctttttccatctccaatcaatctacgttttttcggtaaaagtgacgagttattgtcaagtagaaattttgaacagccaccctctcttacattggattccagaaatgatgatattgcttttgtaaataagagcaatcacctgttcatggtaaaaggtatagaggctggacaaagcagtaacatcttgagacaaaaagagatagagaatggttcaaggcagattaaatgggaacaaccaacccttagttttggggacatgggaaggcctttcctaactaggtctcaaagtgcattagagtcacctcaatgtactcgaagagatgacaataaggatccaactacagatagcacaagtgagtcattttcagaagcatgtctgagcatgagcctaggtattgcaaacaatgtaaacaggatggaggctacttcaacagcggaaaggcctgtgctattgtcaacaacagccattgctgaaggaagagaacttgccactacactatctccctttcaacacgcacaaagggcacggcatttcctgaccagacctccaaggattggtgaaggtgctgcttttgatccaacaagagacatgtttccacatcttcgtgttgctagaccacctgctgatggaaggggacgcaatcaattacttcctcgttattggccaagaataacagaccaagagctgcaacagatatctggagattcaaattccacgattgttccattgtttgagaaggtcctgagtgcgagtgatgcaggccgcatagggcgccttgttcttccaaaagcttgtgctgaggcatatttccccccaatttcccaaccggaaggtcgccccttgacaattcaagatgcaagaggaaaagaatggcattttcagtttaggttttggccaaataataacagcagaatgtatgtcttggagggtgttacaccatgcatacagtctttgcaattacaagctggcgatacagtgacctttagtcgtatagatcctggagggaaacttgttatgggctttcggaaggccacaaatactgtcagtctgccagactcacagatctcagctattgcaaatggttcccttctcagtgagacactcttttctactgcaaatgagaacataggtgtcgtaagtggttatcctggatttcttcactcaataaagggagccgcagatctccatccaaactctctatatgatcatcatatgaacttagttgatggggatgtcagttggaataaggcagataaatttggcagcaggccagatgagggatccttgcaatttttacaaaaacgtagtcacaatattggttccaaaagcaggaggttcttaatcgatgctgaagatgccatggaactaaagcttacctgggaagaggctcaagagttgttgcgccctgctcccactgcaaaaccaactgttgtgatgattgaggactatgaatttgaagaatatgatgaaccccctgtctttgcaaagagatcaattttcaccatccgtgcaacaggggaacaagatcagtggattcaatgtgacgactgctcaaaatggcgccggttgcctcttaatgttattgttgcgcccaaatggacatgcaccgacaactcatgggactcaaaatgctgctcctgctctgcgcctgaagagttgaccccaagagagttgcaaagtgttctgcagcagtatgaagaaatgaggaggcgaaagggcagttatggtctgaagctgaacgtcgctgaaatggatgcatccagccttgatgctttcgccaccgccgcagtatttggcgaagtcgggaaccaaggcagcgcctcagtggcgacaaccacaaagcacccccgacatcgccctggctgcacatgcatcgtgtgcatccagccgcccagcggcaagggcccgaagcacagccccgcgtgcacctgcaacgtgtgcatgacggtcaggcgccggttcaagacgctgatgatgaggaagaagcagcggcagtcggagcgcgaggaggcggaggccggcaagaagatcgcatgggtgaacagagacgagcctgaggggagcagcctgtcgagatccccgcagacgcttgacagcacccgagacaacagtgatgtgacggcgaccatgttggacaaggtgtccgacgtgaacaagcaggggcacatcgacgtcgacctcaacctccaccctgctgcccctgccgtccaggctgcgcagcagcagccccggccggtgagcatgatgggtctcttggaagtggcgggccggccgcttgacaactacatgaagcagaatggcctgacgagcctggtgggggagcaaggtggtggcagctccagcacggccacggtccctcctccggctctggtggagagtgaggagcggacgtccaacgagggcctcgtcccatcagcatcggcagagcgggaaccgaacgccatggccgtcgacgaggctggcgagaaccagcaggacaaggctgccgacgacgacgacgacgccgtcgctgccgccgctacttgacgtgattttttttcatggagctgcttctcctggaggctgggagtaacttacgtgtacgtatgaggcttgtgttggttggtgttgtaatctgacgcttaaacattggcttcaataactcatacagagtgagaacctgaaagtatcagtctagagcaagttctttttactggtgctgaaagtatcagtcttgcgcaacccaaaaggaggaaacaaaaattttagaccctccaaaattgtactcccctttggtatgtacaatctgaagtggtaacaaaaatgcactacttttttctaatagaactccgatccaagacatgcttgttttttgtttaggaaaaaaggctaggttcacctgattgtttctgatcttcttccatgtaatattttaacacatttttctttcgaacaaaatataactcagctgtttcaaaaccgtcaaaaaaaaacaacttatgattagctgctcctttttttactgctccaaggctggcctgtgagcaacattgcacccccaccacaggtcaggttcatccagcccatttattattctaaaaaaaaactctactccaaaagatgtgtccagcccagtgaagcccgaaaggaaagaagccagccgctcccgtgggcgacgacatggtcctgtgtccgtgtgaggtacacatgactacgggggccccacctccttcgttcccaatcccagatcccgcactctctttcagaacccaacacgccactgcctagctagtagctagcagagcagctagccaagcaacccagccgagtagccgaccagagagagcgagagaggcagagaggagcggacctgcccgtcgcaatggcgatgccgccgaagcccggcgacccgccgcagcgctcgcctgcgcggagccccaacctcaacctgccctgcccgctgccgccggtcccgggcgggccgcctgcgccgtcggccgccgggttgcccccgccgcgcgcgagtcaccaccgccgcgccagatctgaggtggcctttcgcttctcggacgacctggccggcggcgtgggcggcggcttcgacgagatcggctccgaggacgacctcttctccaccttcatggacatggacaagatcgccggcgccgaccgcgaccgtgccgccgagacctcctcgccgccgcgcccagccaagcaccgccacagcgcctcctttgacggcttcgggatgggggctgccgccggtggcctggccgggcagcaggacggcggcggaggcatgtttggagaggtgatggaggccaagaaggccatgtcttccgagcagcttgccgagctcgctgccatcgaccccaagcgcgccaaaagaataattgcaaacagacaatctgcagcacggtcaaaggaaagaaaatctagatatataacagaactggagcggaaggttcaaactcttcagacagaggctactactctttcagcgcagctcacactattccagagagacacaactggactttcggcagaaaatgctgagctgaagataaggttgcaggccatggagcagcaggctcaactgcgggatgctctaaacgatgcgctgaagcaagaagtggagaggctcaagatagcgacgggcgagatgccgaagtccaacgaacaattcaacatggggatgcagcacgtctcgtacagcggcccttctttcttccatctcccggagcagcacgtagacattcagctgccgcaccatttccagcagcctccgcggaacgtccagatgctgtcccaccccaactccctctcggatatggcgcagcaagactcgcttgggcggctccgggggctggacattggaaaagggtccatggctatgaagccagaggcagaggtcgtggtgaagtcagagggcagctctgtatctgcaggtgaaagcaacaccaccttctagctatacaatacatctgccttccaagaagcctccgtttggtttagagttcttttgttcatagtctgacatcctccttccttgagctgcttcgtccttctcagtaggcctattttttttattccattggttatatctactagttaacattggtcggttgccaatcgttgttgtcgtggtggctgatttctatagggacattgatgtgttggtttcgagtttgttgttgttgttgtgtgtgtggttggttgtttcgagctaggggctgaaagggcaccgagtgtttttttctccacctgttttagttttgttatagatttgacaacaatcgttatgatttctccttctggaaaggtgtacattgtgttgctatgctaatttgtagtgatatttttgatgattccaactgt

SEQ ID NO: 27557 - DNA, 5634 bp, Zea Mays
cagcagcgctgcagcgaccacccgcggctgggtgcgcgcgttcgttgtcccttccacatccaccggaaagctacgcctcctcctcctcctccaccacctcgtctcctctccactctcaatcgctctctctctctccgtgggcgatgcgctcagcctgctcaggtcagcgttgatctatcggagggaggactgcctgcgctcgccggccacccatggctatggcggcagcggcggcggcggctaccaagaggtgcatgaacccggcatgcggcgcgccggcgtcggtgctgggggcgggaggggactggaggaagggctggccgctgcggtccggatgcttcgccctactctgcgacaagtgcgggttggcatatgaacagtttgtgttttgtgatatatttcaccaaaaggaatcaggatggagagactgctcattttgtgggaaggtgaggtggtgacgcaagcgctcaaatacatgcaaattctgaaatgacatcctctgcaattgagtgtagttgagtcctggcaggtcatcaggctcacttgccagtgacaaatacaccatgcagtcaactgcagaggaattgattctgcaaattcttgggctgaactgtaatgcaacagtattcttatgaaattctaccgtttcagcgcctccattgtgggtgtgttgcttcaaagaactcttatgatctacttgacagtggaggagttcattgtgtcacttgcatgaaaaattcattagcccagtccgcttctggtcaagtggttccaaagctttttccatctccaatcaatctacgttttttcggtaaaagtgacgagttattgtcaagtagaaattttgaacagccaccctctcttacattggattccagaaatgatgatattgcttttgtaaataagagcaatcacctgttcatggtaaaaggtatagaggctggacaaagcagtaacatcttgagacaaaaagagatagagaatggttcaaggcagattaaatgggaacaaccaacccttagttttggggacatgggaaggcctttcctaactaggtctcaaagtgcattagagtcacctcaatgtactcgaagagatgacaataaggatccaactacagatagcacaagtgagtcattttcagaagcatgtctgagcatgagcctaggtattgcaaacaatgtaaacaggatggaggctacttcaacagcggaaaggcctgtgctattgtcaacaacagccattgctgaaggaagagaacttgccactacactatctccctttcaacacgcacaaagggcacggcatttcctgaccagacctccaaggattggtgaaggtgctgcttttgatccaacaagagacatgtttccacatcttcgtgttgctagaccacctgctgatggaaggggacgcaatcaattacttcctcgttattggccaagaataacagaccaagagctgcaacagatatctggagattcaaattccacgattgttccattgtttgagaaggtcctgagtgcgagtgatgcaggccgcatagggcgccttgttcttccaaaagcttgtgctgaggcatatttccccccaatttcccaaccggaaggtcgccccttgacaattcaagatgcaagaggaaaagaatggcattttcagtttaggttttggccaaataataacagcagaatgtatgtcttggagggtgttacaccatgcatacagtctttgcaattacaagctggcgatacagtgacctttagtcgtatagatcctggagggaaacttgttatgggctttcggaaggccacaaatactgtcagtctgccagactcacagatctcagctattgcaaatggttcccttctcagtgagacactcttttctactgcaaatgagaacataggtgtcgtaagtggttatcctggatttcttcactcaataaagggagccgcagatctccatccaaactctctatatgatcatcatatgaacttagttgatggggatgtcagttggaataaggcagataaatttggcagcaggccagatgagggatccttgcaatttttacaaaaacgtagtcacaatattggttccaaaagcaggaggttcttaatcgatgctgaagatgccatggaactaaagcttacctgggaagaggctcaagagttgttgcgccctgctcccactgcaaaaccaactgttgtgatgattgaggactatgaatttgaagaatatgatgaaccccctgtctttgcaaagagatcaattttcaccatccgtgcaacaggggaacaagatcagtggattcaatgtgacgactgctcaaaatggcgccggttgcctcttaatgttattgttgcgcccaaatggacatgcaccgacaactcatgggactcaaaatgctgctcctgctctgcgcctgaagagttgaccccaagagagttgcaaagtgttctgcagcagtatgaagaaatgaggaggcgaaagggcagttatggtctgaagctgaacgtcgctgaaatggatgcatccagccttgatgctttcgccaccgccgcagtatttggcgaagtcgggaaccaaggcagcgcctcagtggcgacaaccacaaagcacccccgacatcgccctggctgcacatgcatcgtgtgcatccagccgcccagcggcaagggcccgaagcacagccccgcgtgcacctgcaacgtgtgcatgacggtcaggcgccggttcaagacgctgatgatgaggaagaagcagcggcagtcggagcgcgaggaggcggaggccggcaagaagatcgcatgggtgaacagagacgagcctgaggggagcagcctgtcgagatccccgcagacgcttgacagcacccgagacaacagtgatgtgacggcgaccatgttggacaaggtgtccgacgtgaacaagcaggggcacatcgacgtcgacctcaacctccaccctgctgcccctgccgtccaggctgcgcagcagcagccccggccggtgagcatgatgggtctcttggaagtggcgggccggccgcttgacaactacatgaagcagaatggcctgacgagcctggtgggggagcaaggtggtggcagctccagcacggccacggtccctcctccggctctggtggagagtgaggagcggacgtccaacgagggcctcgtcccatcagcatcggcagagcgggaaccgaacgccatggccgtcgacgaggctggcgagaaccagcaggacaaggctgccgacgacgacgacgacgccgtcgctgccgccgctacttgacgtgattttttttcatggagctgcttctcctggaggctgggagtaacttacgtgtacgtatgaggcttgtgttggttggtgttgtaatctgacgcttaaacattggcttcaataactcatacagagtgagaacctgaaagtatcagtctagagcaagttctttttactggtgctgaaagtatcagtcttgcgcaacccaaaaggaggaaacaaaaattttagaccctccaaaattgtactcccctttggtatgtacaatctgaagtggtaacaaaaatgcactacttttttctaatagaactccgatccaagacatgcttgttttttgtttaggaaaaaaggctaggttcacctgattgtttctgatcttcttccatgtaatattttaacacatttttctttcgaacaaaatataactcagctgtttcaaaaccgtcaaaaaaaaacaacttatgattagctgctcctttttttactgctccaaggctggcctgtgagcaacattgcacccccaccacaggtcaggttcatccagcccatttattattctaaaaaaaaactctactccaaaagatgtgtccagcccagtgaagcccgaaaggaaagaagccagccgctcccgtgggcgacgacatggtcctgtgtccgtgtgaggtacacatgactacgggggccccacctccttcgttcccaatcccagatcccgcactctctttcagaacccaacacgccactgcctagctagtagctagcagagcagctagccaagcaacccagccgagtagccgaccagagagagcgagagaggcagagaggagcggacctgcccgtcgcaatggcgatgccgccgaagcccggcgacccgccgcagcgctcgcctgcgcggagccccaacctcaacctgccctgcccgctgccgccggtcccgggcgggccgcctgcgccgtcggccgccgggttgcccccgccgcgcgcgagtcaccaccgccgcgccagatctgaggtggcctttcgcttctcggacgacctggccggcggcgtgggcggcggcttcgacgagatcggctccgaggacgacctcttctccaccttcatggacatggacaagatcgccggcgccgaccgcgaccgtgccgccgagacctcctcgccgccgcgcccagccaagcaccgccacagcgcctcctttgacggcttcgggatgggggctgccgccggtggcctggccgggcagcaggacggcggcggaggcatgtttggagaggtgatggaggccaagaaggccatgtcttccgagcagcttgccgagctcgctgccatcgaccccaagcgcgccaaaagaataattgcaaacagacaatctgcagcacggtcaaaggaaagaaaatctagatatataacagaactggagcggaaggttcaaactcttcagacagaggctactactctttcagcgcagctcacactattccagagagacacaactggactttcggcagaaaatgctgagctgaagataaggttgcaggccatggagcagcaggctcaactgcgggatgctctaaacgatgcgctgaagcaagaagtggagaggctcaagatagcgacgggcgagatgccgaagtccaacgaacaattcaacatggggatgcagcacgtctcgtacagcggcccttctttcttccatctcccggagcagcacgtagacattcagctgccgcaccatttccagcagcctccgcggaacgtccagatgctgtcccaccccaactccctctcggatatggcgcagcaagactcgcttgggcggctccgggggctggacattggaaaagggtccatggctatgaagccagaggcagaggtcgtggtgaagtcagagggcagctctgtatctgcaggtgaaagcaacaccaccttctagctatacaatacatctgccttccaagaagcctccgtttggtttagagttcttttgttcatagtctgacatcctccttccttgagctgcttcgtccttctcagtaggcctattttttttattccattggttatatctactagttaacattggtcggttgccaatcgttgttgtcgtggtggctgatttctatagggacattgatgtgttggtttcgagtttgttgttgttgttgtgtgtgtggttggttgtttcgagctaggggctgaaagggcaccgagtgtttttttctccacctgttttagttttgttatagatttgacaacaatcgttatgatttctccttctggaaaggtgtacattgtgttgctatgctaatttgtagtgatatttttgatgattccaactgt

SEQ ID NO: 27558 - DNA, 6007 bp, Zea Mays
cagcagcgctgcagcgaccacccgcggctgggtgcgcgcgttcgttgtcccttccacatccaccggaaagctacgcctcctcctcctcctccaccacctcgtctcctctccactctcaatcgctctctctctctccgtgggcgatgcgctcagcctgctcaggtcagcgttgatctatcggagggaggactgcctgcgctcgccggccacccatggctatggcggcagcggcggcggcggctaccaagaggtgcatgaacccggcatgcggcgcgccggcgtcggtgctgggggcgggaggggactggaggaagggctggccgctgcggtccggatgcttcgccctactctgcgacaagtgcgggttggcatatgaacagtttgtgttttgtgatatatttcaccaaaaggaatcaggatggagagactgctcattttgtgggaagcgcctccattgtgggtgtgttgcttcaaagaactcttatgatctacttgacagtggaggagttcattgtgtcacttgcatgaaaaattcattagcccagtccgcttctggtcaagtggttccaaagctttttccatctccaatcaatctacgttttttcggtaaaagtgacgagttattgtcaagtagaaattttgaacagccaccctctcttacattggattccagaaatgatgatattgcttttgtaaataagagcaatcacctgttcatggtaaaaggtatagaggctggacaaagcagtaacatcttgagacaaaaagagatagagaatggttcaaggcagattaaatgggaacaaccaacccttagttttggggacatgggaaggcctttcctaactaggtctcaaagtgcattagagtcacctcaatgtactcgaagagatgacaataaggatccaactacagatagcacaagtgagtcattttcagaagcatgtctgagcatgagcctaggtattgcaaacaatgtaaacaggatggaggctacttcaacagcggaaaggcctgtgctattgtcaacaacagccattgctgaaggaagagaacttgccactacactatctccctttcaacacgcacaaagggcacggcatttcctgaccagacctccaaggattggtgaaggtgctgcttttgatccaacaagagacatgtttccacatcttcgtgttgctagaccacctgctgatggaaggggacgcaatcaattacttcctcgttattggccaagaataacagaccaagagctgcaacagatatctggagattcaaattccacgattgttccattgtttgagaaggtcctgagtgcgagtgatgcaggccgcatagggcgccttgttcttccaaaagcttgtgctgaggcatatttccccccaatttcccaaccggaaggtcgccccttgacaattcaagatgcaagaggaaaagaatggcattttcagtttaggttttggccaaataataacagcagaatgtatgtcttggagggtgttacaccatgcatacagtctttgcaattacaagctggcgatacagtgacctttagtcgtatagatcctggagggaaacttgttatgggctttcggaaggccacaaatactgtcagtctgccagtaagttagattttccataagataatctattgctgatgcaagtgcttgtttttcatctcctttctcatgtttttgcttcgatgtttgtttattacttttacgcaggactcacagatctcagctattgcaaatggttcccttctcagtgagacactcttttctactgcaaatgagaacataggtgtcgtaagtggttatcctggatttcttcactcaataaagggagccgcagatctccatccaaactctctatatgatcatcatatgaacttagttgatggggatgtcagttggaataaggcagataaatttggcagcaggccagatgagggatccttgcaatttttacaaaaacgtagtcacaatattggttccaaaagcaggaggttcttaatcgatgctgaagatgccatggaactaaagcttacctgggaagaggctcaagagttgttgcgccctgctcccactgcaaaaccaactgttgtgatgattgaggactatgaatttgaagaatatgatgaaccccctgtctttgcaaagagatcaattttcaccatccgtgcaacaggggaacaagatcagtggattcaatgtgacgactgctcaaaatggcgccggttgcctcttaatgttattgttgcgcccaaatggacatgcaccgacaactcatgggactcaaaatggtaatgttatattgtgttctctgttgatgtgttgtgcgatgtgtgatccgatcaatctttagccttaaaaattctgaaactttggtgtgatgatcttattggtgtggaacaatgaattttatatggacttcatctgtttcattccatgttacagtcttggtcaatccagaatttcagtcacacttgatccttgatttgctagattaatccatgtactttgaaatatgctcttttctctcgtatccctctcaacaattcgtattggaaaaactttttggcatcaggccaattgtctgtgatactgtcccttgttttttttgagaccctatctaggcatgtacgtatttcacactatctcttgccggaggccattcggtctgtgacactgtcccttactccgttgctggactgctctagccttacttttgttactcctacttattctcattgtactttaaattcaactgttgcagctgctcctgctctgcgcctgaagagttgaccccaagagagttgcaaagtgttctgcagcagtatgaagaaatgaggaggcgaaagggcagttatggtctgaagctgaacgtcgctgaaatggatgcatccagccttgatgctttcgccaccgccgcagtatttggcgaagtcgggaaccaaggcagcgcctcagtggcgacaaccacaaagcacccccgacatcgccctggctgcacatgcatcgtgtgcatccagccgcccagcggcaagggcccgaagcacagccccgcgtgcacctgcaacgtgtgcatgacggtcaggcgccggttcaagacgctgatgatgaggaagaagcagcggcagtcggagcgcgaggaggcggaggccggcaagaagatcgcatgggtgaacagagacgagcctgaggggagcagcctgtcgagatccccgcagacgcttgacagcacccgagacaacagtgatgtgacggcgaccatgttggacaaggtgtccgacgtgaacaagcaggggcacatcgacgtcgacctcaacctccaccctgctgcccctgccgtccaggctgcgcagcagcagccccggccggtgagcatgatgggtctcttggaagtggcgggccggccgcttgacaactacatgaagcagaatggcctgacgagcctggtgggggagcaaggtggtggcagctccagcacggccacggtccctcctccggctctggtggagagtgaggagcggacgtccaacgagggcctcgtcccatcagcatcggcagagcgggaaccgaacgccatggccgtcgacgaggctggcgagaaccagcaggacaaggctgccgacgacgacgacgacgccgtcgctgccgccgctacttgacgtgattttttttcatggagctgcttctcctggaggctgggagtaacttacgtgtacgtatgaggcttgtgttggttggtgttgtaatctgacgcttaaacattggcttcaataactcatacagagtgagaacctgaaagtatcagtctagagcaagttctttttactggtgctgaaagtatcagtcttgcgcaacccaaaaggaggaaacaaaaattttagaccctccaaaattgtactcccctttggtatgtacaatctgaagtggtaacaaaaatgcactacttttttctaatagaactccgatccaagacatgcttgttttttgtttaggaaaaaaggctaggttcacctgattgtttctgatcttcttccatgtaatattttaacacatttttctttcgaacaaaatataactcagctgtttcaaaaccgtcaaaaaaaaacaacttatgattagctgctcctttttttactgctccaaggctggcctgtgagcaacattgcacccccaccacaggtcaggttcatccagcccatttattattctaaaaaaaaactctactccaaaagatgtgtccagcccagtgaagcccgaaaggaaagaagccagccgctcccgtgggcgacgacatggtcctgtgtccgtgtgaggtacacatgactacgggggccccacctccttcgttcccaatcccagatcccgcactctctttcagaacccaacacgccactgcctagctagtagctagcagagcagctagccaagcaacccagccgagtagccgaccagagagagcgagagaggcagagaggagcggacctgcccgtcgcaatggcgatgccgccgaagcccggcgacccgccgcagcgctcgcctgcgcggagccccaacctcaacctgccctgcccgctgccgccggtcccgggcgggccgcctgcgccgtcggccgccgggttgcccccgccgcgcgcgagtcaccaccgccgcgccagatctgaggtggcctttcgcttctcggacgacctggccggcggcgtgggcggcggcttcgacgagatcggctccgaggacgacctcttctccaccttcatggacatggacaagatcgccggcgccgaccgcgaccgtgccgccgagacctcctcgccgccgcgcccagccaagcaccgccacagcgcctcctttgacggcttcgggatgggggctgccgccggtggcctggccgggcagcaggacggcggcggaggcatgtttggagaggtgatggaggccaagaaggccatgtcttccgagcagcttgccgagctcgctgccatcgaccccaagcgcgccaaaagaataattgcaaacagacaatctgcagcacggtcaaaggaaagaaaatctagatatataacagaactggagcggaaggttcaaactcttcagacagaggctactactctttcagcgcagctcacactattccagagagacacaactggactttcggcagaaaatgctgagctgaagataaggttgcaggccatggagcagcaggctcaactgcgggatgctctaaacgatgcgctgaagcaagaagtggagaggctcaagatagcgacgggcgagatgccgaagtccaacgaacaattcaacatggggatgcagcacgtctcgtacagcggcccttctttcttccatctcccggagcagcacgtagacattcagctgccgcaccatttccagcagcctccgcggaacgtccagatgctgtcccaccccaactccctctcggatatggcgcagcaagactcgcttgggcggctccgggggctggacattggaaaagggtccatggctatgaagccagaggcagaggtcgtggtgaagtcagagggcagctctgtatctgcaggtgaaagcaacaccaccttctagctatacaatacatctgccttccaagaagcctccgtttggtttagagttcttttgttcatagtctgacatcctccttccttgagctgcttcgtccttctcagtaggcctattttttttattccattggttatatctactagttaacattggtcggttgccaatcgttgttgtcgtggtggctgatttctatagggacattgatgtgttggtttcgagtttgttgttgttgttgtgtgtgtggttggttgtttcgagctaggggctgaaagggcaccgagtgtttttttctccacctgttttagttttgttatagatttgacaacaatcgttatgatttctccttctggaaaggtgtacattgtgttgctatgctaatttgtagtgatatttttgatgattccaactgt

SEQ ID NO: 27559 - DNA, 5273 bp, Zea Mays
aaaaacacaagcacgcaccaatcaccaccagcagcgctgcagcgaccacccgcggctgggtgcgcgcgttcgttgtcccttccacatccaccggaaagctacgcctcctcctcctcctccaccacctcgtctcctctccactctcaatcgctctctctctctccgtgggcgatgcgctcagcctgctcaggtcagcgttgatctatcggagggaggactgcctgcgctcgccggccacccatggctatggcggcagcggcggcggcggctaccaagaggtgcatgaacccggcatgcggcgcgccggcgtcggtgctgggggcgggaggggactggaggaagggctggccgctgcggtccggatgcttcgccctactctgcgacaagtgcgggcttctggtcaagtggttccaaagctttttccatctccaatcaatctacgttttttcggtaaaagtgacgagttattgtcaagtagaaattttgaacagccaccctctcttacattggattccagaaatgatgatattgcttttgtaaataagagcaatcacctgttcatggtaaaaggtatagaggctggacaaagcagtaacatcttgagacaaaaagagatagagaatggttcaaggcagattaaatgggaacaaccaacccttagttttggggacatgggaaggcctttcctaactaggtctcaaagtgcattagagtcacctcaatgtactcgaagagatgacaataaggatccaactacagatagcacaagtgagtcattttcagaagcatgtctgagcatgagcctaggtattgcaaacaatgtaaacaggatggaggctacttcaacagcggaaaggcctgtgctattgtcaacaacagccattgctgaaggaagagaacttgccactacactatctccctttcaacacgcacaaagggcacggcatttcctgaccagacctccaaggattggtgaaggtgctgcttttgatccaacaagagacatgtttccacatcttcgtgttgctagaccacctgctgatggaaggggacgcaatcaattacttcctcgttattggccaagaataacagaccaagagctgcaacagatatctggagattcaaattccacgattgttccattgtttgagaaggtcctgagtgcgagtgatgcaggccgcatagggcgccttgttcttccaaaagcttgtgctgaggcatatttccccccaatttcccaaccggaaggtcgccccttgacaattcaagatgcaagaggaaaagaatggcattttcagtttaggttttggccaaataataacagcagaatgtatgtcttggagggtgttacaccatgcatacagtctttgcaattacaagctggcgatacagtgacctttagtcgtatagatcctggagggaaacttgttatgggctttcggaaggccacaaatactgtcagtctgccagactcacagatctcagctattgcaaatggttcccttctcagtgagacactcttttctactgcaaatgagaacataggtgtcgtaagtggttatcctggatttcttcactcaataaagggagccgcagatctccatccaaactctctatatgatcatcatatgaacttagttgatggggatgtcagttggaataaggcagataaatttggcagcaggccagatgagggatccttgcaatttttacaaaaacgtagtcacaatattggttccaaaagcaggaggttcttaatcgatgctgaagatgccatggaactaaagcttacctgggaagaggctcaagagttgttgcgccctgctcccactgcaaaaccaactgttgtgatgattgaggactatgaatttgaagaatatgatgaaccccctgtctttgcaaagagatcaattttcaccatccgtgcaacaggggaacaagatcagtggattcaatgtgacgactgctcaaaatggcgccggttgcctcttaatgttattgttgcgcccaaatggacatgcaccgacaactcatgggactcaaaatgctgctcctgctctgcgcctgaagagttgaccccaagagagttgcaaagtgttctgcagcagtatgaagaaatgaggaggcgaaagggcagttatggtctgaagctgaacgtcgctgaaatggatgcatccagccttgatgctttcgccaccgccgcagtatttggcgaagtcgggaaccaaggcagcgcctcagtggcgacaaccacaaagcacccccgacatcgccctggctgcacatgcatcgtgtgcatccagccgcccagcggcaagggcccgaagcacagccccgcgtgcacctgcaacgtgtgcatgacggtcaggcgccggttcaagacgctgatgatgaggaagaagcagcggcagtcggagcgcgaggaggcggaggccggcaagaagatcgcatgggtgaacagagacgagcctgaggggagcagcctgtcgagatccccgcagacgcttgacagcacccgagacaacagtgatgtgacggcgaccatgttggacaaggtgtccgacgtgaacaagcaggggcacatcgacgtcgacctcaacctccaccctgctgcccctgccgtccaggctgcgcagcagcagccccggccggtgagcatgatgggtctcttggaagtggcgggccggccgcttgacaactacatgaagcagaatggcctgacgagcctggtgggggagcaaggtggtggcagctccagcacggccacggtccctcctccggctctggtggagagtgaggagcggacgtccaacgagggcctcgtcccatcagcatcggcagagcgggaaccgaacgccatggccgtcgacgaggctggcgagaaccagcaggacaaggctgccgacgacgacgacgacgccgtcgctgccgccgctacttgacgtgattttttttcatggagctgcttctcctggaggctgggagtaacttacgtgtacgtatgaggcttgtgttggttggtgttgtaatctgacgcttaaacattggcttcaataactcatacagagtgagaacctgaaagtatcagtctagagcaagttctttttactggtgctgaaagtatcagtcttgcgcaacccaaaaggaggaaacaaaaattttagaccctccaaaattgtactcccctttggtatgtacaatctgaagtggtaacaaaaatgcactacttttttctaatagaactccgatccaagacatgcttgttttttgtttaggaaaaaaggctaggttcacctgattgtttctgatcttcttccatgtaatattttaacacatttttctttcgaacaaaatataactcagctgtttcaaaaccgtcaaaaaaaaacaacttatgattagctgctcctttttttactgctccaaggctggcctgtgagcaacattgcacccccaccacaggtcaggttcatccagcccatttattattctaaaaaaaaactctactccaaaagatgtgtccagcccagtgaagcccgaaaggaaagaagccagccgctcccgtgggcgacgacatggtcctgtgtccgtgtgaggtacacatgactacgggggccccacctccttcgttcccaatcccagatcccgcactctctttcagaacccaacacgccactgcctagctagtagctagcagagcagctagccaagcaacccagccgagtagccgaccagagagagcgagagaggcagagaggagcggacctgcccgtcgcaatggcgatgccgccgaagcccggcgacccgccgcagcgctcgcctgcgcggagccccaacctcaacctgccctgcccgctgccgccggtcccgggcgggccgcctgcgccgtcggccgccgggttgcccccgccgcgcgcgagtcaccaccgccgcgccagatctgaggtggcctttcgcttctcggacgacctggccggcggcgtgggcggcggcttcgacgagatcggctccgaggacgacctcttctccaccttcatggacatggacaagatcgccggcgccgaccgcgaccgtgccgccgagacctcctcgccgccgcgcccagccaagcaccgccacagcgcctcctttgacggcttcgggatgggggctgccgccggtggcctggccgggcagcaggacggcggcggaggcatgtttggagaggtgatggaggccaagaaggccatgtcttccgagcagcttgccgagctcgctgccatcgaccccaagcgcgccaaaagaataattgcaaacagacaatctgcagcacggtcaaaggaaagaaaatctagatatataacagaactggagcggaaggttcaaactcttcagacagaggctactactctttcagcgcagctcacactattccagagagacacaactggactttcggcagaaaatgctgagctgaagataaggttgcaggccatggagcagcaggctcaactgcgggatgctctaaacgatgcgctgaagcaagaagtggagaggctcaagatagcgacgggcgagatgccgaagtccaacgaacaattcaacatggggatgcagcacgtctcgtacagcggcccttctttcttccatctcccggagcagcacgtagacattcagctgccgcaccatttccagcagcctccgcggaacgtccagatgctgtcccaccccaactccctctcggatatggcgcagcaagactcgcttgggcggctccgggggctggacattggaaaagggtccatggctatgaagccagaggcagaggtcgtggtgaagtcagagggcagctctgtatctgcaggtgaaagcaacaccaccttctagctatacaatacatctgccttccaagaagcctccgtttggtttagagttcttttgttcatagtctgacatcctccttccttgagctgcttcgtccttctcagtaggcctattttttttattccattggttatatctactagttaacattggtcggttgccaatcgttgttgtcgtggtggctgatttctatagggacattgatgtgttggtttcgagtttgttgttgttgttgtgtgtgtggttggttgtttcgagctaggggctgaaagggcaccgagtgtttttttctccacctgttttagttttgttatagatttgacaacaatcgttatgatttctccttctggaaaggtgtacattgtgttgctatgctaatttgtagtgatatttttgatgattccaactgt

SEQ ID NO: 27560 - DNA, 3359 bp, Zea Mays
ctaccatggcttcgcccgagccggcggccacccctcctaagccaactgtttgaatgtaattcgtagagacaaaaacacaagcacgcaccaatcaccaccagcagcgctgcagcgaccacccgcggctgggtgcgcgcgttcgttgtcccttccacatccaccggaaagctacgcctcctcctcctcctccaccacctcgtctcctctccactctcaatcgctctctctctctccgtgggcgatgcgctcagcctgctcaggtcagcgttgatctatcggagggaggactgcctgcgctcgccggccacccatggctatggcggcagcggcggcggcggctaccaagaggtgcatgaacccggcatgcggcgcgccggcgtcggtgctgggggcgggaggggactggaggaagggctggccgctgcggtccggatgcttcgccctactctgcgacaagtgcgggttggcatatgaacagtttgtgttttgtgatatatttcaccaaaaggaatcaggatggagagactgctcattttgtgggaagcgcctccattgtgggtgtgttgcttcaaagaactcttatgatctacttgacagtggaggagttcattgtgtcacttgcatgaaaaattcattagcccagtccgcttctggtcaagtggttccaaagctttttccatctccaatcaatctacgttttttcggtaaaagtgacgagttattgtcaagtagaaattttgaacagccaccctctcttacattggattccagaaatgatgatattgcttttgtaaataagagcaatcacctgttcatggtaaaaggtatagaggctggacaaagcagtaacatcttgagacaaaaagagatagagaatggttcaaggcagattaaatgggaacaaccaacccttagttttggggacatgggaaggcctttcctaactaggtctcaaagtgcattagagtcacctcaatgtactcgaagagatgacaataaggatccaactacagatagcacaagtgagtcattttcagaagcatgtctgagcatgagcctaggtattgcaaacaatgtaaacaggatggaggctacttcaacagcggaaaggcctgtgctattgtcaacaacagccattgctgaaggaagagaacttgccactacactatctccctttcaacacgcacaaagggcacggcatttcctgaccagacctccaaggattggtgaaggtgctgcttttgatccaacaagagacatgtttccacatcttcgtgttgctagaccacctgctgatggaaggggacgcaatcaattacttcctcgttattggccaagaataacagaccaagagctgcaacagatatctggagattcaaattccacgattgttccattgtttgagaaggtcctgagtgcgagtgatgcaggccgcatagggcgccttgttcttccaaaagcttgtgctgaggcatatttccccccaatttcccaaccggaaggtcgccccttgacaattcaagatgcaagaggaaaagaatggcattttcagtttaggttttggccaaataataacagcagaatgtatgtcttggagggtgttacaccatgcatacagtctttgcaattacaagctggcgatacagtgacctttagtcgtatagatcctggagggaaacttgttatgggctttcggaaggccacaaatactgtcagtctgccagactcacagatctcagctattgcaaatggttcccttctcagtgagacactcttttctactgcaaatgagaacataggtgtcgtaagtggttatcctggatttcttcactcaataaagggagccgcagatctccatccaaactctctatatgatcatcatatgaacttagttgatggggatgtcagttggaataaggcagataaatttggcagcaggccagatgagggatccttgcaatttttacaaaaacgtagtcacaatattggttccaaaagcaggaggttcttaatcgatgctgaagatgccatggaactaaagcttacctgggaagaggctcaagagttgttgcgccctgctcccactgcaaaaccaactgttgtgatgattgaggactatgaatttgaagaatatgatgaaccccctgtctttgcaaagagatcaattttcaccatccgtgcaacaggggaacaagatcagtggattcaatgtgacgactgctcaaaatggcgccggttgcctcttaatgttattgttgcgcccaaatggacatgcaccgacaactcatgggactcaaaatgctgctcctgctctgcgcctgaagagttgaccccaagagagttgcaaagtgttctgcagcagtatgaagaataattgcaaacagacaatctgcagcacggtcaaaggaaagaaaatctagatatataacagaactggagcggaaggttcaaactcttcagacagaggctactactctttcagcgcagctcacactattccagagagacacaactggactttcggcagaaaatgctgagctgaagataaggttgcaggccatggagcagcaggctcaactgcgggatgctctaaacgatgcgctgaagcaagaagtggagaggctcaagatagcgacgggcgagatgccgaagtccaacgaacaattcaacatggggatgcagcacgtctcgtacagcggcccttctttcttccatctcccggagcagcacgtagacattcagctgccgcaccatttccagcagcctccgcggaacgtccagatgctgtcccaccccaactccctctcggatatggcgcagcaagactcgcttgggcggctccgggggctggacattggaaaagggtccatggctatgaagccagaggcagaggtcgtggtgaagtcagagggcagctctgtatctgcaggtgaaagcaacaccaccttctagctatacaatacatctgccttccaagaagcctccgtttggtttagagttcttttgttcatagtctgacatcctccttccttgagctgcttcgtccttctcagtaggcctattttttttattccattggttatatctactagttaacattggtcggttgccaatcgttgttgtcgtggtggctgatttctatagggacattgatgtgttggtttcgagtttgttgttgttgttgtgtgtgtggttggttgtttcgagctaggggctgaaagggcaccgagtgtttttttctccacctgttttagttttgttatagatttgacaacaatcgttatgatttctccttctggaaaggtgtacattgtgttgctatgctaatttgtagtgatatttttgatgattccaactgt

SEQ ID NO: 27561 - DNA, 635 bp, Zea Mays
ggcttctattagccaatataggtctagcctgctcccaaaacttaacagtccgtatattccgctcataattcctcaccggcctgcctcagagagagaaaaagcggagattagcggcggcgatggcactcccggcgtcgagctccggcctcttccgcttcgtctccccgcgcagccgcccccaatccaccgacatcgtggctgccgcctcctggggagtcttcgccggcaccgccggcctctacctcgtccagccatttgactggattaagaaaactttcttcgagaaaccaccccaaccagaggcataaaaggcttgcaagtctgcaactttgatgtaggcaatccccacgagggagacagggaacagagaaactgcttggttcacctgtgtctatataatactcctgtgttatccaacatgcatgttttaaaacctgtggcaaatatatcttgctgattaatattggactatgatgtcatgttcgaatgttcccatcactaaaaggaggaaaaacaatgatggcaacttggcgatgctttcctttcatcattatcgctttatcgtgcgttcaacagttccactacgtttgtgtgacatcaacatgtcatgtttttttcttgaaattaacagaggc

SEQ ID NO: 27562 - DNA, 2206 bp, Zea Mays
ggcttctattagccaatataggtctagcctgctcccaaaacttaacagtccgtatattccgctcataattcctcaccggcctgcctcagagagagaaaaagcggagattagcggcggcgatggcactcccggcgtcgagctccggcctcttccgcttcgtctccccgcgcagccgcccccaatccaccgacatcgtggctgccgcctcctggggagtcttcgccggcaccgccggcctctacctcgtccaggtcaggatcaatcggcctgctcgcatctcttatccgccgctggctcttctggatcgtggctcgtcgcacgtgtacaaggctcgtaggctcagcagtagattgttgtgtgtgatctttgatgagtcttctggatctgccgatgttatatctttcttagggatccgtttcccggcctggtaaacgattaagcactctattggggctgcccagtcaaacatttcctctggatctaatgatatggtgggcagaaggggatgcacatcccacgttttcgtgatgacctagccacctggaattgctatgtcaaacgtctctcaagaatccgaagatagctgcaataaacaaagtacttcaaacgttgaagtggagagaaactcgataccaggtcattaataagttactgatcctttttggatgtggtgctgttatttgggctatttggcgtactcgtaatgattgctgcttcaatgctaggctgattgatgatctatctaatgtgattttctcctgctgttattggattgatgcttggtctattcgacagacaaagaagggaaaaagactggtggaacaaggaagccgcagaattcgaaagataacaagtgatatctacagcaaggcccatggttggaagccggttgacaggcgtctccagtgacattttgctgctgataatacatcttttgcttctggatgtattcagtttgtctgcttttggtagataaaaactagcttttagtcatttctggtgatgcgatgttcctggctgcttttgggatctatcctttgtagatattcagtgatgtctgttagactgtcggacttcttctggtttgctgtgttccttcagttgggtttcatacccctgtgtagctgataatgtggtaggcttatcggcttgtgactgttggatttgtcgtgaattctgtaagaactgtgtttggtttctatttcttaatgaaataggggtatcccattgtcaaaaaaataagttggaccaggattatacagtagactgtagtttatggaagtacaccgatttctgctatcacatggtagaatgtagaaatctaacataattctgactaatggttaaattcgtaacacattggtattgtaatataagttcttagttaacctacgtggtcatgtggtggcatcattttgctttcaccttcatctatttttttttggtgggtgccttgatttgcatcacctggttctttttatagccacgttaaatcttgtgctgcaatgctcttgtttgaggaacttattgagggtatttggagaaataagaatatgtgtttttataatgaaaattaagtgctcatgtaggtctcaccaacaggttgtctttattcctgataatgcatgtgttacggtaggtgatttgggtttgtaatgatgtttcccttcttttagcgatctaataactcttatctccctctcaacttattggctggagacatgtgatttggcctgaaactaccatttgacgttactctatttaatacattcttttggatcaatggattctgaaactctttttggacttaactgttttgcagccatttgactggattaagaaaactttcttcgagaaaccaccccaaccagaggcataaaaggcttgcaagtctgcaactttgatgtaggcaatccccacgagggagacagggaacagagaaactgcttggttcacctgtgtctatataatactcctgtgttatccaacatgcatgttttaaaacctgtggcaaatatatcttgctgattaatattggactatgatgtcatgttcgaatgttcccatcactaaaaggaggaaaaacaatgatggcaacttggcgatgctttcctttcatcattatcgctttatcgtgcgttcaacagttccactacgtttgtgtgacatcaacatgtcatgtttttttcttgaaattaacagaggc

SEQ ID NO: 27563 - DNA, 1301 bp, Zea Mays
ggcttctattagccaatataggtctagcctgctcccaaaacttaacagtccgtatattccgctcataattcctcaccggcctgcctcagagagagaaaaagcggagattagcggcggcgatggcactcccggcgtcgagctccggcctcttccgcttcgtctccccgcgcagccgcccccaatccaccgacatcgtggctgccgcctcctggggagtcttcgccggcaccgccggcctctacctcgtccagggatccgtttcccggcctggtaaacgattaagcactctattggggctgcccagtcaaacatttcctctggatctaatgatatggtgggcagaaggggatgcacatcccacgttttcgtgatgacctagccacctggaattgctatgtcaaacgtctctcaagaatccgaagatagctgcaataaacaaagtacttcaaacgttgaagtggagagaaactcgataccaggtcattaataagttactgatcctttttggatgtggtgctgttatttgggctatttggcgtactcgtaatgattgctgcttcaatgctaggctgattgatgatctatctaatgtgattttctcctgctgttattggattgatgcttggtctattcgacagacaaagaagggaaaaagactggtggaacaaggaagccgcagaattcgaaagataacaagtgatatctacagcaaggcccatggttggaagccggttgacaggcgtctccagtgacattttgctgctgataatacatcttttgcttctggatgtattcagtttgtctgcttttgccatttgactggattaagaaaactttcttcgagaaaccaccccaaccagaggcataaaaggcttgcaagtctgcaactttggtacttcacttttatccggaatggttcctgactgaagagaacttggataactcagcaaataatacgagaccccctcgtgtttccttgtttgttttttattattcagatgtaggcaatccccacgagggagacagggaacagagaaactgcttggttcacctgtgtctatataatactcctgtgttatccaacatgcatgttttaaaacctgtggcaaatatatcttgctgattaatattggactatgatgtcatgttcgaatgttcccatcactaaaaggaggaaaaacaatgatggcaacttggcgatgctttcctttcatcattatcgctttatcgtgcgttcaacagttccactacgtttgtgtgacatcaacatgtcatgtttttttcttgaaattaacagaggc

SEQ ID NO: 27564 - DNA, 1279 bp, Zea Mays
ggcttctattagccaatataggtctagcctgctcccaaaacttaacagtccgtatattccgctcataattcctcaccggcctgcctcagagagagaaaaagcggagattagcggcggcgatggcactcccggcgtcgagctccggcctcttccgcttcgtctccccgcgcagccgcccccaatccaccgacatcgtggctgccgcctcctggggagtcttcgccggcaccgccggcctctacctcgtccagggatccgtttcccggcctggtaaacgattaagcactctattggggctgcccagtcaaacatttcctctggatctaatgatatggtgggcagaaggggatgcacatcccacgttttcgtgatgacctagccacctggaattgctatgtcaaacgtctctcaagaatccgaagatagctgcaataaacaaagtacttcaaacgttgaagtggagagaaactcgataccaggtcattaataagttactgatcctttttggatgtggtgctgttatttgggctatttggcgtactcgtaatgattgctgcttcaatgctaggctgattgatgatctatctaatgtgattttctcctgctgttattggattgatgcttggtctattcgacagacaaagaagggaaaaagactggtggaacaaggaagccgcagaattcgaaagataacaagtgatatctacagcaaggcccatggttggaagccggttgacaggcgtctccagtgacattttgctgctgataatacatcttttgcttctggatccatttgactggattaagaaaactttcttcgagaaaccaccccaaccagaggcataaaaggcttgcaagtctgcaactttggtacttcacttttatccggaatggttcctgactgaagagaacttggataactcagcaaataatacgagaccccctcgtgtttccttgtttgttttttattattcagatgtaggcaatccccacgagggagacagggaacagagaaactgcttggttcacctgtgtctatataatactcctgtgttatccaacatgcatgttttaaaacctgtggcaaatatatcttgctgattaatattggactatgatgtcatgttcgaatgttcccatcactaaaaggaggaaaaacaatgatggcaacttggcgatgctttcctttcatcattatcgctttatcgtgcgttcaacagttccactacgtttgtgtgacatcaacatgtcatgtttttttcttgaaattaacagaggc

SEQ ID NO: 27565 - DNA, 1336 bp, Zea Mays
aaactggatcgctgccgttggcgccgccaccgccgatgtagggtggagcactcagcgtgccgtcgtcgcatgcggcctcgaacatttacgtctggccgtgccggtgctgggaaggaaggggatcgaggggcagcagaccgcagagagacgacagccaccgaggcaattccaactttttaagcttgccccctttgatccaaccaagaagaagaagaagaagaaggttgtcatccaagagccttctgatgaagtggacaagcttgcagagaagacagaatcgctagcagttgcagaacctgctgaacttaacttcactggaatgaagaagaaaaagaagaagcaggtggatcttgattcatctattgatgaccttggagatggggaggacactcaaggtgatcaagttgtagaggaacaaggggacggtattgtgcttggaggtggccctacatatccttgggaaggaactgaccgggattataaatacgaggagctgttggacagagtgttcaacattcttcgtgagaacaacccagatcttgctggtgataggcggagaaccgttatgaggccacctcaagttcttagggagggaacaaagaagacagtttttgttaattttatggatttgtgtaaaacgatgcataggcaacctgagcatgtaatgatgtttttacttgccgaaatgggaacaagtgggtcacttgatgggcagcaaaggttggtgatcaagggaagatttgctcctaaaaactttgaagcaatcctgaggagatacatcaatgagtatgtcatctgcaatggatgcaagagccctgatactattttgtccaaagaaaatcgtctgttcttccttcgctgcgaacagtgtggatcttcacggtccgttgcaccaatcaaagctggattcgttgcgcaagttggtcggcggaaggcctaagcgcaaaccaaattggtcctttgcgctgcctgctctgttttggtcgtgtatttcttgttttttttcgtgtcatgttaatgcagctgaggttcggtttatgattgtcctatctttgtgtggctgaaatttgaggccataccaattcgacaatattacattattttgccggatggacattctgccgtgcaatgttgagagcaagatgtgtcaacagttacattttgtcttgcattcaaaagatccatcgaatgatggcgcagtcctgtggcggctggcgagtgtcactcatgcatcctgcctgataagcgactccctgcgatcgtaacacctggctattgtcaaacaaagtcaccttgcgtaccatttaagaagtaaaaaatttgtagttgaatagac

SEQ ID NO: 27566 - DNA, 1440 bp, Zea Mays
aaactggatcgctgccgttggcgccgccaccgccgatgtagggtggagcactcagcgtgccgtcgtcgcatgcggcctcgaacatttacgtctggccgtgccggtgctgggaaggaaggggatcgaggggcagcagaccgcagagagacgacagccaccgaggcaattccaactttttaagagatcggagcgctcggttcggataggggcgactaggaggtgaaggcgggcgcgtcagccatggcggacgaggagcacccggagaggagggaggaggcctccgagcttgccccctttgatccaaccaagaagaagaagaagaagaaggttgtcatccaagagccttctgatgaagtggacaagcttgcagagaagacagaatcgctagcagttgcagaacctgctgaacttaacttcactggaatgaagaagaaaaagaagaagcaggtggatcttgattcatctattgatgaccttggagatggggaggacactcaaggtgatcaagttgtagaggaacaaggggacggtattgtgcttggaggtggccctacatatccttgggaaggaactgaccgggattataaatacgaggagctgttggacagagtgttcaacattcttcgtgagaacaacccagatcttgctggtgataggcggagaaccgttatgaggccacctcaagttcttagggagggaacaaagaagacagtttttgttaattttatggatttgtgtaaaacgatgcataggcaacctgagcatgtaatgatgtttttacttgccgaaatgggaacaagtgggtcacttgatgggcagcaaaggttggtgatcaagggaagatttgctcctaaaaactttgaagcaatcctgaggagatacatcaatgagtatgtcatctgcaatggatgcaagagccctgatactattttgtccaaagaaaatcgtctgttcttccttcgctgcgaacagtgtggatcttcacggtccgttgcaccaatcaaagctggattcgttgcgcaagttggtcggcggaaggcctaagcgcaaaccaaattggtcctttgcgctgcctgctctgttttggtcgtgtatttcttgttttttttcgtgtcatgttaatgcagctgaggttcggtttatgattgtcctatctttgtgtggctgaaatttgaggccataccaattcgacaatattacattattttgccggatggacattctgccgtgcaatgttgagagcaagatgtgtcaacagttacattttgtcttgcattcaaaagatccatcgaatgatggcgcagtcctgtggcggctggcgagtgtcactcatgcatcctgcctgataagcgactccctgcgatcgtaacacctggctattgtcaaacaaagtcaccttgcgtaccatttaagaagtaaaaaatttgtagttgaatagac

SEQ ID NO: 27567 - DNA, 1551 bp, Zea Mays
aaacaaactggatcgctgccgttggcgccgccaccgccgatgtagggtggagcactcagcgtgccgtcgtcgcatgcggcctcgaacatttacgtctggccgtgccggtgctgggaaggaaggggatcgaggggcagcagaccgcagagagacgacagccaccgaggttgacactgagaggaggaaaagataagaggaaaggatctccaccgagaaaaccctaattcgaacaaccgcgccgccgtcaccgactcaccgtcgtctctcgctcactcgctcgcgctctccatccagatcggagcgctcggttcggataggggcgactaggaggtgaaggcgggcgcgtcagccatggcggacgaggagcacccggagaggagggaggaggcctccgagcttgccccctttgatccaaccaagaagaagaagaagaagaaggttgtcatccaagagccttctgatgaagtggacaagcttgcagagaagacagaatcgctagcagttgcagaacctgctgaacttaacttcactggaatgaagaagaaaaagaagaagcaggtggatcttgattcatctattgatgaccttggagatggggaggacactcaaggtgatcaagttgtagaggaacaaggggacggtattgtgcttggaggtggccctacatatccttgggaaggaactgaccgggattataaatacgaggagctgttggacagagtgttcaacattcttcgtgagaacaacccagatcttgctggtgataggcggagaaccgttatgaggccacctcaagttcttagggagggaacaaagaagacagtttttgttaattttatggatttgtgtaaaacgatgcataggcaacctgagcatgtaatgatgtttttacttgccgaaatgggaacaagtgggtcacttgatgggcagcaaaggttggtgatcaagggaagatttgctcctaaaaactttgaagcaatcctgaggagatacatcaatgagtatgtcatctgcaatggatgcaagagccctgatactattttgtccaaagaaaatcgtctgttcttccttcgctgcgaacagtgtggatcttcacggtccgttgcaccaatcaaagctggattcgttgcgcaagttggtcggcggaaggcctaagcgcaaaccaaattggtcctttgcgctgcctgctctgttttggtcgtgtatttcttgttttttttcgtgtcatgttaatgcagctgaggttcggtttatgattgtcctatctttgtgtggctgaaatttgaggccataccaattcgacaatattacattattttgccggatggacattctgccgtgcaatgttgagagcaagatgtgtcaacagttacattttgtcttgcattcaaaagatccatcgaatgatggcgcagtcctgtggcggctggcgagtgtcactcatgcatcctgcctgataagcgactccctgcgatcgtaacacctggctattgtcaaacaaagtcaccttgcgtaccatttaagaagtaaaaaatttgtagttgaatagac

SEQ ID NO: 27568 - DNA, 316 bp, Zea Mays
gcccataagagaatagtgacacttagttggtattttgttattctatttcagaaatgaagaccaagtgggagaacagctcatggggcacaagcggattttctagaagaggagagcagcgcttgatgactttgataggttcaaagtcatgatggcaaagatcaaggggtggcgctatcaggcaagagctcgccaagttgaagaaggcatccatggcttaatgggtatcttttggtggatgtcatgttagagtttttggttctgagttggatcagcaattcgattgagtgttgacaaatacataattactaacatgttc

SEQ ID NO: 27569 - DNA, 108 bp, Zea Mays
ccaacaggaggttttactgtctcgacaattggctgatgtttgggatgaaaatgccactgaaatgtcagatagaatgttgcaaacaaaaggtcatatgtatcaatgcat

SEQ ID NO: 27570 - DNA, 1835 bp, Zea Mays
cctaccctcctcctcgtcacccaccaacccccgcaaccaacaatggcgcccgccgctgccaccggcgactacctagacgacgacgagttcgacgactacaacccgcacccctacgcgggcggatacgacatcaccgccacctacggctcgcctcgcccgccctccctcgccacctgctaccccgtcgcctctcccgccgcgacgcctgcacccaccgccccgcaggtgccgcggcctccgctccctcagacgcccgcacccgctccggcgccagcgccacagccccctaagccgagctcgccaccggccccggccccggcccccgcggcggagccgtactactggcccaagccgtacgactacggggacgcgccgcgtcacctgcccatgtaccccacgccggaggtgttccgcggctggccgttcctgccgccgccgccggggccgcactgccgctccacgtgcgcccgcgtccgcgcccgtgactactggaggcagtgcatgcgggggctggactacctcttcggccactccgacggctacggggagcgccacatcggagtcgactccctcggggtccccgtctacgccaaccggaaggggggcgtcgaggactccgtcgcagtcgaggtggcgccgccggccgtcgggactgtccagtggcacgacgccggcgaactgcagtttcagaacaacagatcgtcttggtatggtgacaccgaagaggaaacacattcttatgagcaacctacatacacttcatacgatcgatcttatgagcaacctacctatacttcgtatgatcgatcttatgaacagcctacctacacttcatatgatcgatcttatgaacagccttcctacacttcatatgatcgatcttatgaacagccctacagttttcacgctgttcccgatgagactacctggtttcctaatcagacctaccaggatgtctacaaagaggaggaaccacaattccaggaattcttctcgtatgatgaagacaataaaatttcgtctcaacctatttttagctacaatcagcattttggtgaacaatcactgcatattcatgttgagcctccagaaacagtttcttctcacaagctggagtactatgaggagagtatatatctgtaacacatctcgtgtttaacagtcctcattattcggaactaagttatattttggtcctggtgtagaatttctcgatgtacaacaaccaaaatgatggtgataatctggagagttcaagacaatcatatgagacacagtcctatgtgcacatgccttacgatcaacttgaaccttataggccttcatggtctctgaattcaggatactatcaggcctgcacagaagggataactccagaatatgacaatcatacactggcatctgatgaaaactgggatatgtcaagcttatttatgtctccattctatcctcaagaaacacgatcttatgagcagtctcatggtgatgaaaatgtctaaattggaagagcaactggaacatgctttctgaagataatcatcagatagctaaattgggtgatggaactaaccatattagtcaattctggaacttcggagactacgcaacctatactgtatactctgtgttgtagcaatgttgcttcaggttcagttgtatttgtataactgtatttacatgctgactagagatacattcaccctatgttagatttttcagtttgcctaaagctgaagcggattttgcgtgttctatttcgttaccagagtcttgtctgtaccacaatactctgtgttatagcttcaaataaattattttcttcgttacatgagtgc

SEQ ID NO: 27571 - DNA, 424 bp, Zea Mays
ccgccgcttgcgggggccgggggagactgcgacggcgacgggttggccgcctcctgctgcgcgggatccagcgctccgcgtcggggcgcgcggcgcgcgcgtcggtggtggatctgctgcgactgcgtcgtggcgtgggggacggtcggaagacgcggcaggcaacgtttatggcgtacgcgcggcgcgggtactttgagttgacctcgctcgggtttggaaattgggatcgcgtggcgtgggcaaagggaagcgcggcggacggaacacggaagtgcgagccgcctcaggatctgccgcgggcggacaaggcacaggggtcaggggagatgcagcgcgaggaggcgagggccggatggaaagtgctctgcctgccgaagccgatgccgaaccacccccggctggctgtggcgtggtgtgtgga

SEQ ID NO: 27572 - DNA, 143 bp, Zea Mays
gccacattgagttgtgagaagcatttctgagaatcagctggcaaagttacgaattagagcagcaacaaatggagaagaaaagcatcatacccattcgtatgcaccttcctgcgttccatcaagaactgtaacccaatccggtt

SEQ ID NO: 27573 - DNA, 1880 bp, Zea Mays
attaacatcacacagcaaacttgaaatgcagacattcagaaccactcatcagagtcttttagaacaccaaacggacaggtagcagtagcagcagcagcagcaacgaagatgtcattcagacatggtcgctagccgtacatgcatgctatatattattcgtccattcaggaaccgaggacgcgaagacacagacagataacagctagagcggaggaggacgaattaggcggcggcggcagcagctaggtaaggttccttggattcatctagctcgtctctgttcaccagggcaggatcttccagcgctggttgtcgcccttggcccactcccagaggacgacggtggtgccgtcgtggacgccgccgtggtccttgtcgccgtggaaggcgtccatgttgaggtagatgttgttcaccatgcgcacgcagcggaagccgtgcccgacgtcgcggctctccgtccacagcaccgactcgtcaacgtactcggggttgtagggcacaaggcgtaccgggtggctctgtcccagcgagtgcttgatggcttcgccggtgaccttgttcaccagcgcgaacgctgggtacccttcctcgtccttgatgctagtgctgtgcctcatgtccttcacccatacctggaactcgtccctggggttggttggcgccaggcacacggtgccgttcctgacggtgaggctgtacccttcgccggccttgcagtagacgcggacggtctgttcagacgccagagcgcgaggcaggttgctgtacccgtaccccgccgggtagcccccagcagatggaggacggtacccgccgtagccaggctcctgcacaggcacaggcggaggcggcggcgcgtagccccctgcagctgggggaggagggtacccgccgtagcctggttccacctgggcaggcggaggaggaggcgcgtagccccctgcagctggtggaggagggtacccgccgtagcctggttccacctgggcaggcggaggcggcggcgcgtagccccctgcagccgggggacggtacccgccgtagcctggttccacctgggcaggcggaggaggagcgtacgggcgcggcgcgtaggcctcgtccccccagggcagcaccttccagctctggttggggcccttgcaccactcccagagcaccacggtggtgccgtcgtgcacgccgccgtggtccttgtcgccgtggaaggcgtcgaagttgaggtggatgttgttgaccatgcggatgcagcggaagcccttgcccacgtcgtggctctccgtccacagcaccgactcgtccaggtactccgcgttgtagggcaccagcttcacctgcatacatatgcgtgtgtgtgtgtgtatttgtgggcgtgtaatgcaacacgtacgtacggtgagaaatcgagagagcagatagagacggccgcgccggcggcggacttacgggatgggactggccgagcgagtgcttgatggcgaggccggtggccctgttgatgagcgcgaacgccggctggccctccgcgtccttcaccttcgtgctgtgcctcatgtccttgtaccagtgctgcacatgcatgcgcaggcacaagtatacagatccatgaccaaccactatcgtcaatggcagaaagagagagagagagagagagagagagagaggcatgcctggtactcgtcgcgggggttggtgggcgcgaggacgacggcgtcgtggcgcacggtgaggcagtacgcctcgtcggcgcggcagaagatcctgaacagcgtctgctcgtgcggcggcggggcctggtggtgcccgccgtggccgtggtggtggtggtgcccgaacatgcttccttccctttcctgaagctgagacctcgatgtgaa

SEQ ID NO: 27574 - DNA, 1724 bp, Zea Mays
ggctcatcaaaggcagaagccagctcctccgaaggtgatgggaagcaaaacaaggatttatctccattgtgctggagtttgttatgggtggagagctccatgatatcataccattatgctaatggagaacccaaaagcaggaaggggtctgaggttttccaagtggctccatctctcaatgtggctgagctgaagaaggcaaagggagatactcaaaatgtacaaattttactcaaacagttcaaataatcaataattcagtatacaaatcttactctgtccatggagctgaaggacgtcgttcgggagcatgatgattaagtccaagacagaagttcctcaccatgaaacagttgtagaattttaagcttacagaactcattgtggtggtggtggggagggcggctgagatgagggatatgttgttagttttccctgtacatagctcttgttttcagcgcctaagacctgataatgatgatctggaatgaatgaagaggtacatgaaacagatgagaaggctgtttcctgtagtgaatactggaatatggtgctgatatattcataggttcagaatataatgtatgttattagtcggtcaaacttcgggaagacaatgttgcctccaacaatacaacaccttgcactggatgtctgaatccatttgtttcagttgcatccaacaatacaaatcggcggtttggaataaatttgcacaaagagcttctgccacgataactgcagatcatcgcattaaaaacaaccggccatccattgatgctaaaaaaggtgaagcagaagttgatgtgtggaggtggtgggagggggaatgtagctacatatggtttcaactgcaaccaagacacagcagggagggcaatcattacagtttcacatgaatcaacagttctgaaaacacactggagggaagaacaaagcagcaactgcattgcctttcaaaaactacaactagcagaatgtttcactggaagtcgatgaaataagagttgcattgcatcttgactaatatgcaatgcacaatcctctctgccttgagcttatgcttctgtggctcacttggccatcatgaccttaacaaactcctcgtagttaatctggccatcaccatcgacatcagcctcacggatcatctcgtctacctcctcatcagttagcttctccccaagatttgtcatgacatggcggagctcggcggcagagatgaagccgttctggtccttgtcaaacacacgaaaggcctccttgagctcttcctcagagtcggtgtccttcatcttgcgagccataaggttcagaaactctggaaaatcgatggtgccgttgccatcggcatcgacctcattgatcatgtcctggagctcagcctctgtagggttttgccccagtgaacgcatgacagttcccagctccttggtcgtgatgcaacctgtacaagatacggcacaaccatttctgtaattataactaggtaaagtagtgactgaagagagaaataattcagcaagttagggagaacccagatgtcaaaaggtggtaatatcttaatcgaaaagtttgaaatgctatgtggaaagcagggcagtttctaagtggtaaatcatcatgttttgaccgagcacgcatagccactggaattgagccaatcagtgtgggtgccgtttccccaatagcagtcggtcccagttttcctttttgggggtcaa

SEQ ID NO: 27575 - DNA, 2251 bp, Zea Mays
cctcctctgcaaattgttagttccgtaaaggagtagcgcgtgtgtccaactgtccatataaatatgtgatgcctctttgagtttgagccgtggcctcactcgtagtcgtagctcacacaatgggcgtgcagagagccagtggcgtgtccttgctccatgcactgcttgttgtgttctgggcattgtcttctcgtcgtgcgaaggggcagaacccatctggccacctgagcgtggatgcctcgccgcagaacgttaggaagatccctgataagatgtttggcatctttttcgaggagatcaaccatgctggagctggtgggttgtggtcagagctcgtaagcaacagaggatttgaggctggtgggcctaatacaccttcgaatattgatccgtggctgatcattggggatgaatcaagtatcattgttggaactgatcggacatcatgttttgaacgtaacccagttgcacttcggatggaagttctttgtggttctaaaaaaactaatgcctgtccatcgggaggtgttggggtctataatcctggctactggggcatgaacattgaaaaggggaaggtttataaggtgagcctgcatgttaggtcatcagatgcactgtccttgactgcttccttgacaagctccgatgggctacaaaagctcgctgctcataccatcacaggtagcaagaaaacctttgcaaaatggacaaaggtagaatttcatttgagatccaaccaaaataacagcaactcaaggtttcaacttacaacaagtaaaagcggggtagtttggcttgatcaagtatcagttatgccaatggacacttacatggggcatggttttcggaaagatcttgcttctatgttggccaatctcgagcctcagtttctcaagtttccaggtggcaactatgccatgggaaattatctacgaaatgcatttcggtggagtgagactgtgggaccatgggaggagagacctggtcactttaatgatgcctggggatactggactgatgatgggcttggattttttgagttccttcagttggctgaagaccttggggcttccccagtttgggtggtgaatgatggagcaagccttaatgaagaagtttccactaaaacaattgcatcattggttaaggaaattaccaaaagttttactcagcgattaaatctgcctacccagacatcaacattatatcaagttgtgataggccaactatttcgccatccaaccctgccgatctttatgatgttcatgtctacacctcttcgactaatatgttttcaaaagctagtatgtttgacaacacaccacgtggagcaccgaaggcaattgttagcgagtacgctgtgaccggaaatgatgctggcaaaggaacactggtagcagcactggcagaagctgcatttctcattggattggaaaggaacagtgatgtggttgagatggcaagctgtgcacccctttttgtaaatgacaatgatcgcaggtggagcccagatgccatcgtcttcaactcggggcagcactatgggtgtcccaactattggatgctacacttcttcaaggaatctagcggcgccaccctccatcctacagccattcaggtctccagctacgatcagctggttgcgtctgccatcacttggcagaacgctaaagacaagagcacttacctcaggataaaggtggtgaatttcggcaatcaagctgtggatctgaacatatcggttgtggaactggccaccggcgtcaagaagtctggatcgaagcagacggttctaacgtccagcagtccgcttgacgagaactccttccagcagccagagaaggtggcgccagtgtcgagcccaatggcgaacgcggggcagcagatgggcgcttccgtggggccgtactccctcacctcgtttgacctgctgctggagccgagcaagcatgacagcgtgtaaaactgtcaactgaagaagcatgacagcggtgtacgtaaaggaggtcaaagatagaggagacaggtcagaggtcaaaattgagaccttgataccatattggattggattgtatgtatcaacaagttcaacctaaaagtttaagctgatagtgaaatgcggacagttcacattctaacaaatcccagtcaatgttgcatccaacaatactttgtacttgatgtctgaatccatttgattcagaagatagcgctttattgttttgccaatgcaaatacacatgcgatc

SEQ ID NO: 27576 - DNA, 2403 bp, Zea Mays
gcgggagtgaacggagaagtaaagcttcattcaaacagaatctgacgagtgacgacgtccctgcccgttcctatcttcctttctcaccgtcatcatcttcttagctttgcttccactcgtgcaactcctcctctgcaaattgttagttccgtaaaggagtagcgcgtgtgtccaactgtccatataaatatgtgatgcctctttgagtttgagccgtggcctcactcgtagtcgtagctcacacaatgggcgtgcagagagccagtggcgtgtccttgctccatgcactgcttgttgtgttctgggcattgtcttctcgtcgtgcgaaggggcagaacccatctggccacctgagcgtggatgcctcgccgcagaacgttaggaagatccctgataagatgtttggcatctttttcgaggagatcaaccatgctggagctggtgggttgtggtcagagctcgtaagcaacagaggatttgaggctggtgggcctaatacaccttcgaatattgatccgtggctgatcattggggatgaatcaagtatcattgttggaactgatcggacatcatgttttgaacgtaacccagttgcacttcggatggaagttctttgtggttctaaaaaaactaatgcctgtccatcgggaggtgttggggtctataatcctggctactggggcatgaacattgaaaaggggaaggtttataaggtgagcctgcatgttaggtcatcagatgcactgtccttgactgcttccttgacaagctccgatgggctacaaaagctcgctgctcataccatcacaggtagcaagaaaacctttgcaaaatggacaaaggtagaatttcatttgagatccaaccaaaataacagcaactcaaggtttcaacttacaacaagtaaaagcggggtagtttggcttgatcaagtatcagttatgccaatggacacttacatggggcatggttttcggaaagatcttgcttctatgttggccaatctcgagcctcagtttctcaagtttccaggtggcaactatgccatgggaaattatctacgaaatgcatttcggtggagtgagactgtgggaccatgggaggagagacctggtcactttaatgatgcctggggatactggactgatgatgggcttggattttttgagttccttcagttggctgaagaccttggggcttccccagtttgggtggtgaatgatggagcaagccttaatgaagaagtttccactaaaacaattgcatcattggttaaggatgttgttaatggcatagagtttgccagtggaggacctaagacaacttggggttctgttcgtgcagcaatgggacacccagaaccctttaagcttgattatgtttcaataggaaatcaagaatgttggatgctctactatagaggtctacacctcttcgactaatatgttttcaaaagctagtatgtttgacaacacaccacgtggagcaccgaaggcaattgttagcgagtacgctgtgaccggaaatgatgctggcaaaggaacactggtagcagcactggcagaagctgcatttctcattggattggaaaggaacagtgatgtggttgagatggcaagctgtgcacccctttttgtaaatgacaatgatcgcaggtggagcccagatgccatcgtcttcaactcggggcagcactatgggtgtcccaactattggatgctacacttcttcaaggaatctagcggcgccaccctccatcctacagccattcaggtctccagctacgatcagctggttgcgtctgccatcacttggcagaacgctaaagacaagagcacttacctcaggataaaggtggtgaatttcggcaatcaagctgtggatctgaacatatcggttgtggaactggccaccggcgtcaagaagtctggatcgaagcagacggttctaacgtccagcagtccgcttgacgagaactccttccagcagccagagaaggtggcgccagtgtcgagcccaatggcgaacgcggggcagcagatgggcgcttccgtggggccgtactccctcacctcgtttgacctgctgctggagccgagcaagcatgacagcgtgtaaaactgtcaactgaagaagcatgacagcggtgtacgtaaaggaggtcaaagatagaggagacaggtcagaggtcaaaattgagaccttgataccatattggattggattgtatgtatcaacaagttcaacctaaaagtttaagctgatagtgaaatgcggacagttcacattctaacaaatcccagtcaatgttgcatccaacaatactttgtacttgatgtctgaatccatttgattcagaagatagcgctttattgttttgccaatgcaaatacacatgcgatc

SEQ ID NO: 27577 - DNA, 2353 bp, Zea Mays
actgttcttaatcgtatcgtaataattctatgtagacaatatcggagcacaagcttgagcataaagggaagcaacacagcagctggctagcagtcacggccaccaacccgagtcgtgaagcgactgacgccgcggcggggcgggggcggccgctgcacgacagcgacctccatgcggggacggcggagccctagatgcgtcgtggctgacccccactggcgccgccactccttccggtttgacgacattggagatcaaccatgctggagctggtgggttgtggtcagagctcgtaagcaacagaggatttgaggctggtgggcctaatacaccttcgaatattgatccgtggctgatcattggggatgaatcaagtatcattgttggaactgatcggacatcatgttttgaacgtaacccagttgcacttcggatggaagttctttgtggttctaaaaaaactaatgcctgtccatcgggaggtgttggggtctataatcctggctactggggcatgaacattgaaaaggggaaggtttataaggtgagcctgcatgttaggtcatcagatgcactgtccttgactgcttccttgacaagctccgatgggctacaaaagctcgctgctcataccatcacaggtagcaagaaaacctttgcaaaatggacaaaggtagaatttcatttgagatccaaccaaaataacagcaactcaaggtttcaacttacaacaagtaaaagcggggtagtttggcttgatcaagtatcagttatgccaatggacacttacatggggcatggttttcggaaagatcttgcttctatgttggccaatctcgagcctcagtttctcaagtttccaggtggcaactatgccatgggaaattatctacgaaatgcatttcggtggagtgagactgtgggaccatgggaggagagacctggtcactttaatgatgcctggggatactggactgatgatgggcttggattttttgagttccttcagttggctgaagaccttggggcttccccagtttgggtggtgaatgatggagcaagccttaatgaagaagtttccactaaaacaattgcatcattggttaaggatgttgttaatggcatagagtttgccagtggaggacctaagacaacttggggttctgttcgtgcagcaatgggacacccagaaccctttaagcttgattatgtttcaataggaaatcaagaatgttggatgctctactatagaggaaattaccaaaagttttactcagcgattaaatctgcctacccagacatcaacattatatcaagttgtgataggccaactatttcgccatccaaccctgccgatctttatgatgttcatgtctacacctcttcgactaatatgttttcaaaagctagtatgtttgacaacacaccacgtggagcaccgaaggcaattgttagcgagtacgctgtgaccggaaatgatgctggcaaaggaacactggtagcagcactggcagaagctgcatttctcattggattggaaaggaacagtgatgtggttgagatggcaagctgtgcacccctttttgtaaatgacaatgatcgcaggtggagcccagatgccatcgtcttcaactcggggcagcactatgggtgtcccaactattggatgctacacttcttcaaggaatctagcggcgccaccctccatcctacagccattcaggtctccagctacgatcagctggttgcgtctgccatcacttggcagaacgctaaagacaagagcacttacctcaggataaaggtggtgaatttcggcaatcaagctgtggatctgaacatatcggttgtggaactggccaccggcgtcaagaagtctggatcgaagcagacggttctaacgtccagcagtccgcttgacgagaactccttccagcagccagagaaggtggcgccagtgtcgagcccaatggcgaacgcggggcagcagatgggcgcttccgtggggccgtactccctcacctcgtttgacctgctgctggagccgagcaagcatgacagcgtgtaaaactgtcaactgaagaagcatgacagcggtgtacgtaaaggaggtcaaagatagaggagacaggtcagaggtcaaaattgagaccttgataccatattggattggattgtatgtatcaacaagttcaacctaaaagtttaagctgatagtgaaatgcggacagttcacattctaacaaatcccagtcaatgttgcatccaacaatactttgtacttgatgtctgaatccatttgattcagaagatagcgctttattgttttgccaatgcaaatacacatgcgatc

SEQ ID NO: 27578 - DNA, 2086 bp, Zea Mays
actgttcttaatcgtatcgtaataattctatgtagacaatatcggagcacaagcttgagcataaagggaagcaacacagcagctggctagcagtcacggccaccaacccgagtcgtgaagcgactgacgccgcggcggggcgggggcggccgctgcacgacagcgacctccatgcggggacggcggagccctagatgcgtcgtggctgacccccactggcgccgccactccttccggtttgacgacattgaacattgaaaaggggaaggtttataaggtgagcctgcatgttaggtcatcagatgcactgtccttgactgcttccttgacaagctccgatgggctacaaaagctcgctgctcataccatcacaggtagcaagaaaacctttgcaaaatggacaaaggtagaatttcatttgagatccaaccaaaataacagcaactcaaggtttcaacttacaacaagtaaaagcggggtagtttggcttgatcaagtatcagttatgccaatggacacttacatggggcatggttttcggaaagatcttgcttctatgttggccaatctcgagcctcagtttctcaagtttccaggtggcaactatgccatgggaaattatctacgaaatgcatttcggtggagtgagactgtgggaccatgggaggagagacctggtcactttaatgatgcctggggatactggactgatgatgggcttggattttttgagttccttcagttggctgaagaccttggggcttccccagtttgggtggtgaatgatggagcaagccttaatgaagaagtttccactaaaacaattgcatcattggttaaggatgttgttaatggcatagagtttgccagtggaggacctaagacaacttggggttctgttcgtgcagcaatgggacacccagaaccctttaagcttgattatgtttcaataggaaatcaagaatgttggatgctctactatagaggaaattaccaaaagttttactcagcgattaaatctgcctacccagacatcaacattatatcaagttgtgataggccaactatttcgccatccaaccctgccgatctttatgatgttcatgtctacacctcttcgactaatatgttttcaaaagctagtatgtttgacaacacaccacgtggagcaccgaaggcaattgttagcgagtacgctgtgaccggaaatgatgctggcaaaggaacactggtagcagcactggcagaagctgcatttctcattggattggaaaggaacagtgatgtggttgagatggcaagctgtgcacccctttttgtaaatgacaatgatcgcaggtggagcccagatgccatcgtcttcaactcggggcagcactatgggtgtcccaactattggatgctacacttcttcaaggaatctagcggcgccaccctccatcctacagccattcaggtctccagctacgatcagctggttgcgtctgccatcacttggcagaacgctaaagacaagagcacttacctcaggataaaggtggtgaatttcggcaatcaagctgtggatctgaacatatcggttgtggaactggccaccggcgtcaagaagtctggatcgaagcagacggttctaacgtccagcagtccgcttgacgagaactccttccagcagccagagaaggtggcgccagtgtcgagcccaatggcgaacgcggggcagcagatgggcgcttccgtggggccgtactccctcacctcgtttgacctgctgctggagccgagcaagcatgacagcgtgtaaaactgtcaactgaagaagcatgacagcggtgtacgtaaaggaggtcaaagatagaggagacaggtcagaggtcaaaattgagaccttgataccatattggattggattgtatgtatcaacaagttcaacctaaaagtttaagctgatagtgaaatgcggacagttcacattctaacaaatcccagtcaatgttgcatccaacaatactttgtacttgatgtctgaatccatttgattcagaagatagcgctttattgttttgccaatgcaaatacacatgcgatc

SEQ ID NO: 27579 - DNA, 2820 bp, Zea Mays
cccgacgctcccatgccgccgccgccgccgccgagcgtgcggggcttcctggacgcgcacttcgcctcccccgacgacctcgcggcggcgcccgcgctcgcggagctcttgcgccgcgagtgcgacgggctcgacgcctcgctccgccgcgccgaggcgcggctcggtgccgcggccgcgtcctggctcgcgcgctactctgaggcccgcgcaaacctcctccgcgtccggtcacgagggggacgcctcgttgcggaggacgacggcgccgaggcggtgaggacggtgggcctgccggcgctcgtgcgggagatccaacggatcgacaccatccggctctacgcgggctggaatctttggttggcaacctggaagatgctgcattttccattgttaggcaggccccaaagtcaaaactgtcatccatacttcgaaaatcgaatgaaactgaatggaagcaagggaagctgctccatgctgttgacgctgtgaaggatattgagcgagaattagtacggatcagcactagtaggccacagtgggccaaccttgtcatggctgttgattctagagtggacaaaactctttccattctgaggcctcaagcactcacggattatcgggctctactagcatcactgggatggccaccttcattgtcttcaccagacacagagaaggataagtacccccaaattccgaatcctctagtcttgatgaatgagggaaataaagcgagatactctcaaagcttccaagcactgtgtgctctccaacatgtgcaggggaaccgtgaatcacgcctgtgtcagacagcaaaagtgactcctgccctggcagatttgaagtatttcactaggaccgcttgcttcgacaatgggctttgggcgattgatgaattagttcaccctattgcttcaaggatggaatatcattttgtcaaatggtctgaacagccggagttcattttcacccttgtttacaagataacaaaagattttatggatggagtggatgatgtactgcagcctttgattgatcaagcaaggctagtaggattaagtgccaaggaatcttgggtaactggaatggtgaaaattcttgtaggataccttgagcggcaaattttcccggcacttgtctgctcttatcaggatcatgctactgttggaaaacctgaagtagattcctcttggttgcacttaaatgacgtaatgatttcttttgataaaagaatgcagcttctagcggattcaggaatccagaaaatgacatcactttctgaaggtctgtctaggtccttgtctgtcttttcaatatatgctgagcaccctgactggcttcagatatgggctgatgttgagctttgttcagcacaggataagctgaaatctgaaatggaagatgagacaagttggtcatgtagtggtcagcatgaccagcgtggtcacatggaaaattcaacgaagtttcttctctctacaagagaagactacaaagctcctccggtgtgtgaatttgttaccaaaactgctttgtcaatggttgaaagaggccgtgttctgccaaacaggggaatgcagatccagtataacagatcctcttcggttaggttcctgaatggcttttttcttgtattgcgcgaacgatgtgaagcattgcaattgtcgaacacggcactagaggatcattctttgtcaaaaacttcgtgtgcaattaacgccgctcgttactgtgaaaacgtgcttcgggaatgggatgaagatactaccttcttggatatgggtcctcaaggatctctgtatacagatgaaatcggctttttagtcaaattagggaccgatcacctggaacagatactgtcttgggttctgcttgagtttgaagatctgtcctgggaatatgttcagagcattggatcatggagtggacagaccatcttagatgatgagatcctggatgaagaaaacacaggagtgtctcctggttttgttcccagtctagatgttctgatggacaggaccgctaagttgaaacgatatcttaactccaaggatttccttgatctgtggaggagtatagcggaaggccttgactactacatctacagcagcatacgatgggccgaagtaagtttctctgatcctggaatcacccagctaagagttgatataaaagcacttctccacatctttaggcccttctgttcaagacctgaagcttttctcccttttctaagtgaatccctgaggttgttaaccatgaaaaaatcagatgcacagtgcttgctggaaacactaatggatgacacgaagagtgacgattgcctaaagcgtgaaggattgcaccatgtaaatgctagccaggctgcaaagatcttaagcagcaggaagtttagtgggtaattttgttcgtacaaagtgtagctgagaatgaccttcagcgaagctcgatgtggagattaacaattccaggccacaacaaagacaggtgccactaaccaaggagccgtcgctattggcatacatggcacgcaacaacagctgctgcctacttggttacttcctggaattctttaggcgatatctaggagagggctgttcaccgagttttacttcgtcttgcaagcacaaagctgccatgtaatcagttcatgctgtttgattaacttgtagtcgcccttgtgcagaatgcctcgtgctttctaattaatccaaacgatgaaaaatttccccgcatctcatagcttgcacaaattggattgccttaggtttggtacatatggtcaactcaaggtgattttacaagtctttatctcca

SEQ ID NO: 27580 - DNA, 2751 bp, Zea Mays
cccgacgctcccatgccgccgccgccgccgccgagcgtgcggggcttcctggacgcgcacttcgcctcccccgacgacctcgcggcggcgcccgcgctcgcggagctcttgcgccgcgagtgcgacgggctcgacgcctcgctccgccgcgccgaggcgcggctcggtgccgcggccgcgtcctggctcgcgcgctactctgaggcccgcgcaaacctcctccgcgtccggtcacgagggggacgcctcgttgcggaggacgacggcgccgaggcggtgaggacggtgggcctgccggcgctcgtgcgggagatccaacggatcgacaccatccggctctacgcggctggaatctttggttggcaacctggaagatgctgcattttccattgttaggcaggccccaaagtcaaaactgtcatccatacttcgaaaatcgaatgaaactgaatggaagcaagggaagctgctccatgctgttgacgctgtgaaggatattgagcgagaattagtacggatcagcactagtaggccacagtgggccaaccttgtcatggctgttgattctagagtggacaaaactctttccattctgaggcctcaagcactcacggattatcgggctctactagcatcactgggatggccaccttcattgtcttcaccagacacagagaaggataagtacccccaaattccgaatcctctagtcttgatgaatgagggaaataaagcgagatactctcaaagcttccaagcactgtgtgctctccaacatgtgcaggggaaccgtgaatcacgcctgtgtcagacagcaaaagtgactcctgccctggcagatttgaagtatttcactaggaccgcttgcttcgacaatgggctttgggcgattgatgaattagttcaccctattgcttcaaggatggaatatcattttgtcaaatggtctgaacagccggagttcattttcacccttgtttacaagataacaaaagattttatggatggagtggatgatgtactgcagcctttgattgatcaagcaaggctagtaggattaagtgccaaggaatcttgggtaactggaatggtgaaaattcttgtaggataccttgagcggcaaattttcccggcacttgtctgctcttatcaggatcatgctactgttggaaaacctgaagtagattcctcttggttgcacttaaatgacgtaatgatttcttttgataaaagaatgcagcttctagcggattcaggaatccagaaaatgacatcactttctgaaggtctgtctaggtccttgtctgtcttttcaatatatgctgagcaccctgactggcttcagatatgggctgatgttgagctttgttcagcacaggataagctgaaatctgaaatggaagatgagacaagttggtcatgtagtggtcagcatgaccagcgtggtcacatggaaaattcaacgaagtttcttctctctacaagagaagactacaaagctcctccggtgtgtgaatttgttaccaaaactgctttgtcaatggttgaaagaggccgtgttctgccaaacaggggaatgcagatccagtataacagatcctcttcggttaggttcctgaatggcttttttcttgtattgcgcgaacgatgtgaagcattgcaattgtcgaacacggcactagaggatcattctttgtcaaaaacttcgtgtgcaattaacgccgctcgttactgtgaaaacgtgcttcgggaatgggatgaagatactaccttcttggatatgggtcctcaaggatctctgtatacagatgaaatcggctttttagtcaaattagggaccgatcacctggaacagatactgtcttgggttctgcttgagtttgaagatctgtcctgggaatatgttcagagcattggatcatggagtggacagaccatcttagatgatgagatcctggatgaagaaaacacaggagtgtctcctggttttgttcccagtctagatgttctgatggacaggaccgctaagttgaaacgatatcttaactccaaggatttccttgatctgtggaggagtatagcggaaggccttgactactacatctacagcagcatacgatgggccgaagcccttctgttcaagacctgaagcttttctcccttttctaagtgaatccctgaggttgttaaccatgaaaaaatcagatgcacagtgcttgctggaaacactaatggatgacacgaagagtgacgattgcctaaagcgtgaaggattgcaccatgtaaatgctagccaggctgcaaagatcttaagcagcaggaagtttagtgggtaattttgttcgtacaaagtgtagctgagaatgaccttcagcgaagctcgatgtggagattaacaattccaggccacaacaaagacaggtgccactaaccaaggagccgtcgctattggcatacatggcacgcaacaacagctgctgcctacttggttacttcctggaattctttaggcgatatctaggagagggctgttcaccgagttttacttcgtcttgcaagcacaaagctgccatgtaatcagttcatgctgtttgattaacttgtagtcgcccttgtgcagaatgcctcgtgctttctaattaatccaaacgatgaaaaatttccccgcatctcatagcttgcacaaattggattgccttaggtttggtacatatggtcaactcaaggtgattttacaagtctttatctcca

SEQ ID NO: 27581 - DNA, 2688 bp, Zea Mays
cccgacgctcccatgccgccgccgccgccgccgagcgtgcggggcttcctggacgcgcacttcgcctcccccgacgacctcgcggcggcgcccgcgctcgcggagctcttgcgccgcgagtgcgacgggctcgacgcctcgctccgccgcgccgaggcgcggctcggtgccgcggccgcgtcctggctcgcgcgctactctgaggcccgcgcaaacctcctccgcgtccggtcacgagggggacgcctcgttgcggaggacgacggcgccgaggcggtgaggacggtgggcctgccggcgctcgtgcgggagatccaacggatcgacaccatccggctctacgcggaagctactctacagctggaatctttggttggcaacctggaagatgctgcattttccattgttaggcaggccccaaagtcaaaactgtcatccatacttcgaaaatcgaatgaaactgaatggaagcaagggaagctgctccatgctgttgacgctgtgaaggatattgagcgagaattagtacggatcagcactagtaggccacagtgggccaaccttgtcatggctgttgattctagagtggacaaaactctttccattctgaggcctcaagcactcacggattatcgggctctactagcatcactgggatggccaccttcattgtcttcaccagacacagagaaggataagtacccccaaattccgaatcctctagtcttgatgaatgagggaaataaagcgagatactctcaaagcttccaagcactgtgtgctctccaacatgtgcaggggaaccgtgaatcacgcctgtgtcagacagcaaaagtgactcctgccctggcagatttgaagtatttcactaggaccgcttgcttcgacaatgggctttgggcgattgatgaattagttcaccctattgcttcaaggatggaatatcattttgtcaaatggtctgaacagccggagttcattttcacccttgtttacaagataacaaaagattttatggatggagtggatgatgtactgcagcctttgattgatcaagcaaggctagtaggattaagtgccaaggaatcttgggtaactggaatggtgaaaattcttgtaggataccttgagcggcaaattttcccggcacttgtctgctcttatcaggatcatgctactgttggaaaacctgaagtagattcctcttggttgcacttaaatgacgtaatgatttcttttgataaaagaatgcagcttctagcggattcaggaatccagaaaatgacatcactttctgaaggtctgtctaggtccttgtctgtcttttcaatatatgctgagcaccctgactggcttcagatatgggctgatgttgagctttgttcagcacaggataagctgaaatctgaaatggaagatgagacaagttggtcatgtagtggtcagcatgaccagcgtggtcacatggaaaattcaacgaagtttcttctctctacaagagaagactacaaagctcctccggtgtgtgaatttgttaccaaaactgctttgtcaatggttgaaagaggccgtgttctgccaaacaggggaatgcagatccagtataacagatcctcttcggttaggttcctgaatggcttttttcttgtattgcgcgaacgatgtgaagcattgcaattgtcgaacacggcactagaggatcattctttgtcaaaaacttcgtgtgcaattaacgccgctcgttactgtgaaaacgtgcttcgggaatgggatgaagatactaccttcttggatatgggtcctcaaggatctctgtatacagatgaaatcggctttttagtcaaattagggaccgatcacctggaacagatactgtcttgggttctgcttgagtttgaagatctgtcctgggaatatgttcagagcattggatcatggagtggacagaccatcttagatgatgagatcctggatgaagaaaacacaggagtgtctcctggttttgttcccagtctagatgttctgatggacaggaccgctaagttgaaacgatatcttaactccaaggatttccttgatctgtggaggagtatagcggaaggccttgactactacatctacagcagcatacgatgggccgaaatgcacagtgcttgctggaaacactaatggatgacacgaagagtgacgattgcctaaagcgtgaaggattgcaccatgtaaatgctagccaggctgcaaagatcttaagcagcaggaagtttagtgggtaattttgttcgtacaaagtgtagctgagaatgaccttcagcgaagctcgatgtggagattaacaattccaggccacaacaaagacaggtgccactaaccaaggagccgtcgctattggcatacatggcacgcaacaacagctgctgcctacttggttacttcctggaattctttaggcgatatctaggagagggctgttcaccgagttttacttcgtcttgcaagcacaaagctgccatgtaatcagttcatgctgtttgattaacttgtagtcgcccttgtgcagaatgcctcgtgctttctaattaatccaaacgatgaaaaatttccccgcatctcatagcttgcacaaattggattgccttaggtttggtacatatggtcaactcaaggtgattttacaagtctttatctcca

SEQ ID NO: 27582 - DNA, 2687 bp, Zea Mays
ccccctctcctctcccgacgctcccatgccgccgccgccgccgccgagcgtgcggggcttcctggacgcgcacttcgcctcccccgacgacctcgcggcggcgcccgcgctcgcggagctcttgcgccgcgagtgcgacgggctcgacgcctcgctccgccgcgccgaggcgcggctcggtgccgcggccgcgtcctggctcgcgcgctactctgaggcccgcgcaaacctcctccgcgtccggtcacgagggggacgcctcgttgcggaggacgacggcgccgaggcggtgaggacggtgggcctgccggcgctcgtgcgggagatccaacggatcgacaccatccggctctacgcggctggaatctttggttggcaacctggaagatgctgcattttccattgttaggcaggccccaaagtcaaaactgtcatccatacttcgaaaatcgaatgaaactgaatggaagcaagggaagctgctccatgctgttgacgctgtgaaggatattgagcgagaattagtacggatcagcactagtaggccacagtgggccaaccttgtcatggctgttgattctagagtggacaaaactctttccattctgaggcctcaagcactcacggattatcgggctctactagcatcactgggatggccaccttcattgtcttcaccagacacagagaaggataagtacccccaaattccgaatcctctagtcttgatgaatgagggaaataaagcgagatactctcaaagcttccaagcactgtgtgctctccaacatgtgcaggggaaccgtgaatcacgcctgtgtcagacagcaaaagtgactcctgccctggcagatttgaagtatttcactaggaccgcttgcttcgacaatgggctttgggcgattgatgaattagttcaccctattgcttcaaggatggaatatcattttgtcaaatggtctgaacagccggagttcattttcacccttgtttacaagataacaaaagattttatggatggagtggatgatgtactgcagcctttgattgatcaagcaaggctagtaggattaagtgccaaggaatcttgggtaactggaatggtgaaaattcttgtaggataccttgagcggcaaattttcccggcacttgtctgctcttatcaggatcatgctactgttggaaaacctgaagtagattcctcttggttgcacttaaatgacgtaatgatttcttttgataaaagaatgcagcttctagcggattcaggaatccagaaaatgacatcactttctgaaggtctgtctaggtccttgtctgtcttttcaatatatgctgagcaccctgactggcttcagatatgggctgatgttgagctttgttcagcacaggataagctgaaatctgaaatggaagatgagacaagttggtcatgtagtggtcagcatgaccagcgtggtcacatggaaaattcaacgaagtttcttctctctacaagagaagactacaaagctcctccggtgtgtgaatttgttaccaaaactgctttgtcaatggttgaaagaggccgtgttctgccaaacaggggaatgcagatccagtataacagatcctcttcggttaggttcctgaatggcttttttcttgtattgcgcgaacgatgtgaagcattgcaattgtcgaacacggcactagaggatcattctttgtcaaaaacttcgtgtgcaattaacgccgctcgttactgtgaaaacgtgcttcgggaatgggatgaagatactaccttcttggatatgggtcctcaaggatctctgtatacagatgaaatcggctttttagtcaaattagggaccgatcacctggaacagatactgtcttgggttctgcttgagtttgaagatctgtcctgggaatatgttcagagcattggatcatggagtggacagaccatcttagatgatgagatcctggatgaagaaaacacaggagtgtctcctggttttgttcccagtctagatgttctgatggacaggaccgctaagttgaaacgatatcttaactccaaggatttccttgatctgtggaggagtatagcggaaggccttgactactacatctacagcagcatacgatgggccgaaatgcacagtgcttgctggaaacactaatggatgacacgaagagtgacgattgcctaaagcgtgaaggattgcaccatgtaaatgctagccaggctgcaaagatcttaagcagcaggaagtttagtgggtaattttgttcgtacaaagtgtagctgagaatgaccttcagcgaagctcgatgtggagattaacaattccaggccacaacaaagacaggtgccactaaccaaggagccgtcgctattggcatacatggcacgcaacaacagctgctgcctacttggttacttcctggaattctttaggcgatatctaggagagggctgttcaccgagttttacttcgtcttgcaagcacaaagctgccatgtaatcagttcatgctgtttgattaacttgtagtcgcccttgtgcagaatgcctcgtgctttctaattaatccaaacgatgaaaaatttccccgcatctcatagcttgcacaaattggattgccttaggtttggtacatatggtcaactcaaggtgattttacaagtctttatctcca

SEQ ID NO: 27583 - DNA, 1036 bp, Zea Mays
gaggtacctgtcgaccacctgtcgcacatcgcaatcaacgcgtggccttccaacactgaaacgaaaatttgtggcggaaaagaacaaccaagccgtccacgcaaacagaaggcatcacggaagaggacgagggtccgtcctcgaatcacgaacgtctcgccatcacggaagtggatcgatcagcaaggctggcactcctctcgggattacagaaggcgaaaccgggcaggcatggacggacgagacgagagtagaggtgagtgggggaggggagcaatgcgggcacgaaccttcttgttgcctcgcagccacctgatgcgattcttggtcggagcggaggaagggggcggcggcggcggcgccattgcgtcccgcgcatcaaccaaaaagatatactcctcctctatagtagcaccggcaatggcaacaacggggtggagatgagatcctctacagcgtctctaagttttcttgttgcacggtgcctgccaaattgattgatggatccgaaatgccagcttggagcctagactgaaataaaacggagggagggagggatgagagttgagacagagtgctgctgactggttttgctttgtgacaaagaaagcatcgatcctccaagttcctagctggaagagatgcccgtggctggctttgctgtggatgagccagttttttttttttttttgaagcggaagacgacagggggttggctatggttgggaatgggcacggcaggtgtgcattgtggcatacgcctcccctcccatggtgttcacatgtggagggcagtgtcagcgtggtctttccagcagggtctcttccagcagagcaggaaggagcagcattatccagccttaagcccatgtgttccggcagttagcaactcaactccctccgcatctcactcactacttctacttttgttgttgcttttggtacataactacacattttaaagagtaaagactgaattaattcctaagataaccgctaaatgaactagggataaattatacacggtgaaaaaata

SEQ ID NO: 27584 - DNA, 1384 bp, Zea Mays
caactgttgtggggttgacatacacgaaggtgatttcacgttcaatcagattccttttatcatgaaacttagcaaaacacatgtccatcgaaatgaagcccaacaaacgaacaaaagtgataaagtcaagcctatagtgcctgccttctgtcatccagtgaagtatgtctgtcatattgcaccaatagtaggtggagatgaactggtgcaagatatttgtgctccaattgttaagaatatttatcagggtactaaaaatacatcaactaataaagaccatgacaagtgggtctgtgagctcgactacgctatccagggactcgccccacatgttagagagacacttggctcgtcaaaaaaaaatcaaagatgcaggatcttatcagatttgtagatatctatgtaataagatagtctggatggtaaaggaaacatgtctataaaccgtcctcttcttggattataaaaaggatagatgagtcctcttcttggattataaaaggatagatgagtcatctactagattataagataatatccagcagatcgtgtatatggttgtgtaaaataatattttgtagtacaatatgcattgttcatatattgaagtttggagaatggattgtgtggtgatggatgatgaatggattgtgtgcaaagcataggatgctcctactgccgctgccggacaagaatccctgagctccatttattcctccttgcagcagcaaagcaagcatcgtcagcctgcctcgcgtctcgtcgaccatccaaatccactcccttctctagtccaaggagctcaggaggtcgaggaagaaggaatggcgccgtcgtaccggccctaccacgtcgccggcgaggatcagcagcgtaaggtgaaggcgggtgggaagtggttggccgcgtggagcgtgctgggtgttggcggcgacccggcggagatgaagcggcggaggcgggtggccagctacaaggcgtacgcggtggaaggcaaggtgaaggcgtccatccgccggggcatccgatgggtcaaggccaagtgcgaccgcatcgccgccattcacaactagctagtagagcagagctgagctgagcatgtcgtcggttcctttccttgtgcgcttgcattgcattgcattgtgtttttacctgttcaggatccatttccatttaccagcttcttgttgttgttgttgttgttgttgtcacatgtatgtgcatgatccattctgaacccggttttaatccgaaacaaatcagccactagagcaaagttcatcatatcagcagctcattgcctcgcaattcaccggaatcggacggtcgaacccgcctcgggacagcagggtgcccaccaccgccatgtcgcggcagaacacgc

SEQ ID NO: 27585 - DNA, 1154 bp, Zea Mays
aagggctcttggtccacttggcagattgcacagcggaaaggtggtgaagctgctttcaaggacagattcctacccaacctgcaacagcaagccttgaatgttaatgacaccataggataggatgatagaagccagaaaagacatagaggcattgtagtttagcctttctccaccaaaaaaaaaaaaactagacatgagttccctaaaaaacaggagaatatatctggtgcacatggaagattggtgcacatggtgcgcatattaaatcatcaccattcattttagatctaacgtctctagttgtttggtatattttgctaagaacaccctccaacgtgttggtgtgtagtggtggaaggtgttatttgtaaattgactagagacgttatatctaaaatgagtggtgatgatttaatatgtgcaccaatcttccatgtgcacaagatatgtcctcaaaaaacagagctgaaacattttatgtcacatatagagactagaaaaacagaagaacgaaaacaagggaaggaacataacttgcactcctaagattgataccaaggtcatggtagcacaccaagttcagctaaacgctctcgtcattaatacagaaaatacaagtaaaacaccatcgctgctctagtttatgaacaaacttgtctgcgtttgaaaggtatagattagccgccttctttttccacaaaaatagctctgaaatctcaaacagaattgacagagcatgtatacaaggtaatgtaagttgataatgggaataggctaaaaggcaaaggccgcagaaataaaacagcctgtccagatatgctaagaaaatgacaaggctcaaggtagcatgctagtatcttaccatcccacacattatatgttacataaaaggccctgtttggcacaactgctgcttgttgaaaaagcagcttatctgagaagctggtgaaaggcagcttctgcttgttggctgcttttagtgtattctgagaagcagctgaactaataagctgctgtagaagctggctgtttggcagaacttctgcttaaatttgtgaagaagctgaaaataagctgtgccaaacagggccaaaaacccaagatgaaaacgagagaaaatgatactgacagaaattaacacaagacgaatgcag

SEQ ID NO: 27586 - DNA, 2382 bp, Zea Mays
gagagatggttcctgcacttgctgacgccaagcactatctttcatatcgccgggccggcctcttttaccatttctttctctttctctgttttggacaagatcaacggagactccctgtccctacatactcgtcgtcacccacgcacgcgcttcagcttcagcttcgtcctcgtcttcgtcttcgtgtcatcgtgcgtgtgtgcgcttggacggaaacggcctctcatcctccgacgacccagactcgatccactcaccaccaccggcttattcgtttatacggaaacagattcagcttctgtgcctgcttcagccatggccatgctgcccgtcgtcgtccgcatggccgccatgcccttcatcttccttgtgctcctcgcgcacaccgcctcggcacagcccgacgccggctgcaacgggatcctcctcacctacacgctgcagcgccgggacaagatcaggcctcacgtggcggcgcccaactcccagccctactccttcagcgccagcgccaccgtcgtcaacgccggcacccgcccgctacgctcctgggcgctgctgctcaccttcgtgcacggcgagatcctcgtctccgtcgacggggccgtgctcacctcgggcgccgccctgccctacaacaccacggcgggggacgccgccggcaggcccacgcccacgtccttcaccgggtacccgcagacggacctcctcaccccgatcgccacggccggggaccccgccaagacacaggccacggtcagcctcgtaggcacgctcttcgccgggccggagccctacgtcccgctcccctcgtttctctcgctcgccgacccttcctacacctgcccgccggccaccaacgccacgtcgtcgccgacgaacctcaccacctgctgcgtgttcacggcgggtggggaccccaccggcggcctggtggagagtggcttcctcccgcgccgcaccggcgacctggtcatcacctacgacgtgctccagtcgtacgacaccacctacctagcgctcgtcacgctggagaacgacgcgctgctcggccgcctcgacgcctggcagctgtcgtggaggtgggagcacggggagttcatcagctccatgcgaggcgcctacccgcgggaggtggacacggccgaatgcctctacggtccccagggccagtactacaaggacctcgacttctccaaggcggtgctcaactgcgaccgcaggcccgtcgtccacgacctgccgccgtcgcgggccaacgacacggagatcggccggatcgaccactgctgccggaacggcaccatcctgcccaagtccatggatgtcgcgcgctccaagtcggcgttccagatggtggtgtacaagatgccgcccgacctcaaccggaccaagctctacccgcccacagggttcaacgtcaccggcgccgcgtccgcgctgaacccggagtacgcgtgcgacccacccatctcggtgagcccgtcggagtacccggaccccagcgggctcacgtcgatcacggtggccgtggcgacgtggcaggtggtgtgcaacatcaccacgtcgcccaagaagccgcccaggtgctgcgtctccttctcctccttctacaacgagtcggtggtcccctgccggacgtgcgcgtgcggctgcccctcgtccgcgccgacctgcagcaccacggcgccggcgatgctgctgccgccgcaggcgctgctcatgccgttcgaccggcgggccagcgaggcgctcgagtgggcggaccagaagcacctcggcgtgcccaaacccatgccctgcggcgacttctgcggcgtcagcgtcaactggcacgtcgccaccgacttcaccggaggatggagcgcgcgcctcacgctcttcaactgggacggcacggacatgccggactggttcacggccatcgtcatggacaaggcgtacgacggcttcgaacaggcctactccttcaacgccacgggcgtcgggaacagcaccatcttcgtcaggggcgcccagggcctcaacttcctgctcggggagaggaacatgagcggcgtagattacccggtgcccgggaagcagcagtccgtcttctccttcaccaagaagaagacccccggcatcgacatcatcgccggggacggcttcccgtccaaggtcttcttcaacggcgacgagtgcgccatgccattgaggattccgagccaggggaccagtgtcgtcgtccctatgcagctgtgtttgcttgtttccgctttcatgttattgctgctgtaataataacatttgcgatttttgctcatcatagctattcatctatgtaattttttttattaaaaaaatcaacagctctaattcagcaataacacaaggagtatt

SEQ ID NO: 27587 - DNA, 1906 bp, Zea Mays
taacaactgattcatggctaaaatgcatctgcattctatcttttagaagaagaaaaacacactttcacttgtcatattcaaggagatagtgttaacgacacagactaaatcagcccatattgaattgctagccagtaaagtggttccatttccaagaatccaaaggcactactgaactattatggcagaaatatagcaattactgaactaaaaatgcagtggaagagtgttttaaatgtgacttcagtatactagggagtctagggcaagatacttggctcttgtgaaagccacgttgattctctcagaatcagagagcctactttcccatctttattggaccaaactgttgaaatcaaaataatgtcctcctcaccaccatgaaatccatcaatagattttactcttaacagatagaaagtcatgcttctcaatgcaatcacttgagcagtataagtagatattataccaacacttgttctctgcctcttctcagtgcactctacaattgttttagacaaaagaaaaggacaccagttagctttatcaaaaactctggagaacagttaatctagccaataaaatatttctttcagaatgatgttttaacaccttataaaaaaataaaagaatgcaaaatatgacgagttgacgaccttggcagtaagcaatgaaaacatggtgatcaataattcaatatctagactaagaatgtacggttttgtcattttgtgctatttgagtaagcacggagaataaacaagttatatatgcatgtccattccaaagatggcagcacggaatattatgatgttggtattgccatttcttgtctcctgtgcagccttctgtcatgcttgttctttatatttatttgctatgaggactcctattaggacggtatcttaagggtatgatgtagtttaacccttctgattatatatgtgaccgtatcttcatagctttctaactttgaggatacaatatgttaaatttgacactgtcaatataagttcagacttaggtgtattacactgggggaggtgtgtgtgtgtatttttgcttgtgattcatcaaaatatgttccttcttaaagcacaaacattgtacacttccagaatagctttaggcttgttgtcacatttgtaatgtatatgtatgctaccttcgttaaaggttaaaataaagttttaaccttattttggaagggagtatcacgaaatgccatagaaatttggatttagtaactatgttcatgatttccttcatgttacaggcccagacaatggagatgatgtatacgataattgcagatgagttcaagtcaatggacaataaggacatgcgccctgaagatcacttgaacttcttttgtcttggaaccgggaagaaccaccatctaatggcagcccagaatcagagaaatctacatataaaagtgcagagggtatggcttagctcaacccttctgattacaccaaaactgaatatggtttctgagcaaatccaaaccgtgcctctgacaaacccagccaatgatttgcctgtactactactacagtccctgtcgctgtgcttggtggagctcatgaggcgcgacgacgtcggcgctgctgcggctaacaggaacaggaatggcagcgtgatgagggtgaaggagaaatgcagcgaggaggagggcgactcagtgtgctccgtctgcatcgacggcggagagctgctgctctgcgacaagtgcccgtcggcgttccaccacgcctgcgttgggctgcaggccactccggagggcgactggtgctgcccgttgtgcagatgcggcgtgtgcggcggcagcgacttggatgatgataccgctgaggggttcacggacaagacaatcatctactgcgagcaatgcgagcgataa

SEQ ID NO: 27588 - DNA, 1861 bp, Zea Mays
atcttcacctgcgtccgcgtgtgctgtctccctctttctctctctgcgacgactgggtgggctaccgccgccgccgccctacgttagataccgaggccttcgccggcgacgaacacccgccagggatggcgaccacagcactgctccgggctctccggcggccctcatccgaagccgcgctgcgattggctacaaaggcaaatgtgcaaacaactaatggatatagacatctgaataacaggaacctaagcgttttcaatgagttttctaagcaactaaagggtgaggccaagagcaatcctgaattccagaaatccatgaaggagttcagcgagaaacttgatgtggtgaaggaagatctcaaagtaagaactaagaaaacgactgagacaatatacaagcgtgttgatgatgtttggagtgaagctgaggagacatctaaaaaggttactgcaaatatcaaagaaaaaatgtttgctgctaaagaagaggtaaaggaaagttttggagttggaaaagaagagagtacaagttgcagggatggtttgcctgaaggttcaaaacatgagaaaactgaggcatcctcacattcagatggcacgactgaagatgccacagacagccatacattgtttactaaattgaagtcaacaatctcatctgcttcaccagtagtatccggtgcgtttgcaaagttgaaggacacaaaagtctcaactttagctaagcagggatatgaaatcgtcaaggatgaattaagctctaactctagcagaaagaaaaaacaccaagctaggcatgcttctgctaaagtagaaaagagtacaagaaccgatttagttcttacgccaacaaaaaagacagtattgggtgaaaaatgggaagaatttaagaataagatccgaggtcacccggtctacagaagagtggatgaatacaccaagcctgttgtaaccaagggacaagagcttgaatgaatctttgcttgaagaaacctcagctgcggtgacattcagggaaattcggcaacgagacccgtccttttctctttctgattttgttgctgatgtccaagaaatgatcaagccagttttaactgcatattcaaagggtgatgcggagactctaaaaaactactgcaccaaggaagtgattgagcgctgcaaaggagagagagaagcttatgcatcacagggaatattttttgatcacaaaatcctgcacatttcagaagctgatgtattggaaacaaagatgtttggatcttcacccataattatcttacgcttccaaacacagcagatatactgtgttcgagatcgagaaggacaagtcacagaaggaggacaggataccatccaaaccgtcttctattcgtgggctatgcaactcatggacagcgacgaggtgccagaagaagaatcctattacccagtctggcggctgcgtgagatgcaacaagctggcatcaaagctctcatatagctagctgttcaacgagcatgcaagaacgttgatattctttcttttttatttttggctgatttgatgcatcttctcgcagagttagcttgtagcagcgtatactgatagcaacttggtgaaagtgcattatttaatccaacttataagcctcaacaaatttgtaatgacaagagtagcttgaaacaggaaaaaaaataccgatgagcagctttagcctatctcattagtctttctatctcacattctcactccttatccactgcaatgtcctttatctgctccatcagcacaatcctgcttgctgtccaaaatatttcttgacagttccgtagctgcaatgcaaatgacaggaatattgaaaaggtcgctgttatta

SEQ ID NO: 27589 - DNA, 1922 bp, Zea Mays
atcttcacctgcgtccgcgtgtgctgtctccctctttctctctctgcgacgactgggtgggctaccgccgccgccgccctacgttagataccgaggccttcgccggcgacgaacacccgccagggatggcgaccacagcactgctccgggctctccggcggccctcatccgaagccgcgctgcgattggctacaaaggcaaatgtgcaaacaactaatggatatagacatctgaataacaggaacctaagcgttttcaatgagttttctaagcaactaaagggtgaggccaagagcaatcctgaattccagaaatccatgaaggagttcagcgagaaacttgatgtggtgaaggaagatctcaaagtaagaactaagaaaacgactgagacaatatacaagcgtgttgatgatgtttggagtgaagctgaggagacatctaaaaaggttactgcaaatatcaaagaaaaaatgtttgctgctaaagaagaggtaaaggaaagttttggagttggaaaagaagagagtacaagttgcagggatggtttgcctgaaggttcaaaacatgagaaaactgaggcatcctcacattcagatggcacgactgaagatgccacagacagccatacattgtttactaaattgaagtcaacaatctcatctgcttcaccagtagtatccggtgcgtttgcaaagttgaaggacacaaaagtctcaactttagctaagcagggatatgaaatcgtcaaggatgaattaagctctaactctagcagaaagaaaaaacaccaagctaggcatgcttctgctaaagtagaaaagagtacaagaaccgatttagttcttacgccaacaaaaaagacagtattgggtgaaaaatgggaagaatttaagaataagatccgaggtcacccggtctacagaagagtggatgaatacaccaagcctgttgtaaccaagggacaagagctgaagatgtcagggaaagatgggagacaagtgacaatccagtggttcagaaaattcaagacttgaatgaatctttgcttgaagaaacctcagctgcggtgacattcagggaaattcggcaacgagacccgtccttttctctttctgattttgttgctgatgtccaagaaatgatcaagccagttttaactgcatattcaaagggtgatgcggagactctaaaaaactactgcaccaaggaagtgattgagcgctgcaaaggagagagagaagcttatgcatcacagggaatattttttgatcacaaaatcctgcacatttcagaagctgatgtattggaaacaaagatgtttggatcttcacccataattatcttacgcttccaaacacagcagatatactgtgttcgagatcgagaaggacaagtcacagaaggaggacaggataccatccaaaccgtcttctattcgtgggctatgcaactcatggacagcgacgaggtgccagaagaagaatcctattacccagtctggcggctgcgtgagatgcaacaagctggcatcaaagctctcatatagctagctgttcaacgagcatgcaagaacgttgatattctttcttttttatttttggctgatttgatgcatcttctcgcagagttagcttgtagcagcgtatactgatagcaacttggtgaaagtgcattatttaatccaacttataagcctcaacaaatttgtaatgacaagagtagcttgaaacaggaaaaaaaataccgatgagcagctttagcctatctcattagtctttctatctcacattctcactccttatccactgcaatgtcctttatctgctccatcagcacaatcctgcttgctgtccaaaatatttcttgacagttccgtagctgcaatgcaaatgacaggaatattgaaaaggtcgctgttatta

SEQ ID NO: 27590 - DNA, 1910 bp, Zea Mays
atcttcacctgcgtccgcgtgtgctgtctccctctttctctctctgcgacgactgggtgggctaccgccgccgccgccctacgttagataccgaggccttcgccggcgacgaacacccgccagggatggcgaccacagcactgctccgggctctccggcggccctcatccgaagccgcgctgcgattggctacaaaggcaaatgtgcaaacaactaatggatatagacatctgaataacaggaacctaagcgttttcaatgagttttctaagcaactaaagggtgaggccaagagaaatccatgaaggagttcagcgagaaacttgatgtggtgaaggaagatctcaaagtaagaactaagaaaacgactgagacaatatacaagcgtgttgatgatgtttggagtgaagctgaggagacatctaaaaaggttactgcaaatatcaaagaaaaaatgtttgctgctaaagaagaggtaaaggaaagttttggagttggaaaagaagagagtacaagttgcagggatggtttgcctgaaggttcaaaacatgagaaaactgaggcatcctcacattcagatggcacgactgaagatgccacagacagccatacattgtttactaaattgaagtcaacaatctcatctgcttcaccagtagtatccggtgcgtttgcaaagttgaaggacacaaaagtctcaactttagctaagcagggatatgaaatcgtcaaggatgaattaagctctaactctagcagaaagaaaaaacaccaagctaggcatgcttctgctaaagtagaaaagagtacaagaaccgatttagttcttacgccaacaaaaaagacagtattgggtgaaaaatgggaagaatttaagaataagatccgaggtcacccggtctacagaagagtggatgaatacaccaagcctgttgtaaccaagggacaagaggtagctgaagatgtcagggaaagatgggagacaagtgacaatccagtggttcagaaaattcaagacttgaatgaatctttgcttgaagaaacctcagctgcggtgacattcagggaaattcggcaacgagacccgtccttttctctttctgattttgttgctgatgtccaagaaatgatcaagccagttttaactgcatattcaaagggtgatgcggagactctaaaaaactactgcaccaaggaagtgattgagcgctgcaaaggagagagagaagcttatgcatcacagggaatattttttgatcacaaaatcctgcacatttcagaagctgatgtattggaaacaaagatgtttggatcttcacccataattatcttacgcttccaaacacagcagatatactgtgttcgagatcgagaaggacaagtcacagaaggaggacaggataccatccaaaccgtcttctattcgtgggctatgcaactcatggacagcgacgaggtgccagaagaagaatcctattacccagtctggcggctgcgtgagatgcaacaagctggcatcaaagctctcatatagctagctgttcaacgagcatgcaagaacgttgatattctttcttttttatttttggctgatttgatgcatcttctcgcagagttagcttgtagcagcgtatactgatagcaacttggtgaaagtgcattatttaatccaacttataagcctcaacaaatttgtaatgacaagagtagcttgaaacaggaaaaaaaataccgatgagcagctttagcctatctcattagtctttctatctcacattctcactccttatccactgcaatgtcctttatctgctccatcagcacaatcctgcttgctgtccaaaatatttcttgacagttccgtagctgcaatgcaaatgacaggaatattgaaaaggtcgctgttatta

SEQ ID NO: 27591 - DNA, 1911 bp, Zea Mays
atcttcacctgcgtccgcgtgtgctgtctccctctttctctctctgcgacgactgggtgggctaccgccgccgccgccctacgttagataccgaggccttcgccggcgacgaacacccgccagggatggcgaccacagcactgctccgggctctccggcggccctcatccgaagccgcgctgcgattggctacaaaggcaaatgtgcaaacaactaatggatatagacatctgaataacaggaacctaagcgttttcaatgagttttctaagcaactaaagggtgaggccaagagcaatcctgaattccagaaatccatgaaggagttcagcgagaaacttgatgtggtgaaggaagatctcaaagtaagaactaagaaaacgactgagacaatatacaagcgtgttgatgatgtttggagtgaagctgaggagacatctaaaaaggttactgcaaatatcaaagaaaaaatgtttgctgctaaagaagaggtaaaggaaagttttggagttggaaaagaagagagtacaagttgcagggatggtttgcctgaaggttcaaaacatgagaaaactgaggcatcctcacattcagatggcacgactgaagatgccacagacagccatacattgtttactaaattgaagtcaacaatctcatctgcttcaccagtagtatccggtgcgtttgcaaagttgaaggacacaaaagtctcaactttagctaagcagggatatgaaatcgtcaaggatgaattaagctctaactctagcagaaagaaaaaacaccaagctaggcatgcttctgctaaagtagaaaagagtacaagaaccgatttagttcttacgccaacaaaaaagacagtattgggtgaaaaatgggaagaatttaagaataagatccgaggtcacccggtctacagaagagtggatgaatacaccaagcctgttgtaaccaagggacaagaggtagctgaagatgtcagggaaagatgggagacaagtgacaatccagtggttcagaaaattcaagacttgaatgaatctttgcttgaagaaacctcagctgcggtgacattcagggaaattcggcaacgagacccgtccttttctctttctgattttgttgctgatgtccaagaaatgatcaagccagttttaactgcatattcaaagggtgatgcggagactctaaaaaactactgcaccaaggaagtgattgagcgctgcaaaggagagagagaagcttatgcatcacagggaatattttttgatcacaaaatcctgcacatttcagaagctgatgtattggaaacaaagatgtttggatcttcacccataattatcttacgcatatactgtgttcgagatcgagaaggacaagtcacagaaggaggacaggataccatccaaaccgtcttctattcgtgggctatgcaactcatggacagcgacgaggtgccagaagaagaatcctattacccagtctggcggctgcgtgagatgcaacaagctggcatcaaagctctcatatagctagctgttcaacgagcatgcaagaacgttgatattctttcttttttatttttggctgatttgatgcatcttctcgcagagttagcttgtagcagcgtatactgatagcaacttggtgaaagtgcattatttaatccaacttataagcctcaacaaatttgtaatgacaagagtagcttgaaacaggaaaaaaaataccgatgagcagctttagcctatctcattagtctttctatctcacattctcactccttatccactgcaatgtcctttatctgctccatcagcacaatcctgcttgctgtccaaaatatttcttgacagttccgtagctgcaatgcaaatgacaggaatattgaaaaggtcgctgttatta

SEQ ID NO: 27592 - DNA, 1845 bp, Zea Mays
atcttcacctgcgtccgcgtgtgctgtctccctctttctctctctgcgacgactgggtgggctaccgccgccgccgccctacgttagataccgaggccttcgccggcgacgaacacccgccagggatggcgaccacagcactgctccgggctctccggcggccctcatccgaagccgcgctgcgattggctacaaaggcaaatgtgcaaacaactaatggatatagacatctgaataacaggaacctaagcgttttcaatgagttttctaagcaactaaagggtgaggccaagagcaatcctgaattccagaaatccatgaaggagttcagcgagaaacttgatgtggtgaaggaagatctcaaagtaagaactaagaaaacgactgagacaatatacaagcgtgttgatgatgtttggagtgaagctgaggagacatctaaaaaggttactgcaaatatcaaagaaaaaatgtttgctgctaaagaagaggtaaaggaaagttttggagttggaaaagaagagagtacaagttgcagggatggtttgcctgaaggttcaaaacatgagaaaactgaggcatcctcacattcagatggcacgactgaagatgccacagacagccatacattgtttactaaattgaagtcaacaatctcatctgcttcaccagtagtatccggtgcgtttgcaaagttgaaggacacaaaagtctcaactttagctaagcagggatatgaaatcgtcaaggatgaattaagctctaactctagcagaaagaaaaaacaccaagctaggcatgcttctgctaaagtagaaaagagtacaagaaccgatttagttcttacgccaacaaaaaagacagtattgggtgaaaaatgggaagaatttaagaataagatccgaggtcacccggtctacagaagagtggatgaatacaccaagcctgttgtaaccaagggacaagagcttgaatgaatctttgcttgaagaaacctcagctgcggtgacattcagggaaattcggcaacgagacccgtccttttctctttctgattttgttgctgatgtccaagaaatgatcaagccagttttaactgcatattcaaagggtgatgcggagactctaaaaaactactgcaccaaggaagtgattgagcgctgcaaaggagagagagaagcttatgcatcacagggaatattttttgatcacaaaaagctgatgtattggaaacaaagatgtttggatcttcacccataattatcttacgcttccaaacacagcagatatactgtgttcgagatcgagaaggacaagtcacagaaggaggacaggataccatccaaaccgtcttctattcgtgggctatgcaactcatggacagcgacgaggtgccagaagaagaatcctattacccagtctggcggctgcgtgagatgcaacaagctggcatcaaagctctcatatagctagctgttcaacgagcatgcaagaacgttgatattctttcttttttatttttggctgatttgatgcatcttctcgcagagttagcttgtagcagcgtatactgatagcaacttggtgaaagtgcattatttaatccaacttataagcctcaacaaatttgtaatgacaagagtagcttgaaacaggaaaaaaaataccgatgagcagctttagcctatctcattagtctttctatctcacattctcactccttatccactgcaatgtcctttatctgctccatcagcacaatcctgcttgctgtccaaaatatttcttgacagttccgtagctgcaatgcaaatgacaggaatattgaaaaggtcgctgttatta

SEQ ID NO: 27593 - DNA, 1931 bp, Zea Mays
atcttcacctgcgtccgcgtgtgctgtctccctctttctctctctgcgacgactgggtgggctaccgccgccgccgccctacgttagataccgaggccttcgccggcgacgaacacccgccagggatggcgaccacagcactgctccgggctctccggcggccctcatccgaagccgcgctgcgattggctacaaaggcaaatgtgcaaacaactaatggatatagacatctgaataacaggaacctaagcgttttcaatgagttttctaagcaactaaagggtgaggccaagagcaatcctgaattccagaaatccatgaaggagttcagcgagaaacttgatgtggtgaaggaagatctcaaagtaagaactaagaaaacgactgagacaatatacaagcgtgttgatgatgtttggagtgaagctgaggagacatctaaaaaggttactgcaaatatcaaagaaaaaatgtttgctgctaaagaagaggtaaaggaaagttttggagttggaaaagaagagagtacaagttgcagggatggtttgcctgaaggttcaaaacatgagaaaactgaggcatcctcacattcagatggcacgactgaagatgccacagacagccatacattgtttactaaattgaagtcaacaatctcatctgcttcaccagtagtatccggtgcgtttgcaaagttgaaggacacaaaagtctcaactttagctaagcagggatatgaaatcgtcaaggatgaattaagctctaactctagcagaaagaaaaaacaccaagctaggcatgcttctgctaaagtagaaaagagtacaagaaccgatttagttcttacgccaacaaaaaagacagtattgggtgaaaaatgggaagaatttaagaataagatccgaggtcacccggtctacagaagagtggatgaatacaccaagcctgttgtaaccaagggacaagaggtagctgaagatgtcagggaaagatgggagacaagtgacaatccagtggttcagaaaattcaagacttgaatgaatctttgcttgaagaaacctcagctgcggtgacattcagggaaattcggcaacgagacccgtaaggtccttttctctttctgattttgttgctgatgtccaagaaatgatcaagccagttttaactgcatattcaaagggtgatgcggagactctaaaaaactactgcaccaaggaagtgattgagcgctgcaaaggagagagagaagcttatgcatcacagggaatattttttgatcacaaaatcctgcacatttcagaagctgatgtattggaaacaaagatgtttggatcttcacccataattatcttacgcttccaaacacagcagatatactgtgttcgagatcgagaaggacaagtcacagaaggaggacaggataccatccaaaccgtcttctattcgtgggctatgcaactcatggacagcgacgaggtgccagaagaagaatcctattacccagtctggcggctgcgtgagatgcaacaagctggcatcaaagctctcatatagctagctgttcaacgagcatgcaagaacgttgatattctttcttttttatttttggctgatttgatgcatcttctcgcagagttagcttgtagcagcgtatactgatagcaacttggtgaaagtgcattatttaatccaacttataagcctcaacaaatttgtaatgacaagagtagcttgaaacaggaaaaaaaataccgatgagcagctttagcctatctcattagtctttctatctcacattctcactccttatccactgcaatgtcctttatctgctccatcagcacaatcctgcttgctgtccaaaatatttcttgacagttccgtagctgcaatgcaaatgacaggaatattgaaaaggtcgctgttatta

SEQ ID NO: 27594 - DNA, 1823 bp, Zea Mays
gttcatcttcacctgcgtccgcgtgtgctgtctccctctttctctctctgcgacgactgggtgggctaccgccgccgccgccctacgttagataccgaggccttcgccggcgacgaacacccgccagggatggcgaccacagcactgctccgggctctccggcggccctcatccgaagccgcgctgcgattgcaatcctgaattccagaaatccatgaaggagttcagcgagaaacttgatgtggtgaaggaagatctcaaagtaagaactaagaaaacgactgagacaatatacaagcgtgttgatgatgtttggagtgaagctgaggagacatctaaaaaggttactgcaaatatcaaagaaaaaatgtttgctgctaaagaagaggtaaaggaaagttttggagttggaaaagaagagagtacaagttgcagggatggtttgcctgaaggttcaaaacatgagaaaactgaggcatcctcacattcagatggcacgactgaagatgccacagacagccatacattgtttactaaattgaagtcaacaatctcatctgcttcaccagtagtatccggtgcgtttgcaaagttgaaggacacaaaagtctcaactttagctaagcagggatatgaaatcgtcaaggatgaattaagctctaactctagcagaaagaaaaaacaccaagctaggcatgcttctgctaaagtagaaaagagtacaagaaccgatttagttcttacgccaacaaaaaagacagtattgggtgaaaaatgggaagaatttaagaataagatccgaggtcacccggtctacagaagagtggatgaatacaccaagcctgttgtaaccaagggacaagaggtagctgaagatgtcagggaaagatgggagacaagtgacaatccagtggttcagaaaattcaagacttgaatgaatctttgcttgaagaaacctcagctgcggtgacattcagggaaattcggcaacgagacccgtccttttctctttctgattttgttgctgatgtccaagaaatgatcaagccagttttaactgcatattcaaagggtgatgcggagactctaaaaaactactgcaccaaggaagtgattgagcgctgcaaaggagagagagaagcttatgcatcacagggaatattttttgatcacaaaatcctgcacatttcagaagctgatgtattggaaacaaagatgtttggatcttcacccataattatcttacgcttccaaacacagcagatatactgtgttcgagatcgagaaggacaagtcacagaaggaggacaggataccatccaaaccgtcttctattcgtgggctatgcaactcatggacagcgacgaggtgccagaagaagaatcctattacccagtctggcggctgcgtgagatgcaacaagctggcatcaaagctctcatatagctagctgttcaacgagcatgcaagaacgttgatattctttcttttttatttttggctgatttgatgcatcttctcgcagagttagcttgtagcagcgtatactgatagcaacttggtgaaagtgcattatttaatccaacttataagcctcaacaaatttgtaatgacaagagtagcttgaaacaggaaaaaaaataccgatgagcagctttagcctatctcattagtctttctatctcacattctcactccttatccactgcaatgtcctttatctgctccatcagcacaatcctgcttgctgtccaaaatatttcttgacagttccgtagctgcaatgcaaatgacaggaatattgaaaaggtcgctgttatta

SEQ ID NO: 27595 - DNA, 1938 bp, Zea Mays
ccggactgggctacggctccgttcatcttcacctgcgtccgcgtgtgctgtctccctctttctctctctgcgacgactgggtgggctaccgccgccgccgccctacgttagataccgaggccttcgccggcgacgaacacccgccagggatggcgaccacagcactgctccgggctctccggcggccctcatccgaagccgcgctgcgattggctacaaaggcaaatgtgcaaacaactaatggatatagacatctgaataacaggaacctaagcgttttcaatgagttttctaagcaactaaagggtgaggccaagagcaatcctgaattccagaaatccatgaaggagttcagcgagaaacttgatgtggtgaaggaagatctcaaagtaagaactaagaaaacgactgagacaatatacaagcgtgttgatgatgtttggagtgaagctgaggagacatctaaaaaggttactgcaaatatcaaagaaaaaatgtttgctgctaaagaagaggtaaaggaaagttttggagttggaaaagaagagagtacaagttgcagggatggtttgcctgaaggttcaaaacatgagaaaactgaggcatcctcacattcagatggcacgactgaagatgccacagacagccatacattgtttactaaattgaagtcaacaatctcatctgcttcaccagtagtatccggtgcgtttgcaaagttgaaggacacaaaagtctcaactttagctaagcagggatatgaaatcgtcaaggatgaattaagctctaactctagcagaaagaaaaaacaccaagctaggcatgcttctgctaaagtagaaaagagtacaagaaccgatttagttcttacgccaacaaaaaagacagtattgggtgaaaaatgggaagaatttaagaataagatccgaggtcacccggtctacagaagagtggatgaatacaccaagcctgttgtaaccaagggacaagaggtagctgaagatgtcagggaaagatgggagacaagtgacaatccagtggttcagaaaattcaagacttgaatgaatctttgcttgaagaaacctcagctgcggtgacattcagggaaattcggcaacgagacccgtccttttctctttctgattttgttgctgatgtccaagaaatgatcaagccagttttaactgcatattcaaagggtgatgcggagactctaaaaaactactgcaccaaggaagtgattgagcgctgcaaaggagagagagaagcttatgcatcacagggaatattttttgatcacaaaatcctgcacatttcagaagctgatgtattggaaacaaagatgtttggatcttcacccataattatcttacgccagatatactgtgttcgagatcgagaaggacaagtcacagaaggaggacaggataccatccaaaccgtcttctattcgtgggctatgcaactcatggacagcgacgaggtgccagaagaagaatcctattacccagtctggcggctgcgtgagatgcaacaagctggcatcaaagctctcatatagctagctgttcaacgagcatgcaagaacgttgatattctttcttttttatttttggctgatttgatgcatcttctcgcagagttagcttgtagcagcgtatactgatagcaacttggtgaaagtgcattatttaatccaacttataagcctcaacaaatttgtaatgacaagagtagcttgaaacaggaaaaaaaataccgatgagcagctttagcctatctcattagtctttctatctcacattctcactccttatccactgcaatgtcctttatctgctccatcagcacaatcctgcttgctgtccaaaatatttcttgacagttccgtagctgcaatgcaaatgacaggaatattgaaaaggtcgctgttatta

SEQ ID NO: 27596 - DNA, 2267 bp, Zea Mays
gaacaaccccggactgggctacggctccgttcatcttcacctgcgtccgcgtgtgctgtctccctctttctctctctgcgacgactgggtgggctaccgccgccgccgccctacgttagataccgaggccttcgccggcgacgaacacccgccagggatggcgaccacagcactgctccgggctctccggcggccctcatccgaagccgcgctgcgattggctacaaaggcaaatgtgcaaacaactaatggatatagacatctgaataacaggaacctaagcgttttcaatgagttttctaagcaactaaagggtgaggccaagagcaatcctgaattccagaaatccatgaaggagttcagcgagaaacttgatgtggtgaaggaagatctcaaagtaagaactaagaaaacgactgagacaatatacaagcgtgttgatgatgtttggagtgaagctgaggagacatctaaaaaggttactgcaaatatcaaagaaaaaatgtttgctgctaaagaagaggtaaaggaaagttttggagttggaaaagaagagagtacaagttgcagggatggtttgcctgaaggttcaaaacatgagaaaactgaggcatcctcacattcagatggcacgactgaagatgccacagacagccatacattgtttactaaattgaagtcaacaatctcatctgcttcaccagtagtatccggtgcgtttgcaaagttgaaggacacaaaagtctcaactttagctaagcagggatatgaaatcgtcaaggatgaattaagctctaactctagcagaaagaaaaaacaccaagctaggcatgcttctgctaaagtagaaaagagtacaagaaccgatttagttcttacgccaacaaaaaagacagtattgggtgaaaaatgggaagaatttaagaataagatccgaggtcacccggtctacagaagagtggatgaatacaccaagcctgttgtaaccaagggacaagaggtagctgaagatgtcagggaaagatgggagacaagtgacaatccagtggttcagaaaattcaagagtactatgtgcctcattattctttgttctatctgattatggaatttgattgattcaatctgaactatgctattctatttatttatgttgtcatttagcacattacattaggtcttcaaagcaccaagtaatgcacctgccaggtgcattcatggctgcaaatccattggtggttcctcttcattagtaacacaatcaatgcaataatctctttcttgaatgtgcaaaccaattgtatttcccccctaatacaatatatatattttttgtgactgacacgttgttgatattttttgtttgttccttgtagcttgaatgaatctttgcttgaagaaacctcagctgcggtgacattcagggaaattcggcaacgagacccgtccttttctctttctgattttgttgctgatgtccaagaaatgatcaagccagttttaactgcatattcaaagggtgatgcggagactctaaaaaactactgcaccaaggaagtgattgagcgctgcaaaggagagagagaagcttatgcatcacagggaatattttttgatcacaaaatcctgcacatttcagaagctgatgtattggaaacaaagatgtttggatcttcacccataattatcttacgcttccaaacacagcagatatactgtgttcgagatcgagaaggacaagtcacagaaggaggacaggataccatccaaaccgtcttctattcgtgggctatgcaactcatggacagcgacgaggtgccagaagaagaatcctattacccagtctggcggctgcgtgagatgcaacaagctggcatcaaagctctcatatagctagctgttcaacgagcatgcaagaacgttgatattctttcttttttatttttggctgatttgatgcatcttctcgcagagttagcttgtagcagcgtatactgatagcaacttggtgaaagtgcattatttaatccaacttataagcctcaacaaatttgtaatgacaagagtagcttgaaacaggaaaaaaaataccgatgagcagctttagcctatctcattagtctttctatctcacattctcactccttatccactgcaatgtcctttatctgctccatcagcacaatcctgcttgctgtccaaaatatttcttgacagttccgtagctgcaatgcaaatgacaggaatattgaaaaggtcgctgttatta

SEQ ID NO: 27597 - DNA, 1965 bp, Zea Mays
gaacaaccccggactgggctacggctccgttcatcttcacctgcgtccgcgtgtgctgtctccctctttctctctctgcgacgactgggtgggctaccgccgccgccgccctacgttagataccgaggccttcgccggcgacgaacacccgccagggatggcgaccacagcactgctccgggctctccggcggccctcatccgaagccgcgctgcgattggctacaaaggcaaatgtgcaaacaactaatggatatagacatctgaataacaggaacctaagcgttttcaatgagttttctaagcaactaaagggtgaggccaagagcaatcctgaattccagaaatccatgaaggagttcagcgagaaacttgatgtggtgaaggaagatctcaaagtaagaactaagaaaacgactgagacaatatacaagcgtgttgatgatgtttggagtgaagctgaggagacatctaaaaaggttactgcaaatatcaaagaaaaaatgtttgctgctaaagaagaggtaaaggaaagttttggagttggaaaagaagagagtacaagttgcagggatggtttgcctgaaggttcaaaacatgagaaaactgaggcatcctcacattcagatggcacgactgaagatgccacagacagccatacattgtttactaaattgaagtcaacaatctcatctgcttcaccagtagtatccggtgcgtttgcaaagttgaaggacacaaaagtctcaactttagctaagcagggatatgaaatcgtcaaggatgaattaagctctaactctagcagaaagaaaaaacaccaagctaggcatgcttctgctaaagtagaaaagagtacaagaaccgatttagttcttacgccaacaaaaaagacagtattgggtgaaaaatgggaagaatttaagaataagatccgaggtcacccggtctacagaagagtggatgaatacaccaagcctgttgtaaccaagggacaagaggtagctgaagatgtcagggaaagatgggagacaagtgacaatccagtggttcagaaaattcaagagtactatcttgaatgaatctttgcttgaagaaacctcagctgcggtgacattcagggaaattcggcaacgagacccgtccttttctctttctgattttgttgctgatgtccaagaaatgatcaagccagttttaactgcatattcaaagggtgatgcggagactctaaaaaactactgcaccaaggaagtgattgagcgctgcaaaggagagagagaagcttatgcatcacagggaatattttttgatcacaaaatcctgcacatttcagaagctgatgtattggaaacaaagatgtttggatcttcacccataattatcttacgcttccaaacacagcagatatactgtgttcgagatcgagaaggacaagtcacagaaggaggacaggataccatccaaaccgtcttctattcgtgggctatgcaactcatggacagcgacgaggtgccagaagaagaatcctattacccagtctggcggctgcgtgagatgcaacaagctggcatcaaagctctcatatagctagctgttcaacgagcatgcaagaacgttgatattctttcttttttatttttggctgatttgatgcatcttctcgcagagttagcttgtagcagcgtatactgatagcaacttggtgaaagtgcattatttaatccaacttataagcctcaacaaatttgtaatgacaagagtagcttgaaacaggaaaaaaaataccgatgagcagctttagcctatctcattagtctttctatctcacattctcactccttatccactgcaatgtcctttatctgctccatcagcacaatcctgcttgctgtccaaaatatttcttgacagttccgtagctgcaatgcaaatgacaggaatattgaaaaggtcgctgttatta

SEQ ID NO: 27598 - DNA, 1945 bp, Zea Mays
gccgaacaaccccggactgggctacggctccgttcatcttcacctgcgtccgcgtgtgctgtctccctctttctctctctgcgacgactgggtgggctaccgccgccgccgccctacgttagataccgaggccttcgccggcgacgaacacccgccagggatggcgaccacagcactgctccgggctctccggcggccctcatccgaagccgcgctgcgattggctacaaaggcaaatgtgcaaacaactaatggatatagacatctgaataacaggaacctaagcgttttcaatgagttttctaagcaactaaagggtgaggccaagagcaatcctgaattccagaaatccatgaaggagttcagcgagaaacttgatgtggtgaaggaagatctcaaagtaagaactaagaaaacgactgagacaatatacaagcgtgttgatgatgtttggagtgaagctgaggagacatctaaaaaggttactgcaaatatcaaagaaaaaatgtttgctgctaaagaagaggtaaaggaaagttttggagttggaaaagaagagagtacaagttgcagggatggtttgcctgaaggttcaaaacatgagaaaactgaggcatcctcacattcagatggcacgactgaagatgccacagacagccatacattgtttactaaattgaagtcaacaatctcatctgcttcaccagtagtatccggtgcgtttgcaaagttgaaggacacaaaagtctcaactttagctaagcagggatatgaaatcgtcaaggatgaattaagctctaactctagcagaaagaaaaaacaccaagctaggcatgcttctgctaaagtagaaaagagtacaagaaccgatttagttcttacgccaacaaaaaagacagtattgggtgaaaaatgggaagaatttaagaataagatccgaggtcacccggtctacagaagagtggatgaatacaccaagcctgttgtaaccaagggacaagaggtagctgaagatgtcagggaaagatgggagacaagtgacaatccagtggttcagaaaattcaagacttgaatgaatctttgcttgaagaaacctcagctgcggtgacattcagggaaattcggcaacgagacccgtccttttctctttctgattttgttgctgatgtccaagaaatgatcaagccagttttaactgcatattcaaagggtgatgcggagactctaaaaaactactgcaccaaggaagtgattgagcgctgcaaaggagagagagaagcttatgcatcacagggaatattttttgatcacaaaaagctgatgtattggaaacaaagatgtttggatcttcacccataattatcttacgcttccaaacacagcagatatactgtgttcgagatcgagaaggacaagtcacagaaggaggacaggataccatccaaaccgtcttctattcgtgggctatgcaactcatggacagcgacgaggtgccagaagaagaatcctattacccagtctggcggctgcgtgagatgcaacaagctggcatcaaagctctcatatagctagctgttcaacgagcatgcaagaacgttgatattctttcttttttatttttggctgatttgatgcatcttctcgcagagttagcttgtagcagcgtatactgatagcaacttggtgaaagtgcattatttaatccaacttataagcctcaacaaatttgtaatgacaagagtagcttgaaacaggaaaaaaaataccgatgagcagctttagcctatctcattagtctttctatctcacattctcactccttatccactgcaatgtcctttatctgctccatcagcacaatcctgcttgctgtccaaaatatttcttgacagttccgtagctgcaatgcaaatgacaggaatattgaaaaggtcgctgttatta

SEQ ID NO: 27599 - DNA, 1242 bp, Zea Mays
gatccctcgaggagattatcgacgagagccacgccatcgtctcctcctctgtcggacccgagtactatgtcagcatcctctcctttgtcgacaaggaccagctcgagccgggatgctccatcctcatgcacaataagattcccagattcaagaaattaaagaggctgttgagcttcccttgactcatcctgagttgtatgaagacattgggatcaggccacccaagggagtcatattatatggcgaacctggaactggaaaaactctactcgccaaggctgttgccaattcaacatctgcgactttcttgcgtgttgtcggtagtgaacttattcaaaagtaccttggggatggtcccaagctagtcagagaattgtttagggtggctgatgaactttctccctcaatagtcttcattgatgagattgacgcagttggaacgaagaggtatgatgctcattcaggaggggagcgtgagattcaaagaactatgttggagctgctgaatcagctagatggttttgactcacgtggagatgttaaagtcattctagcaacaaaccgcattgaaagtcttgatccagccttgcttcggccaggccgtatagaccggaagattgaatttcctctaccagatattaaaactagacgacgcatcttccagatacacacatcgaaaatgacattagctgatgatgtgaacttggaagagtttgttatgaccaaagacgagttttcgggtgctgatattaaggcaatctgcacagaggctggattgcttgccttaagagaacgcagaatgaaggtgacccatgcagatttcaagaaggcaaaggagaaggtgatgtacaagaagaaggaaggtgttccggatggtctctacatgtagccaatctattcatcatgccgaacaagttacccgattgtgtgtgtactagcacatctcttcatcatgggagatatgttaccacaatacttgttgcatactgtgctaagtggtcaggagaaccttgtattaattaattatcctttcattgtctcaaagtaaaaatttcccttgcgctaaaaatatgcatccgttcagcatccgtgtgacgtgttggcagcttgatcgcatggtgactattgcgtacacgaaattgcaacttatttgaatgaaaaaattggatattagaggaaattcgcatctctatatatatgtagtttgttgtgaagcaaaaaaaaaaaaggaaaatgttgaga

SEQ ID NO: 27600 - DNA, 1335 bp, Zea Mays
gatccctcgaggagattatcgacgagagccacgccatcgtctcctcctctgtcggacccgagtactatgtcagcatcctctcctttgtcgacaaggaccagctcgagccgggatgctccatcctcatgcacaataaggttctttctgtagttggtatattgcaagatgaagttgatcctatggtatctgtgatgaaagttgagaaagcacctttggaatcttatgctgacattggtggactagattcccagattcaagaaattaaagaggctgttgagcttcccttgactcatcctgagttgtatgaagacattgggatcaggccacccaagggagtcatattatatggcgaacctggaactggaaaaactctactcgccaaggctgttgccaattcaacatctgcgactttcttgcgtgttgtcggtagtgaacttattcaaaagtaccttggggatggtcccaagctagtcagagaattgtttagggtggctgatgaactttctccctcaatagtcttcattgatgagattgacgcagttggaacgaagaggtatgatgctcattcaggaggggagcgtgagattcaaagaactatgttggagctgctgaatcagctagatggttttgactcacgtggagatgttaaagtcattctagcaacaaaccgcattgaaagtcttgatccagccttgcttcggccaggccgtatagaccggaagattgaatttcctctaccagatattaaaactagacgacgcatcttccagatacacacatcgaaaatgacattagctgatgatgtgaacttggaagagtttgttatgaccaaagacgagttttcgggtgctgatattaaggcaatctgcacagaggctggattgcttgccttaagagaacgcagaatgaagatttcaagaaggcaaaggagaaggtgatgtacaagaagaaggaaggtgttccggatggtctctacatgtagccaatctattcatcatgccgaacaagttacccgattgtgtgtgtactagcacatctcttcatcatgggagatatgttaccacaatacttgttgcatactgtgctaagtggtcaggagaaccttgtattaattaattatcctttcattgtctcaaagtaaaaatttcccttgcgctaaaaatatgcatccgttcagcatccgtgtgacgtgttggcagcttgatcgcatggtgactattgcgtacacgaaattgcaacttatttgaatgaaaaaattggatattagaggaaattcgcatctctatatatatgtagtttgttgtgaagcaaaaaaaaaaaaggaaaatgttgaga

SEQ ID NO: 27601 - DNA, 3540 bp, Zea Mays
gtagcagtctctctctcgggccctcggcgtagcagtctgtctgtctctcttcaccctcctcccttcccttcccttcccttctcgcgcctccacaactgcccgcccgcccgcccgcaaacaccatgggcaccacgtacaagtgctgcttcatcttcaagcgccggttccacacccgcgacgcgccgccgcccgaggacgtccgcgcccttttctccgtccacgccggcgggggaccccacatgggcgccgacgatctgcgacgctacctggtggccacgggccaggaggaggccgagctcagcagcgactgcagcgatacccccatcatcatggcactggagagaggggtcagggtcatcgagctcgacatgtggccaaattcaaccattgacgacatcaacatcgtgcacggcaggacactgacaaccccagtttctctcatcaaatgcctgagatccatcaagaaacacgcctttgttgcatctccctatcctgtcatcataacacttgaagaccacctcccctctcaactccaggagaaagttgccaagatggttgttgaagtatttggcaacatactgtactacccgccagacgacacccatgagctcaaagaattaccatcacctgaacaactcaaaggacgtgtcctcctctcaacaaagccccccaaggagtacctcgaaaccaagcttagtgactccacgaaggagggtgatgctgacctccatcttggcaaaggaaccggtgatgacgcggtgtggggaaaagaagtaccagattttcggaccgagatccagtctgctgaaaaggacgacgagaacgacgacgttgatgatgaggaagaacaaaaactgcagccccatatagctccacagtataaacaccttattactatcagagcagggaagccaaaagactctctagctgatgccttgaagagtgatccagaaaaagttcggcgtctcagtttgagcgagcaacaacttgccaaagcggcaaaggatcatgccacagaaattgtgaggttcacacagagaaacatactgaggatataccccaagggcactcgagtcacttcatcgaactacaatccgttcgttggttgggtgcatggtgctcaaatggtggcattcaatatgcagggatacgggagagcgctgtggctaatgcacggattttacaaagcgaatggcgggtgcggttatgtgaagaaaccagatttcttgatgcagacagaaccacaagtcttcgacccaagagaaccccagcctgtgaagaaaacgttgaaggtgaaggtgtacatgggcgatgggtggcgaatggacttcaagcagacacacttcgatcagtactctcctccagatttctacacacgggttgggattgctggagtcccagcagactcggtgatgaagaagaccaacgcgatcgaggacaactggaccccggtgtgggagaaggagttcagcttcccgctgactgtcccggagctcgctctgctgcgggtggaggtgcacgagtacgacatgtcggagaaggacgacttcggtggccagacagtgctgccggtgtcggagctgcggcccgggatccgggcggtagcgctcttcgaccgcaaagggatgaagtacaaccatgtgaagcttctcatgcgtttcgagtttgcctagcctgaccctgaccatgcatgcccccccccccccccccccccctcctgttgtgtgaatggatattgcagtctcagtgtgcttcctttgtacatagattgcttggcttggatgatatgtgcaacagacaattccttcagttgttatgatcaaataataaagaggcagcgtccttatgaacaagcgcaaagatgaattgtcaatgcagtatcaacggtccttctgtagtttcagtaaactgacaccttcattgctgctggtgacctgacatatttcagattccacatgagacaactggaggccgaccagacctctcccgggtcccggcgctgaggactgccgcccaggagcagtgaagaaggcaactgtgaagctgcgtgcagcggctgttgggctctattgttagtgatagccctcaagattgggctgtagtttagagaggcgcagcggcctgtagccgcctctgacccgcagcagcgcctccatggctccattgccttctctatcccgactcccgagtcccggcgccatccaggttcgtgtgggggcgggcattcatggcagggcaatctgacccgcacctctccatcttctcgccctccgaggtggagttcgtggcggaggatgagatcgtcgaaatcgtcctcaacatccgcatggacgcccttaacatgatctacgggggatttcgggcccttcttcccacagattcccaccaaggtgccgctctggctcgccgtggcgctcaagaagcgtagcaagtgcaccatccgcaccccggactggatgactgttggtattggaagcggaaggagagtcgcctcgggaattccagccattgccattccactatattgaaatttctaagtgctggtgatgacatctcagatgcatacctggtgaggtctctaattgaggacatcagagatgtcagattccacaaggttaagaatggattagagacgatatctggacgcacctatgccgtaaagctcaaaaatctctctgcaatggaagtgaacattgtccgcccttttcatggtgagaactttgcaggcattctataagcacgatagtccacagatgattcagcaagcagataatgtagggaccagagcaacactagttacagaccgtggcccccagaataagcttcccttgtagatattgtttcaacttgcttgtggattctcggaggtagttgtccccataaaaaatgtgccctaagaatcttaagatgttgcgcacaaaatagttccatatcagaaagctggtacatatatataattctattctgattggttggtgacccggtacaatttataacagcttaatacattgcactgtatggaccagaaagaagacttggtacctcgttttctatttccatgcattatttattttgtcagaatattctcattttgtcatcaagcagcaatacatgatttgtcaggaaaagccccatgtctccaacttttgcagagagatctaaggcgcaggtagtccacttacattttgcaaataatgtactgcatatgtgaggacagcaataagcggaggtaggtgacgaagtcgagccacatgacaaaaacccagtaggggaccaggtagagcttgagcatctgcagagggcccatgaggaaggcgaggccagctaggagtgcgaccatggcgagccagcacgccgtggaggtggctagctagggcaggagaggaggcgtacgtacgggatgccatgactcgtccttgtccacgtggccgtggttctggtggatggaggagtgcagaatgtgaccgaccacgctgttgagtctggggttgttggagaagctgccgtggccgcagtcgtgtcccagcacgaagagcgccc

SEQ ID NO: 27602 - DNA, 3675 bp, Zea Mays
gtagcagtctctctctcgggccctcggcgtagcagtctgtctgtctctcttcaccctcctcccttcccttcccttcccttctcgcgcctccacaactgcccgcccgcccgcccgcaaacaccatgggcaccacgtacaagtgctgcttcatcttcaagcgccggttccacacccgcgacgcgccgccgcccgaggacgtccgcgcccttttctccgtccacgccggcgggggaccccacatgggcgccgacgatctgcgacgctacctggtggccacgggccaggaggaggccgaggtggagcggctgctggagcagatcgtccagggccgtgcccgcgtcccgcgcctcgcccgcccgctcctctcgctcgacgacttccaccgctacctcttctcgcacgacctcaacccgcccatccgtcacccgcagctcagcagcgactgcagcgatacccccatcatcatggcactggagagaggggtcagggtcatcgagctcgacatgtggccaaattcaaccattgacgacatcaacatcgtgcacggcaggacactgacaaccccagtttctctcatcaaatgcctgagatccatcaagaaacacgcctttgttgcatctccctatcctgtcatcataacacttgaagaccacctcccctctcaactccaggagaaagttgccaagatggttgttgaagtatttggcaacatactgtactacccgccagacgacacccatgagctcaaagaattaccatcacctgaacaactcaaaggacgtgtcctcctctcaacaaagccccccaaggagtacctcgaaaccaagcttagtgactccacgaaggagggtgatgctgacctccatcttggcaaaggaaccggtgatgacgcggtgtggggaaaagaagtaccagattttcggaccgagatccagtctgctgaaaaggacgacgagaacgacgacgttgatgatgaggaagaacaaaaactgcagccccatatagctccacagtataaacaccttattactatcagagcagggaagccaaaagactctctagctgatgccttgaagagtgatccagaaaaagttcggcgtctcagtttgagcgagcaacaacttgccaaagcggcaaaggatcatgccacagaaattgtgaggttcacacagagaaacatactgaggatataccccaagggcactcgagtcacttcatcgaactacaatccgttcgttggttgggtgcatggtgctcaaatggtggcattcaatatgcagggatacgggagagcgctgtggctaatgcacggattttacaaagcgaatggcgggtgcggttatgtgaagaaaccagatttcttgatgcagacagaaccacaagtcttcgacccaagagaaccccagcctgtgaagaaaacgttgaaggtgaaggtgtacatgggcgatgggtggcgaatggacttcaagcagacacacttcgatcagtactctcctccagatttctacacacgggttgggattgctggagtcccagcagactcggtgatgaagaagaccaacgcgatcgaggacaactggaccccggtgtgggagaaggagttcagcttcccgctgactgtcccggagctcgctctgctgcgggtggaggtgcacgagtacgacatgtcggagaaggacgacttcggtggccagacagtgctgccggtgtcggagctgcggcccgggatccgggcggtagcgctcttcgaccgcaaagggatgaagtacaaccatgtgaagcttctcatgcgtttcgagtttgcctagcctgaccctgaccatgcatgcccccccccccccccccccccctcctgttgtgtgaatggatattgcagtctcagtgtgcttcctttgtacatagattgcttggcttggatgatatgtgcaacagacaattccttcagttgttatgatcaaataataaagaggcagcgtccttatgaacaagcgcaaagatgaattgtcaatgcagtatcaacggtccttctgtagtttcagtaaactgacaccttcattgctgctggtgacctgacatatttcagattccacatgagacaactggaggccgaccagacctctcccgggtcccggcgctgaggactgccgcccaggagcagtgaagaaggcaactgtgaagctgcgtgcagcggctgttgggctctattgttagtgatagccctcaagattgggctgtagtttagagaggcgcagcggcctgtagccgcctctgacccgcagcagcgcctccatggctccattgccttctctatcccgactcccgagtcccggcgccatccaggttcgtgtgggggcgggcattcatggcagggcaatctgacccgcacctctccatcttctcgccctccgaggtggagttcgtggcggaggatgagatcgtcgaaatcgtcctcaacatccgcatggacgcccttaacatgatctacgggggatttcgggcccttcttcccacagattcccaccaaggtgccgctctggctcgccgtggcgctcaagaagcgtagcaagtgcaccatccgcaccccggactggatgactgttggtattggaagcggaaggagagtcgcctcgggaattccagccattgccattccactatattgaaatttctaagtgctggtgatgacatctcagatgcatacctggtgaggtctctaattgaggacatcagagatgtcagattccacaaggttaagaatggattagagacgatatctggacgcacctatgccgtaaagctcaaaaatctctctgcaatggaagtgaacattgtccgcccttttcatggtgagaactttgcaggcattctataagcacgatagtccacagatgattcagcaagcagataatgtagggaccagagcaacactagttacagaccgtggcccccagaataagcttcccttgtagatattgtttcaacttgcttgtggattctcggaggtagttgtccccataaaaaatgtgccctaagaatcttaagatgttgcgcacaaaatagttccatatcagaaagctggtacatatatataattctattctgattggttggtgacccggtacaatttataacagcttaatacattgcactgtatggaccagaaagaagacttggtacctcgttttctatttccatgcattatttattttgtcagaatattctcattttgtcatcaagcagcaatacatgatttgtcaggaaaagccccatgtctccaacttttgcagagagatctaaggcgcaggtagtccacttacattttgcaaataatgtactgcatatgtgaggacagcaataagcggaggtaggtgacgaagtcgagccacatgacaaaaacccagtaggggaccaggtagagcttgagcatctgcagagggcccatgaggaaggcgaggccagctaggagtgcgaccatggcgagccagcacgccgtggaggtggctagctagggcaggagaggaggcgtacgtacgggatgccatgactcgtccttgtccacgtggccgtggttctggtggatggaggagtgcagaatgtgaccgaccacgctgttgagtctggggttgttggagaagctgccgtggccgcagtcgtgtcccagcacgaagagcgccc

SEQ ID NO: 27603 - DNA, 3752 bp, Zea Mays
gtagcagtctctctctcgggccctcggcgtagcagtctgtctgtctctcttcaccctcctcccttcccttcccttcccttctcgcgcctccacaactgcccgcccgcccgcccgcaaacaccatgggcaccacgtacaagtgctgcttcatcttcaagcgccggttccacacccgcgacgcgccgccgcccgaggacgtccgcgcccttttctccgtccacgccggcgggggaccccacatgggcgccgacgatctgcgacgctacctggtggccacgggccaggaggaggccgaggtggagcggctgctggagcagatcgtccagggccgtgcccgcgtcccgcgcctcgcccgcccgctcctctcgctcgacgacttccaccgctacctcttctcgcacgacctcaacccgcccatccgtcacccgcagctcagcagcgactgcagcgatacccccatcatcatggcactggagagaggggtcagggtcatcgagctcgacatgtggccaaattcaaccattgacgacatcaacatcgtgcacggcaggacactgacaaccccagtttctctcatcaaatgcctgagatccatcaagaaacacgcctttgttgcatctccctatcctgtcatcataacacttgaagaccacctcccctctcaactccaggagaaagttgccaagatggttgttgaagtatttggcaacatactgtactacccgccagacgacacccatgagctcaaagaattaccatcacctgaacaactcaaaggacgtgtcctcctctcaacaaagccccccaaggagtacctcgaaaccaagcttagtgactccacgaaggagggtgatgctgacctccatcttggcaaaggaaccggtgatgacgcggtgtggggaaaagaagtaccagattttcggaccgagatccagtctgctgaaaaggacgacgagaacgacgacgttgatgatgaggaagaacaaaaactgcagccccatatagctccacagtataaacaccttattactatcagagcagggaagccaaaagactctctagctgatgccttgaagagtgatccagaaaaagttcggcgtctcagtttgagcgagcaacaacttgccaaagcggcaaaggatcatgccacagaaattgtgaggttcacacagagaaacatactgaggatataccccaagggcactcgagtcacttcatcgaactacaatccgttcgttggttgggtgcatggtgctcaaatggtggcattcaatatgcagggatacgggagagcgctgtggctaatgcacggattttacaaagcgaatggcgggtgcggttatgtgaagaaaccagatttcttgatgcagacagaaccacaagtcttcgacccaagagaaccccagcctgtgaagaaaacgttgaaggtgaaggtgtacatgggcgatgggtggcgaatggacttcaagcagacacacttcgatcagtactctcctccagatttctacacacgggttgggattgctggagtcccagcagactcggtgatgaagaagaccaacgcgatcgaggacaactggaccccggtgtgggagaaggagttcagcttcccgctgactgtcccggagctcgctctgctgcgggtggaggtgcacgagtacgacatgtcggagaaggacgacttcggtggccagacagtgctgccggtgtcggagctgcggcccgggatccgggcggtagcgctcttcgaccgcaaagggatgaagtacaaccatgtgaagcttctcatgcgtttcgagtttgcctagcctgaccctgaccatgcatgcccccccccccccccccccccctcctgttgtgtgaatggatattgcagtctcagtgtgcttcctttgtacatagattgcttggcttggatgatatgtgcaacagacaattccttcagttgttatgatcaaataataaagaggcagcgtccttatgaacaagcgcaaagatgaattgtcaatgcagtatcaacggtccttctgtagtttcagtaaactgacaccttcattgctgctggtgacctgacatatttcagattccacatgagacaactggaggccgaccagacctctcccgggtcccggcgctgaggactgccgcccaggagcagtgaagaaggcaactgtgaagctgcgtgcagcggctgttgggctctattgttagtgatagccctcaagattgggctgtagtttagagaggcgcagcggcctgtagccgcctctgacccgcagcagcgcctccatggctccattgccttctctatcccgactcccgagtcccggcgccatccaggttcgtgtgggggcgggcattcatggcagggcaatctgacccgcacctctccatcttctcgccctccgaggtaaccaaccccttcccttccacactgcactggcagggactatcttcgtctgtgctgctgcaggtggagttcgtggcggaggatgagatcgtcgaaatcgtcctcaacatccgcatggacgcccttaacatgatctacgggggatttcgggcccttcttcccacagattcccaccaaggtgccgctctggctcgccgtggcgctcaagaagcgtagcaagtgcaccatccgcaccccggactggatgactgttggtattggaagcggaaggagagtcgcctcgggaattccagccattgccattccactatattgaaatttctaaggttctatttgatcatgctggtgatgacatctcagatgcatacctggtgaggtctctaattgaggacatcagagatgtcagattccacaaggttaagaatggattagagacgatatctggacgcacctatgccgtaaagctcaaaaatctctctgcaatggaagtgaacattgtccgcccttttcatggtgagaactttgcaggcattctataagcacgatagtccacagatgattcagcaagcagataatgtagggaccagagcaacactagttacagaccgtggcccccagaataagcttcccttgtagatattgtttcaacttgcttgtggattctcggaggtagttgtccccataaaaaatgtgccctaagaatcttaagatgttgcgcacaaaatagttccatatcagaaagctggtacatatatataattctattctgattggttggtgacccggtacaatttataacagcttaatacattgcactgtatggaccagaaagaagacttggtacctcgttttctatttccatgcattatttattttgtcagaatattctcattttgtcatcaagcagcaatacatgatttgtcaggaaaagccccatgtctccaacttttgcagagagatctaaggcgcaggtagtccacttacattttgcaaataatgtactgcatatgtgaggacagcaataagcggaggtaggtgacgaagtcgagccacatgacaaaaacccagtaggggaccaggtagagcttgagcatctgcagagggcccatgaggaaggcgaggccagctaggagtgcgaccatggcgagccagcacgccgtggaggtggctagctagggcaggagaggaggcgtacgtacgggatgccatgactcgtccttgtccacgtggccgtggttctggtggatggaggagtgcagaatgtgaccgaccacgctgttgagtctggggttgttggagaagctgccgtggccgcagtcgtgtcccagcacgaagagcgccc

SEQ ID NO: 27604 - DNA, 2886 bp, Zea Mays
gtagcagtctctctctcgggccctcggcgtagcagtctgtctgtctctcttcaccctcctcccttcccttcccttcccttctcgcgcctccacaactgcccgcccgcccgcccgcaaacaccatgggcaccacgtacaagtgctgcttcatcttcaagcgccggttccacacccgcgacgcgccgccgcccgaggacgtccgcgcccttttctccgtccacgccggcgggggaccccacatgggcgccgacgatctgcgacgctacctggtggccacgggccaggaggaggccgaggtggagcggctgctggagcagatcgtccagggccgtgcccgcgtcccgcgcctcgcccgcccgctcctctcgctcgacgacttccaccgctacctcttctcgcacgacctcaacccgcccatccgtcacccgcaggtgcaccacgacatgacgcgcccgctctcccactacttcatctacaccggacacaactcctacctcaccggcaaccagctcagcagcgactgcagcgatacccccatcatcatggcactggagagaggggtcagggtcatcgagctcgacatgtggccaaattcaaccattgacgacatcaacatcgtgcacggcaggacactgacaaccccagtttctctcatcaaatgcctgagatccatcaagaaacacgcctttgttgcatctccctatcctgtcatcataacacttgaagaccacctcccctctcaactccaggagaaagttgccaagatggttgttgaagtatttggcaacatactgtactacccgccagacgacacccatgagctcaaagaattaccatcacctgaacaactcaaaggacgtgtcctcctctcaacaaagccccccaaggagtacctcgaaaccaagcttagtgactccacgaaggagggtgatgctgacctccatcttggcaaaggaaccggtgatgacgcggtgtggggaaaagaagtaccagattttcggaccgagatccagtctgctgaaaaggacgacgagaacgacgacgttgatgatgaggaagaacaaaaactgcagccccatatagctccacagtataaacaccttattactatcagagcagggaagccaaaagactctctagctgatgccttgaagagtgatccagaaaaagttcggcgtctcagtttgagcgagcaacaacttgccaaagcggcaaaggatcatgccacagaaattgtgaggttcacacagagaaacatactgaggatataccccaagggcactcgagtcacttcatcgaactacaatccgttcgttggttgggtgcatggtgctcaaatggtggcattcaatatgcagggatacgggagagcgctgtggctaatgcacggattttacaaagcgaatggcgggtgcggttatgtgaagaaaccagatttcttgatgcagacagaaccacaagtcttcgacccaagagaaccccagcctgtgaagaaaacgttgaaggtgaaggtgtacatgggcgatgggtggcgaatggacttcaagcagacacacttcgatcagtactctcctccagatttctacacacgggttgggattgctggagtcccagcagactcggtgatgaagaagaccaacgcgatcgaggacaactggaccccggtgtgggagaaggagttcagcttcccgctgactgtcccggagctcgctctgctgcgggtggaggtgcacgagtacgacatgtcggagaaggacgacttcggtggccagacagtgctgccggtgtcggagctgcggcccgggatccgggcggtagcgctcttcgaccgcaaagggatgaaattccacatgagacaactggaggccgaccagacctctcccgggtcccggcgctgaggactgccgcccaggagcagtgaagaaggcaactgtgaagctgcgtgcagcggctgttgggctctattgttagtgatagccctcaagattgggctgtagtttagagaggcgcagcggcctgtagccgcctctgacccgcagcagcgcctccatggctccattgccttctctatcccgactcccgagtcccggcgccatccagggactatcttcgtctgtgctgctgcaggtggagttcgtggcggaggatgagatcgtcgaaatcgtcctcaacatccgcatggacgcccttaacatgatctacgggggatttcgggcccttcttcccacagattcccaccaaggtgccgctctggctcgccgtggcgctcaagaagcgtagcaagtgcaccatccgcaccccggactggatgactgttggtattggaagcggaaggagagtcgcctcgggaattccagccattgccattccactatattgaaatttctaagtgctggtgatgacatctcagatgcatacctggtgaggtctctaattgaggacatcagagatgtcagattccacaaggttaagaatggattagagacgatatctggacgcacctatgccgtaaagctcaaaaatctctctgcaatggaagtgaacattgtccgcccttttcatggtgagaactttgcaggcattctataagcacgatagtccacagatgattcagcaagcagataatgtagggaccagagcaacactagttacagaccgtggcccccagaataagcttcccttgtagatattgtttcaacttgcttgtggattctcggaggtagttgtccccataaaaaatgtgccctaagaatcttaagatgttgcgcacaaaatagttccatatcagaaagctggtacatatatataattctattctgattggttggtgacccggtacaatttataacagcttaatacattgcactgtatggaccagaaagaaga

SEQ ID NO: 27605 - DNA, 3304 bp, Zea Mays
gtagcagtctctctctcgggccctcggcgtagcagtctgtctgtctctcttcaccctcctcccttcccttcccttcccttctcgcgcctccacaactgcccgcccgcccgcccgcaaacaccatgggcaccacgtacaagtgctgcttcatcttcaagcgccggttccacacccgcgacgcgccgccgcccgaggacgtccgcgcccttttctccgtccacgccggcgggggaccccacatgggcgccgacgatctgcgacgctacctggtggccacgggccaggaggaggccgaggtggagcggctgctggagcagatcgtccagggccgtgcccgcgtcccgcgcctcgcccgcccgctcctctcgctcgacgacttccaccgctacctcttctcgcacgacctcaacccgcccatccgtcacccgcaggtgcaccacgacatgacgcgcccgctctcccactacttcatctacaccggacacaactcctacctcaccggcaaccagctcagcagcgactgcagcgatacccccatcatcatggcactggagagaggggtcagggtcatcgagctcgacatgtggccaaattcaaccattgacgacatcaacatcgtgcacggcaggacactgacaaccccagtttctctcatcaaatgcctgagatccatcaagaaacacgcctttgttgcatctccctatcctgtcatcataacacttgaagaccacctcccctctcaactccaggagaaagttgccaagatggttgttgaagtatttggcaacatactgtactacccgccagacgacacccatgagctcaaagaattaccatcacctgaacaactcaaaggacgtgtcctcctctcaacaaagccccccaaggagtacctcgaaaccaagcttagtgactccacgaaggagggtgatgctgacctccatcttggcaaaggaaccggtgatgacgcggtgtggggaaaagaagtaccagattttcggaccgagatccagtctgctgaaaaggacgacgagaacgacgacgttgatgatgaggaagaacaaaaactgcagccccatatagctccacagtataaacaccttattactatcagagcagggaagccaaaagactctctagctgatgccttgaagagtgatccagaaaaagttcggcgtctcagtttgagcgagcaacaacttgccaaagcggcaaaggatcatgccacagaaattgtgaggttcacacagagaaacatactgaggatataccccaagggcactcgagtcacttcatcgaactacaatccgttcgttggttgggtgcatggtgctcaaatggtggcattcaatatgcagggatacgggagagcgctgtggctaatgcacggattttacaaagcgaatggcgggtgcggttatgtgaagaaaccagatttcttgatgcagacagaaccacaagtcttcgacccaagagaaccccagcctgtgaagaaaacgttgaaggtgaaggtgtacatgggcgatgggtggcgaatggacttcaagcagacacacttcgatcagtactctcctccagatttctacacacggtcccagcagactcggtgatgaagaagaccaacgcgatcgaggacaactggaccccggtgtgggagaaggagttcagcttcccgctgactgtcccggagctcgctctgctgcgggtggaggtgcacgagtacgacatgtcggagaaggacgacttcggtggccagacagtgctgccggtgtcggagctgcggcccgggatccgggcggtagcgctcttcgaccgcaaagggatgaagtacaaccatgtgaagcttctcatgcgtttcgagtttgcctagcctgaccctgaccatgcatgcccccccccccccccccccccctcctgttgtgtgaatggatattgcagtctcagtgtgcttcctttgtacatagattgcttggcttggatgatatgtgcaacagacaattccttcagttgttatgatcaaataataaagaggcagcgtccttatgaacaagcgcaaagatgaattgtcaatgcagtatcaacggtccttctgtagtttcagtaaactgacaccttcattgctgctggtgacctgacatatttcagattccacatgagacaactggaggccgaccagacctctcccgggtcccggcgctgaggactgccgcccaggagcagtgaagaaggcaactgtgaagctgcgtgcagcggctgttgggctctattgttagtgatagccctcaagattgggctgtagtttagagaggcgcagcggcctgtagccgcctctgacccgcagcagcgcctccatggctccattgccttctctatcccgactcccgagtcccggcgccatccaggttcgtgtgggggcgggcattcatggcagggcaatctgacccgcacctctccatcttctcgccctccgaggtaaccaaccccttcccttccacactgcactggcagggactatcttcgtctgtgctgctgcaggtggagttcgtggcggaggatgagatcgtcgaaatcgtcctcaacatccgcatggacgcccttaacatgatctacgggggatttcgggcccttcttcccacagattcccaccaaggtgccgctctggctcgccgtggcgctcaagaagcgtagcaagtgcaccatccgcaccccggactggatgactgtattggaagcggaaggagagtcgcctcgggaattccagccattgccattccactatattgaaatttctaaggttctatttgatcatgctggtgatgacatctcagatgcatacctggtgaggtctctaattgaggacatcagagatgtcagattccacaaggttaagaatggattagagacgatatctggacgcacctatgccgtaaagctcaaaaatctctctgcaatggaagtgaacattgtccgcccttttcatggtgagaactttgcaggcattctataagcacgatagtccacagatgattcagcaagcagataatgtagggaccagagcaacactagttacagaccgtggcccccagaataagcttcccttgtagatattgtttcaacttgcttgtggattctcggaggtagttgtccccataaaaaatgtgccctaagaatcttaagatgttgcgcacaaaatagttccatatcagaaagctggtacatatatataattctattctgattggttggtgacccggtacaatttataacagcttaatacattgcactgtatggaccagaaagaaga

SEQ ID NO: 27606 - DNA, 3345 bp, Zea Mays
gtagcagtctctctctcgggccctcggcgtagcagtctgtctgtctctcttcaccctcctcccttcccttcccttcccttctcgcgcctccacaactgcccgcccgcccgcccgcaaacaccatgggcaccacgtacaagtgctgcttcatcttcaagcgccggttccacacccgcgacgcgccgccgcccgaggacgtccgcgcccttttctccgtccacgccggcgggggaccccacatgggcgccgacgatctgcgacgctacctggtggccacgggccaggaggaggccgaggtggagcggctgctggagcagatcgtccagggccgtgcccgcgtcccgcgcctcgcccgcccgctcctctcgctcgacgacttccaccgctacctcttctcgcacgacctcaacccgcccatccgtcacccgcaggtgcaccacgacatgacgcgcccgctctcccactacttcatctacaccggacacaactcctacctcaccggcaaccagctcagcagcgactgcagcgatacccccatcatcatggcactggagagaggggtcagggtcatcgagctcgacatgtggccaaattcaaccattgacgacatcaacatcgtgcacggcaggacactgacaaccccagtttctctcatcaaatgcctgagatccatcaagaaacacgcctttgttgcatctccctatcctgtcatcataacacttgaagaccacctcccctctcaactccaggagaaagttgccaagatggttgttgaagtatttggcaacatactgtactacccgccagacgacacccatgagctcaaagaattaccatcacctgaacaactcaaaggacgtgtcctcctctcaacaaagccccccaaggagtacctcgaaaccaagcttagtgactccacgaaggagggtgatgctgacctccatcttggcaaaggaaccggtgatgacgcggtgtggggaaaagaagtaccagattttcggaccgagatccagtctgctgaaaaggacgacgagaacgacgacgttgatgatgaggaagaacaaaaactgcagccccatatagctccacagtataaacaccttattactatcagagcagggaagccaaaagactctctagctgatgccttgaagagtgatccagaaaaagttcggcgtctcagtttgagcgagcaacaacttgccaaagcggcaaaggatcatgccacagaaattgtgagcttcctctgttccaaatccaaataggttcacacagagaaacatactgaggatataccccaagggcactcgagtcacttcatcgaactacaatccgttcgttggttgggtgcatggtgctcaaatggtggcattcaatatgcagggatacgggagagcgctgtggctaatgcacggattttacaaagcgaatggcgggtgcggttatgtgaagaaaccagatttcttgatgcagacagaaccacaagtcttcgacccaagagaaccccagcctgtgaagaaaacgttgaaggtgaaggtgtacatgggcgatgggtggcgaatggacttcaagcagacacacttcgatcagtactctcctccagatttctacacacgggttgggattgctggagtcccagcagactcggtgatgaagaagaccaacgcgatcgaggacaactggaccccggtgtgggagaaggagttcagcttcccgctgactgtcccggagctcgctctgctgcgggtggaggtgcacgagtacgacatgtcggagaaggacgacttcggtggccagacagtgctgccggtgtcggagctgcggcccgggatccgggcggtagcgctcttcgaccgcaaagggatgaagtacaaccatgtgaagcttctcatgcgtttcgagtttgcctagcctgaccctgaccatgcatgcccccccccccccccccccccctcctgttgtgtgaatggatattgcagtctcagtgtgcttcctttgtacatagattgcttggcttggatgatatgtgcaacagacaattccttcagttgttatgatcaaataataaagaggcagcgtccttatgaacaagcgcaaagatgaattgtcaatgcagtatcaacggtccttctgtagtttcagtaaactgacaccttcattgctgctggtgacctgacatatttcagattccacatgagacaactggaggccgaccagacctctcccgggtcccggcgctgaggactgccgcccaggagcagtgaagaaggcaactgtgaagctgcgtgcagcggctgttgggctctattgttagtgatagccctcaagattgggctgtagtttagagaggcgcagcggcctgtagccgcctctgacccgcagcagcgcctccatggctccattgccttctctatcccgactcccgagtcccggcgccatccaggttcgtgtgggggcgggcattcatggcagggcaatctgacccgcacctctccatcttctcgccctccgaggtaaccaaccccttcccttccacactgcactggcagggactatcttcgtctgtgctgctgcaggtggagttcgtggcggaggatgagatcgtcgaaatcgtcctcaacatccgcatggacgcccttaacatgatctacgggggatttcgggcccttcttcccacagattcccaccaaggtgccgctctggctcgccgtggcgctcaagaagcgtagcaagtgcaccatccgcaccccggactggatgactgtattggaagcggaaggagagtcgcctcgggaattccagccattgccattccactatattgaaatttctaaggttctatttgatcatgctggtgatgacatctcagatgcatacctggtgaggtctctaattgaggacatcagagatgtcagattccacaaggttaagaatggattagagacgatatctggacgcacctatgccgtaaagctcaaaaatctctctgcaatggaagtgaacattgtccgcccttttcatggtgagaactttgcaggcattctataagcacgatagtccacagatgattcagcaagcagataatgtagggaccagagcaacactagttacagaccgtggcccccagaataagcttcccttgtagatattgtttcaacttgcttgtggattctcggaggtagttgtccccataaaaaatgtgccctaagaatcttaagatgttgcgcacaaaatagttccatatcagaaagctggtacatatatataattctattctgattggttggtgacccggtacaatttataacagcttaatacattgcactgtatggaccagaaagaaga

SEQ ID NO: 27607 - DNA, 3236 bp, Zea Mays
gtagcagtctctctctcgggccctcggcgtagcagtctgtctgtctctcttcaccctcctcccttcccttcccttcccttctcgcgcctccacaactgcccgcccgcccgcccgcaaacaccatgggcaccacgtacaagtgctgcttcatcttcaagcgccggttccacacccgcgacgcgccgccgcccgaggacgtccgcgcccttttctccgtccacgccggcgggggaccccacatgggcgccgacgatctgcgacgctacctggtggccacgggccaggaggaggccgaggtggagcggctgctggagcagatcgtccagggccgtgcccgcgtcccgcgcctcgcccgcccgctcctctcgctcgacgacttccaccgctacctcttctcgcacgacctcaacccgcccatccgtcacccgcaggtgcaccacgacatgacgcgcccgctctcccactacttcatctacaccggacacaactcctacctcaccggcaaccagctcagcagcgactgcagcgatacccccatcatcatggcactggagagaggggtcagggtcatcgagctcgacatgtggccaaattcaaccattgacgacatcaacatcgtgcacggcaggacactgacaaccccagtttctctcatcaaatgcctgagatccatcaagaaacacgcctttgttgcatctccctatcctgtcatcataacacttgaagaccacctcccctctcaactccaggagaaagttgccaagatggttgttgaagtatttggcaacatactgtactacccgccagacgacacccatgagctcaaagaattaccatcacctgaacaactcaaaggacgtgtcctcctctcaacaaagccccccaaggagtacctcgaaaccaagcttagtgactccacgaaggagggtgatgctgacctccatcttggcaaaggaaccggtgatgacgcggtgtggggaaaagaagtaccagattttcggaccgagatccagtctgctgaaaaggacgacgagaacgacgacgttgatgatgaggaagaacaaaaactgcagccccatatagctccacagtataaacaccttattactatcagagcagggaagccaaaagactctctagctgatgccttgaagagtgatccagaaaaagttcggcgtctcagtttgagcgagcaacaacttgccaaagcggcaaaggatcatgccacagaaattgtgaggttcacacagagaaacatactgaggatataccccaagggcactcgagtcacttcatcgaactacaatccgttcgttggttgggtgcatggtgctcaaatggtggcattcaatatgcagggatacgggagagcgctgtggctaatgcacggattttacaaagcgaatggcgggtgcggttatgtgaaggtgtacatgggcgatgggtggcgaatggacttcaagcagacacacttcgatcagtactctcctccagatttctacacacgggttgggattgctggagtcccagcagactcggtgatgaagaagaccaacgcgatcgaggacaactggaccccggtgtgggagaaggagttcagcttcccgctgactgtcccggagctcgctctgctgcgggtggaggtgcacgagtacgacatgtcggagaaggacgacttcggtggccagacagtgctgccggtgtcggagctgcggcccgggatccgggcggtagcgctcttcgaccgcaaagggatgaagtacaaccatgtgaagcttctcatgcgtttcgagtttgcctagcctgaccctgaccatgcatgcccccccccccccccccccccctcctgttgtgtgaatggatattgcagtctcagtgtgcttcctttgtacatagattgcttggcttggatgatatgtgcaacagacaattccttcagttgttatgatcaaataataaagaggcagcgtccttatgaacaagcgcaaagatgaattgtcaatgcagtatcaacggtccttctgtagtttcagtaaactgacaccttcattgctgctggtgacctgacatatttcagattccacatgagacaactggaggccgaccagacctctcccgggtcccggcgctgaggactgccgcccaggagcagtgaagaaggcaactgtgaagctgcgtgcagcggctgttgggctctattgttagtgatagccctcaagattgggctgtagtttagagaggcgcagcggcctgtagccgcctctgacccgcagcagcgcctccatggctccattgccttctctatcccgactcccgagtcccggcgccatccaggttcgtgtgggggcgggcattcatggcagggcaatctgacccgcacctctccatcttctcgccctccgaggtaaccaaccccttcccttccacactgcactggcagggactatcttcgtctgtgctgctgcaggtggagttcgtggcggaggatgagatcgtcgaaatcgtcctcaacatccgcatggacgcccttaacatgatctacgggggatttcgggcccttcttcccacagattcccaccaaggtgccgctctggctcgccgtggcgctcaagaagcgtagcaagtgcaccatccgcaccccggactggatgactgtattggaagcggaaggagagtcgcctcgggaattccagccattgccattccactatattgaaatttctaaggttctatttgatcatgctggtgatgacatctcagatgcatacctggtgaggtctctaattgaggacatcagagatgtcagattccacaaggttaagaatggattagagacgatatctggacgcacctatgccgtaaagctcaaaaatctctctgcaatggaagtgaacattgtccgcccttttcatggtgagaactttgcaggcattctataagcacgatagtccacagatgattcagcaagcagataatgtagggaccagagcaacactagttacagaccgtggcccccagaataagcttcccttgtagatattgtttcaacttgcttgtggattctcggaggtagttgtccccataaaaaatgtgccctaagaatcttaagatgttgcgcacaaaatagttccatatcagaaagctggtacatatatataattctattctgattggttggtgacccggtacaatttataacagcttaatacattgcactgtatggaccagaaagaaga

SEQ ID NO: 27608 - DNA, 1800 bp, Zea Mays
cttaattgttgcagctgcatgtcatgtctggtcatcgtcatctgtcccctcatttcaaggtactagctggtggcgctagctggtctcacactctcactagatctctctcacatgcatatgcatgcattagcttttccccaccagcatgcactagctgactagcatctgtgtaatcggtgaccgctcttgacttgttagctccccgctcccacggtagctaaagctagctaggtgggtggtagcaccaccatggcctcgcccaagcattcccatcgccatcatcgtgcggcggcgacgaagcatcgtcggccgctggcgctgcggcgtgcgatgctgcattcgtgcgtgtgcttcctggtgggtctcgtgaccggcctggccccttccgactggacggacgccgcctcgcgcgcggccgtgcacgcgaacggcgcggccacggcgcaggtgttccgcgcgctgcacgccatgaaccagacggcggcggcgggggcactgggccagctgctggcgctgcagcactaccagcagcagccagtggtggagaaggagaaggagaaggagaagaagcctctggatctggtggtggtggtgacgactacgacgacgtcgacggggttgtcggagcgcgagcggcggtcggcgggtctgacgcgcacggcgcacgcgctgcgtctggtgtcccctcccctggtgtggctggtggtggaggcggcccgggaggctggtcccacggcacggctgctgcggcgcacgggggtggtgtaccggcacctgacctacgcggagaacttcacatcggaggcctgggaggaggagcggcaccaccagaggaaccaggcgctagcgcacatcgagcggcaccgcctgcgcggcgtcgtcctcttcgcggggctcgccgacgtgtacgacggccgcctcctggagcagctcaggcggcacatcaggacaaggagtgtgggcgcgtgggcagtggcgacagtatgggagcaggagaagagggtggccgtggaagggcccgtcgtcgtctgcaacaccaccaccaccaccaccagcgcagcatccacagcatgtgcatggttctccgcctccgactccacattattggcggcagcggcagcagcagcgcccccagtgacggccgacgactccgtccacggctttgccttcgccagcgacctcctctgggacccttccaggtgggaccgcttccccacatccgagcccgaccagtcgcaggattcgatcaagttcgtgcaaaggttggtgatggcggagtacaacaaaacgagggccatcatccctgcagacgacgattactcctccaaccgttctcaaatcatggtgtggcgtgtcgacacaacgctgctctagctagccctcttgccacgctaagagcgatagataaagatgcatgcatgcttaaaataaacattccatgacttattacatagtaatgccatacacgtacgtatgtatatgtaaacttttgctgcattagaattatatatatagggaaaagaatggcaagcagcagtctgcatcagtcgttgtcgtcgaaatgctcaaggcaacgcatcgcatcgcatcatcctcttgcttgcctgcgtgcaatccttttcttgtccgccctgcattgcatgtccctttttctttttcttcttgtttgccttgtgcggctatctgtcttgcaacccggcctgaagaaaaggaattcgatttcaaaaaaaagatctctataaaaatttagtattagttttaggggcaattccctttatgatatcggaaaatatacttatt

SEQ ID NO: 27609 - DNA, 1248 bp, Zea Mays
tccttcccggcggcacgatcgcccgccccaacggccttcgatccacctactagaagcttccggtctacgtacgtaaatatataatacgatgcgcactgcgtcgccgggctggctcccaccgaattcattccacccccgtctcctccgatcggacggaccaccgggcccagcagcggggcggatcgcgtcagcagccatggtgaaggcctaccccacggtgaacgaggactacctcaaggcggtcgacaaggccaagcgtaagctccgcggcctcatcgccgagaagaattgcgccccgctcatgctccgcctcgcatggcactccgcgggcaccttcgatgtggccaccaaaaccgggggccccttcggcaccatgaagaaccccgccgagcaggcgcacggagccaacgccggactggaaattgccatcaggctgctagagcccatcaaggagcagttccccatcctatcctacgctgacttctaccagcttgctggagtcgtggcagtcgaggtaaccggcggacctgatgtccccttccaccctgggaggcaggacaagcctgagcctccaccggaaggccgccttcctgatgccacccaaggttctgatcacctcaggcaggttttctccacacagatgggtttgagcgaccaggacattgttgcgctttctggtggtcacaccctgggaagatgccacaaggacaggtctggatttgagggagcctggacgtccaaccctttgatctttgacaactcttacttcaaggagcttctgagcggagagaaggaaggccttctgcagctaccaagtgacaaagccctcctctctgatccatccttccgcccacttgttgacaaatacgcagcggacgaggacgctttctttgctgactacgccgaggcccacctgaagctttcagaattgggatttgctgaggcgtaacgaaccagaagagtgtggtggctgtcgccggccggccttgtgtttttgttgtctgcttttctcttgaacgaagatgtgatgaactcagctgaagatgtagtgtgtatgttgtcatggtttatttttctattttatttatctatctataatatctatcggagaaggtttgatatgaagcggaacactgattaacgatgccaatgcctccacatccaaacccgttatgtttttgcatgcagtaaaaataggttcagcttcagcatttggttggcttcttctggtatacttgataagcaatc

SEQ ID NO: 27610 - DNA, 1290 bp, Zea Mays
tccttcccggcggcacgatcgcccgccccaacggccttcgatccacctactagaagcttccggtctacgtacgtaaatatataatacgatgcgcactgcgtcgccgggctggctcccaccgaattcattccacccccgtctcctccgatcggacggaccaccgggcccagcagcggggcggatcgcgtcagcagccatggtgaaggcctaccccacggtgaacgaggactacctcaaggcggtcgacaaggccaagcgtaagctccgcggcctcatcgccgagaagaattgcgccccgctcatgctccgcctcgcatggcactccgcgggcaccttcgatgtggccaccaaaaccgggggccccttcggcaccatgaagaaccccgccgagcaggcgcacggagccaacgccggactggaaattgccatcaggctgctagagcccatcaaggagcagttccccatcctatcctacgctgacttctaccagcttgctggagtcgtggcagtcgaggtaaccggcggacctgatgtccccttccaccctgggaggcaggacaagcctgagcctccaccggaaggccgccttcctgatgccacccaaggttctgatcacctcaggcaggttttctccacacagatgggtttgagcgaccaggacattgttgcgctttctggtggtcacaccctgggaagatgccacaaggacaggtctggatttgagggagcctggacgtccaaccctttgatctttgacaactcttacttcaagaaggccttctgcagctaccaagtgacaaagccctcctctctgatccatccttccgcccacttgttgacaaatacgcagcggacgaggacgctttctttgctgactacgccgaggcccacctgaagctttcagaattgggatttgctgaggcgtaacgaaccagaagagtgtggtggctgtcgccggccggccttgtgtttttgttgtctgcttttctcttgaacgaagatgtgatgaactcagctgaagatgtagtgtgtatgttgtcatggtttatttttctattttatttatctatctataatatctatcggagaaggtttgatatgaagcggaacactgattaacgatgccaatgcctccacatccaaacccgttatgtttttgcatgcaggtgggtttcaagcaacacttataacaagtgtttgaaacatacaccagggtcctttctaatattaattatagtatgccacataattgaaacaattattatagaattaaaattattatttagtcta

SEQ ID NO: 27611 - DNA, 3905 bp, Zea Mays
gcctggtgctgactgctgacagacgcagccgccaccgcccacccacccacagctttgctttgcacgcggtgaaggaaagaacccatctcaccgtctgcctttctcatctcagctaattggaaagagaacttgtcaaccaatatcagcagcggggatcagggaaggaagacgaaggaggggattcgaatccgatccggtcgattgcggagctcggggcgattcatgtcaagaagatgctgcagcgggcggcgagcaacgcctactcgtggtggtgggcgagccacatccggaccacccagtccaaatggctcgacgcaaacctccaggatatggagaatcgagtcaagatcatgctcaaactcctcggacaggaagccgattcctttggcaagagggccgagatgtactaccacaccaggccagaggtgataagccatgtggagcaagtctacagggcttacagagctctcgtcgaacgctatgaccacatatccaaggagctccataaggccaaccacaccatcgctactgcttgtccagaagaggtgcagtatgcaatgttagaagaggaggaccatgatttccccaaagcaatcacaccaatcaagacacacaagtccttggtccaagagattctcaacgcaaagagacaaggtccgtcagggtcaggatggaacaagccaccctcccatccacgcatgagcgccgaggaggcacaagaagagatcggcagacttcagaaatctatacttgttctgcaaaccgagaaagagtatgttaagagttcctatgagagtggtattgctcggtaccgggagatcgagaagcagattgcagatacacagaatgaaatctgccttattcaggatagatttgatgcacatgcagccatcggcgatgatgaagcccgtgccttgatgacaataacagctcttagatcctgtcagggaaccatagctgagcttgtacgtcattttgaggagttgatcaagcttgcagctgtggagttggaaaaaacaaagtctctacgagcacagctgtatgctatgatggatggcgacactgacacatgttcaagagaggcaagcagcacagacacgtcggtggtggcaagatcttacccagttaccaaggcaatacttgagttgcagcccatatatgagaaacttgacaagtttttttccagtgggtctgaatcctctgcggaggagatcgcagagaatgttgatgaacttgttgataaagtcatcaacttggagctcaagttcccaaaacagacagcacagatcaatcaactcatacaagagaatgaaaacctaaagaataaattggatgagttacaagacgagatggcacttcgtgatgaccaaagtgaattaaatgaacagatcaagcaattagaggatgagtttagcacagtccgagttcttgaaagatcaattcttgaggaagaagcctctgtcagcacaggcttttctgaagtttttagctgcataattaatatctcaaaggcacttggatcttttggccctgaagacctgcataatttgtcagctgcggtagaggatggtgcaatggttccaagagacgtgttcctggagcagtctgcagaagagagcaagggtggggacttcagagacatagaggcaccaactctaaggcatagtttgggccaagatagagaagatgtctcggaagtggttagtgataatggtaatgatggcatccatggctcaaggaatgctaatgaggaaataatccctgggagttgcttaatgcaacaagttaggtacaaattgcgtctacattttgatgaccatattgatccgcttttcagttcagaaaatgaaaacatagttcacgattcaggtgagggcaatgttgatagctcatcaggaaaagtatttcagagttcatcagaaactgagaacggaagtagaaacttccctaatggtgaaattatgagaggtgaatatccattgggaatagtcggacagactcatctcctccactcagcagtagtgtaatccaggaggaaggacttggagatagtaaatcacaaaataccagtgggcagattagtccaattgcttcctcagacttgtacaggttaaaggaatacgattccgtagaagaatcctcatttccaaaagctacttgtttcagtggtgctgataagaagagcctgcacatggggcatgcagatgaagcaaaatctgttgaagaatcgccacaccaagttgatcaactaaatgggccacaaaatattgaaagttcgaacgaatgcaaccaagttggattgcttaaagaggatgattgcatttcattagttcatgttgataatgtccatgatatgaagaacatatattcctcagaagtgagggatgaaacttctatctgtgcgccagctggagattatgagcaagttccgacgaattcagagaggaagacttcacatggcagagagcttgcaagcgaagcaactacctcgaacaaccatggaggaaggagtcagggtgtaaagtctggtttgatgggggaggactttgtacctagctggcaagaatttcttcctgatgggcttgaaggtaaagaagcaatactactagctgattgtacttcagttctgcggaactacaaagaaacaaagaggaggcttagcgaactggaaaggagaaaccaggagcatcttgaagagacaaaggcagttatacgggagttaaggaatgcaaattccatgaagtatgttgagatacggtcactaagggatctcctggattcctcagaggtgcctccaagtaaagcaggtggtaactcaaacggattcttaagtttgagatcttttagagaaattgacagatcaattgccactttgggtagagatatttctgccgtggaggaaaacagttctagtaacatcgagacacctaacaacacgtcacttcataaaatgacgaggttcagaaacgacattgacgctttggtggaggaaaatttgcagttcctggtaaggtatagcatggcttgctatcgcatgcaggagtttgacagaaggtaccaggaggcacaggacgaaatggaagataataagtctagagaaccagatactccagcagagcccggacctgctgagaagaagttgagagagctccgaactgaactggatgtatggtttgagcagagcgcgcttctcgatcaagaagtgcagcttaaatctgcgtctctttgcagaatgcaagaggagatagcggaagccctgcgtggtagcctggagatggacagagccaggtttacaccatatgaagctgccaagtttcaaggcgaggtcctaaacatgcagcaatctaccagcaagattgagggcgagatgcaggcagcatcagaacacatgagggggcttcaagccaaagttagccatgctctggaggggctacgtgagagttttgagatttcatcccaacgcttgtcgcggccagagaccgaaagaagccacgagaaacaattcaagcattttccaagtcggacaagggtaccgttgcgaaacttcctgtttggaacaaagcgaaagaaaaaatcaatatttgcgtgcatcaatcccacattccagaaacaattcagcgatctgtgaggtgcgtgagcgtgggtaccatgaccatagttttccttattttgaaaaaaatgacaaaatgaacctggggtagttttgttccccagagtacatgcaagcgcaggttttgtttgaatttagcttgtgtttgtttgtaatggtaatttgttcatttgattgaaataaacagggtaaattatttgataccgttgaaatgtactgtgtgttgcccctgttgtattgggccttgacacatctaactctattactaatatcagtcacaactctggttaaagtt

SEQ ID NO: 27612 - DNA, 321 bp, Zea Mays
taggacattggaaacattgccgactattgtctctattatcaaagcagctagctagctagcattggagttgcaggtagacaaatagctagagcagttcttcgtgaaggacgtttcttccacacagcaaggtgggggctgccatcatcatgcagtccctagtgatgaagatatgatgctcccttacatctcacgaatgctcatggaggacgacgacgacgctgctgacgacaataagctctctcatcaccctgcgctactccagtttggcagtcagtaccagccgattcgatcccaatatgcttggtactgacgggatgaggc

SEQ ID NO: 27613 - DNA, 259 bp, Zea Mays
atcgtgtgtcgtcttgacacgcagcgccgtggctccgtgtccctcaccattcctcgcagcgatgtgctcaccgccgtgtcctgccgtcgtcgtcgcgcgttcgagcactaccgctcgccggagaagcgtcgtcctacgcccaagatcgcgatctgtccctaatcttcgaggaatctacgatcaagatttggtgattccgagatcaagcttctcaagatctacaaggttgaagaccctgagcatctgtttggtgaaggca

SEQ ID NO: 27614 - DNA, 1847 bp, Zea Mays
cccacacatgctccgctgctgcacgactgttgcgcctcctagccccggcgagtgcatccgtgcgcgacaccgagccctaggtagcgccccagccctgcctcctatttccccatcgtgcgctgctactgcatgcccctctccctttggcccctgctcgcccatggccagggcatgccgcaacattgtgctgcccttcctactctcgctgcgagcctccccttcccctagccgagcctccttgctgctgcttccatggtggatggatggaggttgaagaaagagagaaacgtctatgcggttacaggaagaatagggagaaacgccctccacctccccaatcttggccacgtggtggctctcaattgattgggttgttgtcgtttcccgttatgtgatgcgcactaggtcggtggatttttctatgcccacaattccgcggccctttgtgtggcctcgaattagccaatagaactgtgccacgtagtaatgattagggaattattatgtattcgatatattttactccgtaaacccgtttcgagttgtttcagacgcgccaacttcatgacaacatcaattttgtattagtaacgttattttggtatgtcgcatgtcttaagtaattaattatttattcattcgatagtgattaaagaacgactttccaattaaaactaatttatagttctaacttgcgctttacaaatacgtgttaatctgattaatgccaactcaaatattttaattaatactcgcttagtgtatacgcgacatctatttaagtatttctcgtctatcgcacatgttgttccgtgcgcgatggtgtgctggttcatgtgtcgttcgtgtgttgtcgcacgtcaccacacgttgtcttcgcttgtcttgcaggcggaccgtgcgcattaccacgcgtcgtccgcgcgctaaatcgtgtgtggttgtgcatcgtccgcacattgttttcgcacgccacgtcttgtcgtgcttcgttaatttgcctcggttagaatctcatgtgttaattaagctacttatttaactgacagttgttagtgtagcggattaatcgaaactaaataatagttataatttatatttgataatgttgaatcaaatgttataattagcacttgtttagtataaacacgatatttattagtgattctcgcgtgtcgcgagagctgtcatgcacgcttttcgcgcgtcatcgcgcacgttatttcgtgtgtcatctgcacgctctttgtgcgttgtcatcattcattcgctcgtgtgtccgcgcgtcgtttggacgtgccgttcgcgcgttgttcgtgtggtgtcgtgcgctttgttttgcgtggcgcccgcgttctatttcgtgccttaccgagcatcgttcgcttataatcactcatgtgagttaattaattaattatttaatcatccacaattaaaatagtaagttagtcaaagctaaagctaagtagtagttttgatttataattaataaatgtcaattaatataaccatgttgaactaaatgttctaactaatacttgtttagcttaaacgtgataacttctcgaccttagcttcgactatcgcgtttcttatccttgcgtaatcgtagaagcgttctctatttttatactgctcatttttataatattttatattatatggtgtaatgttcttatgcaagtatatgtttgcttgtgcctgtttgtattcgttgcacgtcgcgaatagatcgcgatctgtccctaatcttcgaggaatctacgatcaagatttggtgattccgagatcaagcttctcaagatctacaaggttgaagaccctgagcatctgtttggtgaagg

SEQ ID NO: 27615 - DNA, 1309 bp, Zea Mays
agtgcacaagaggcccctcaagctgccacatcagcaccctcatctgccaagtcagcacagcctgcccaatcgcctccaggcaacagatagccctgatgggcacccatccaatggcagctccgatggccaaatctctgctaggcccacagcatcctccgatcctcattttcatccatttaaactagctcgccttttcctccacaagcccccatcagccatcccctcccgcggcaagtctctctgaattgtgggtctccggcgatggcggctcttgctccatccaagattctgggcaccaagctcaacttcgccggctcctcccgctacgccaccgcagcgcccaccgcgggggctcagaagatcgtctccctcttcagcaagaagcctgcccagaagcccaagccctctgcggtgtcgtcctcttctccggacatcagcgacgagctcgccaagtggtacggtcctgacaggaggatctacctgccggatgggctcttggaccgctcggaggtaccggagtacctcaccggagaggtccctggagactatggctacgacccttttggcctgggcaagaagccagaggacttcgccaagtaccaggcctacgagctgatccatgccagatgggccatgctcggtgccgctggcgctgtcatcccagaggcgtgcaacaagttcggcgctaactgcggccccgaggccgtctggttcaagaccggagccctgctcctcgacggaaacaccctcagctatttcggcaacagcatccccatcaacctggtggtcgccgtgatcgcggagaggacgcccagcctgtgaggacgcgccacaagccggcagcgatgccaagtcatgcgctgctgccgtccttgattttaccggggaaagagctgtgtgtgagggtctgaagtgaagaacgtgccatgcccatgcgtgtacattatcgagagggggaagaaaccttctcattctgatctctgatatgactgctgcttcagattgcgcctgagatatgctaagtttttgaaagctaattagttcgtgcacattaagggtgcgtttgagttggattatttgtgaatgctagcttattttaacttatttgtgattttaaagtgatattttacccctctagtataattcaacgtataggaggaaacaaacgtagcctaagttactttgtggtcaatctaatagagctcctgaattttacttcttaattctccaaaggagtgtttccagagacaagaattaatcgtgaaatgttttatactcagaaaatagtggcttgattttttttgagaga

SEQ ID NO: 27616 - DNA, 1539 bp, Zea Mays
aggatctttagcgttcaccgcttatggtcttgtatttatcccgatacaagtctgttcggcagccatagattttttcacgcttgcctgcgctcgctcgtggctgtcgctccgctcatctatggcggctgccgtcgagctcccttgcgcgctggtcgcctctccctgccccagtccgtctccaagctccagccacgcccctggttctagccatggcactccttcaagctcggttcttctctctgcgcaggatcctctcccatggcgagctgctggcgctgttccctctgcgtccgtcgctctgccctctgctcagattccatcggaccgcgcccctctgctctgttgccgcgagcagccgcgcccagctctactcctctctcccttgccacggagctcctgtgtgcgcgctgttcctgctcgccgagcggttatttgccctgcgcaccgtgctccctgctctctctgtgcggctccccaagtccggtgcccagctgtgctcgcgagtttctcctccgcgcgtcctgcttgctctctgcctgtttccatggcgtcctgttttctgcgcgcgtttctcggcgcccgacttcctctgctcggactgcggcatccctgctcggagctccctgatgccgagcccatctcccagtccatggccgcgcgcagctgcttgtgctttgtgcgcgcgccgtgcttctctgccggtgcccaatcctccctgctcgtgctgtcgtcgaagcttttggatacgcgcgcccagctgaccttcctgtgtcgcgccccgactttgcccaacgccccgtcgagctcctctgtcgagcgccgtggagcctgcgcgctcggttctgtccagttcgcgtactgctcgcctttgcgtcgcgcgcgtagcgttctgttgttcctgcgcgtgctgccgcgaagctcctgttcagttcgccttcgtcgcgtttgtcgtcgagttgttgaacccgtcatctccggctcgatccccacctcaccagctcgctccagacttcaattgaaggtcgtcgtcgatccgtgcgtcatcaagaaattccaagagtcaagtgaagacggagccagcaacgtgatattcactaacggtgtgattggtagcctgttcgatcgagtacgtgcatcagcacacgcagcatcttttactttgaagctgtttggttacctgtgctagattttagaccaggctcaacgtgtgcagggaaaagcctccagccaggctccgcccatacgtagatatctagcgtttcccggcatacaggcccggtagatacatgctaagatgaaccaagctccgatgatacatgaaccaaacacacggtaagtgcgcgacaaaaagctcgagccaggatttatcagcattcgtacgagatttgggtcgcgtttgatgctggtacgtttattgaccacgtgatgcggagaaccaaagctgagtcgacgccaagatgacgtaacgggtggactaattcgcaagatgattgccaagtggacgacttctaacaacactaacctagtgttatccaggca

SEQ ID NO: 27617 - DNA, 1490 bp, Zea Mays
aggatctttagcgttcaccgcttatggtcttgtatttatcccgatacaagtctgttcggcagccatagattttttcacgcttgcctgcgctcgctcgtggctgtcgctccgctcatctatggcggctgccgtcgagctcccttgcgcgctggtcgcctctccctgccccagtccgtctccaagctccagccacgcccctggttctagccatggcactccttcaagctcggttcttctctctgcgcaggatcctctcccatggcgagctgctggcgctgttccctctgcgtccgtcgctctgccctctgctcagattccatcggaccgcgcccctctgctctgttgccgcgagcagccgcgcccagctctactcctctctcccttgccacggagctcctgtgtgcgcgctgttcctgctcgccgagcggttatttgccctgcgcaccgtgctccctgctctctctgtgcggctccccaagtccggtgcccagctgtgctcgcgagtttctcctccgcgcgtcctgcttgctctctgcctgtttccatggcgtcctgttttctgcgcgcgtttctcggcgcccgacttcctctgctcggactgcggcatccctgctcggagctccctgatgccgagcccatctcccagtccatggccgcgcgcagctgcttgtgctttgtgcgcgcgccgtgcttctctgccggtgcccaatcctccctgctcgtgctgtcgtcgaagcttttggatacgcgcgcccagctgaccttcctgtgtcgcgccccgactttgcccaacgccccgtcgagctcctctgtcgagcgccgtggagcctgcgcgctcggttctgtccagttcgcgtactgctcgcctttgcgtcgcgcgcgtagcgttctgttgttcctgcgcgtgctgccgcgaagctcctgttcagttcgccttcgtcgcgtttgtcgtcgagttgttgaacccgtcatctccggctcgatccccacctcaccagctcgctccagacttcaattgaaggtcgtcgtcgatccgtgcgtcatcaagaaattccaagagtcaagtgaagacggagccagcaacgtgatattcactaacggtgtgattggtagcctgttcgatcgagtacgtgcatcagcacacgcagcatcttttactttgaagctgtttggttacctgtgctagattttagaccaggctcaacgtgtgcagggaaaagcctccagccaggctccgcccatacgtagatatctagcgtttcccggcatacaggcccggtagatacatgctaagatgaaccaagctccgatgatacatgaaccaaacacacggtaagtgcgcgacaaaaagctcgagccaggatttatcagcattcgtacgagatttgggtcgcgtttgatgctggtacgtttattgaccacgtgatgcggagaaccaaagctgagtcgacgccaagatgacgtaacgggtggactaattcgtaagatga

SEQ ID NO: 27618 - DNA, 626 bp, Zea Mays
gtctatcatgatgtctgatttaaaaagattgaaaaaaattaaatttcgcacacacaaagttatctacaggagatatgctggactgtttttttcaatatgtgtggacataactgataatgaattggcatacttggaatgcattcacttgtttgtcgagatattggaccatttctttagcaatgtttgtgagctcgatttagtgtttaattttcacaaggtttacctgatactagatgaatttattcttgctggggagctgcaagaaacaagcaaaaaggcaataattgagcgaatgggtgaactggagaagctggaatgacgaagaccaggaagatgctgccgcgtgtgttgtattccaatttgtattattcgtttcaggtgttttacatttgctctcctggttcgttccggctgacagcgtgatgcccatgctgtcactcgaaagaatggtagtagtagctagcatgagtacattataaacgtaccttcgaaaacataataatttcccagcaattatttcgttcccctctgcagtgaaaatgaaaaagacaaaacagcgcgttattcgtgcgactatgtttgcagtgccgaccagctgcagctgcagtgggcctatcaattatagg

SEQ ID NO: 27619 - DNA, 238 bp, Zea Mays
atcaaagctaattcatccatcatcacatcatataatgtcatctctattagaaatataatataaaaatggtacaagtctgttggttaagaacttcggcactagaataaattacgagtttaacactttttcacaagcttcatgtggaatgccatttcatttttcttctccatgttggtttcatgtgttgtttccactctacaagtaacaccaattggcacgttgttagtatacatggtcg

SEQ ID NO: 27620 - DNA, 387 bp, Zea Mays
cgcacgtgctcggcccgctctccactacaagaggtaagaggaggccatgctgcgcacatctgtcggcatgaaggccagtacaaccagcaagacgagcaggcagaccggcagccacaacagcagcgacggcggcggcggcaggggaggcagcaccagcggcagtatcagcagcgagacggtgaggcaggcgagcacgaggaacgccccgatgctgaagtaggtggacgcgatgaccttcttgtcgaggaaatccgcctcctgctgacgctgctgcagatgccgcttcacggcattcctcctttgtattgccgcccctccttccatcgcgctagatcggcttgccatgtgttctttggtgtaggtggaggtggagaccagtcgcagtga

SEQ ID NO: 27621 - DNA, 639 bp, Zea Mays
atggcccagcagcctggctgcgctcccgtgctgcagctcttgtgtttgcgtcgcctggctggctcgagagccaggctgtgcgcgtgcaaattgagtctctcagcctggctccacagaaacgagctcagggttgcaaagaaacatcttgctggaaggattgatcgtgtagattgtagtttagatgaatgccaagtaattacagaagccacaagggaagaggttacaatcatccatggagatctaagtgccttccagaaggaaatggaaacagttcatctcgtagttcgtagtctggagacaaagcttggacgcctagcttatactcaagatcggacaacacgaggaatatatgatttgtgtgaattcactaaaagattggatcagagcccgaaagctgatactcgtcaggttacatcatcaacttctcgtcctgctattgaatcctcagagagaattattagggttgcttctttacccccgactttggaaccagagtctcctagaattgaggcacctaaggttgtgcgctcatctacagtcatgtcagcatcaggtcttagtttgctagctggaactacaataccacctaaaagaagtgaggtcaatacagacatacattggccttggctaaaccaattc

SEQ ID NO: 27622 - DNA, 198 bp, Zea Mays
atgggacaggcattaaatcgtgctttgacgtatggtcagacaaagggatttttttacccagtccacataaatccacttccactgggagtcataacccaggtcgatagggtgctactcggaagccttggcaatcacactaagagccctttcgtggacctccaactagaacttagaaacaataggttgcatgtagattga

SEQ ID NO: 27623 - DNA, 1619 bp, Zea Mays
catccgtctgcgtgtgcgcgctgactcccccctctcccaaaacccccacactcccccttcggcatctccgatatccgttcagcaatgaccatgaacgctgcgatcgcctcccgactcggcctcgccgtctccaggtgtggggctgggtcccgagtggacagccggccgctgacgccggcagtgggtttcacggcggggccgagggcgcgctcagtagccgtcaccgccgcctcctcttctccggcgaccggtggcgtgacgccggtgccaccccgctcgaatcgctcgttgatgatttatcaatggaaccacaagttgaaagagaacttatgcttataaaagtaaatgcagagcgagaaaagttacctgagataatgggtttggttcgcattttcaaagcagaagtggttgatctttcagactacacactaactattgaggtaactggagatcctggaaagatggttgcaatacagaagactctgagcaaatatgggatcagagaaattgctagaactggcaagatagctttgcgccgtgaaaaaatgggagaaactgctccattttggaggttctctgcagcttcttatccggatctcgaagtggcaataccttcaaatttccagcaaaacactggtgtgaaggcaatcaatcagaatccggaagaatcttcagggggtgatgtttatccagtggaatcttatgaaagcttctcatcaacaagtcaaattctggatgctcattggggtgttatgactgatggcgatccaacagggttttgttcacatactctatcaattcttgtgaatgatgtccctggagttctcaatcttgtaacaggtgtattctccagaaggggctacaatattcagagtcttgctgttggcccagctgaaaaagaaggaacttctcgcatcactactgttgttcctggaactgatgaatccattgccaagctagtacatcaactgtacaagctcattgatgtttatgaagttcaggattttacccacttaccatttgctgctagagagttaatgatcataaaggtcgcggcaaatgctacagctcgaagggatgtcttagatattgctcagatttttgaggcacagaaagttgacatatcagaccacacaattacactactgctcaccggagacattgacagaatggttagattgcaaaagatgctagagcagtatggcatctgtgaggttgcacggacaggccggattgctctgctccgagagtctggagttgactccaagtacctccgcgggttttccctcccgctgtaattctccatttccagacattacactgcgcgatttcaggtcgccacggtcattttgacttctgagaatggagctggaggaatcattcaaaaatccaagggtgagaactgtagaaataatagctgttaagtttcttgcttctgcaagtatcacgcagcacatggggagagatgaagtatcatacacaacaatatgtctgcagtcagaaacgatcgatgaggggtccaatatttttttcactacacatgttgtatacgtacactggtagtatcctagttgaaggaaacgcaatatatatatattcactacacatgttgctcaacc

SEQ ID NO: 27624 - DNA, 1235 bp, Zea Mays
tagaaactatgtaactttaaagatgagctgctctactttaaggtttttgaagccgaggtgtagcttttgtgaaggatggcagtgacaaacactctctagctaggtctgaaatgtaaaaaggcttttaggctcctagaattgtagggtcacaactactacttgcactacagctagatgcaaagtgggtaagcaaagcgaaatatgcgttggttcgatttgatcgtttgtttgcctacacatttccattattctctgtttctgttgctatctcatctatatacacacctatctagcacaccgagagacagactgtacgaagcgcaccaatgcatggttcatgtggttgcgcgccatgcatgcagcgttgacagcgacgtttcgcttgccatgtcgaccacgtaccggtcgtccttttttctccttttctattatttctgcgatgggctcgggcttcatcgccaagggcctcaccatcgtgaacagcgccgggccagggaaggggcaggccgtggcgctgcgcgtcggcggcgacctctccgtggtgtaccagtgcgccatccaggcgtaccaggacacgctctacgtgcactccggccgccagttctacgccgacgacgacatcgccggcacggtggacttcatcttcggcaacgccgccgtggtgctccagagctgcgacatccaggcccggaggccgagccccgggcagaaggacacggtgacggcgcagggccgcaccgaccccaaccagaactccggcatctccatccaccgctgcaggatcaccggcgcgccggacctcggcggcacgccggtgtacctgggccgtccgtggcagaggtactcgcggacggtcgtcatggagagcttcctcgaccgctcggtctcgccggccgggtggctcgagtggtcgggccagttcgctctgagcacgttgtactacggggagtacggcaataccgggcctggtgccggaacgagtcggcgagtgacgtggactggggtgcacacgtcactgtccaagtcagatgccgcgaggtttaccgtggcggaattcatcctcggagacgaatggttgggtggcactggagtcaactatatttcaggactgtgaggtgaatgtctcgcctccttgtccgtatatgtgtacgtaattcagtgattttaataataactaaataaaagattcctgggtacgtagttcagctgtaccacactatctaattagtttcctg

SEQ ID NO: 27625 - DNA, 2495 bp, Zea Mays
gtttgcatgttgccatgatgtatggcactgtgagatttgtaatcggaaacctggccggggttttgaaacaacagttgaggtactaccgcgattatgccaaattaaatatgccagtggtacacttgaagaacttttgtacatcgacatgccacgtgagtcccagaatacgtctgggcagattattttggattacacaaaagcaatccaagaaagtgtctttgagcaattgcgtgttgtacgagaggggcatctaaggatagtttttaatccagaccttaagattgcatcttgggagttttgtgctaggcgtcatgaagaacttgttccgcggagatctataataccgcaggttagtaatcttggcgcggctgtacaaaagtaccaggccgccacacaaaattcgacgagtttgtcagctcaggacatgcagaataattgcaactcgtttgttgcatgtgcccgtcaattggccaaggcactggaggttcctttagtaaatgatttaggatacacaaaacgatatgttcgctgccttcagattgccgaggtcgtaaactgtatgaaggatttgattgatcacagcaggcagactggatctggacccattgatagcctgcataacttgccacggaggacaccttcaggggccagcactcttcaaccacagcagcagcaaactgaggagaagcaggccattccccagagttcaaaccagagtggtcaaaattctgctcctatggctggtgtgcagccttctgcctctgccaatggtgatgtgacatcaaatgttactctcagttgtgcaccttctacatctgcgccttcaccatcagttgttgggctcttgcaaaattcaatgaattctagacaagaccatgcaatgagcagcaacaacggtggtccatatagtggaggcaatgtggctattccgaaggtgaactctacaagctcgctgcactcaaacccacctacatctttcccttccccagcaccgacaacgtccaataatagcatgatgcccgctcctcaaaatacaaatcaactaagctccccaacgacatcaccaagcatacctccgatgcagccacctgctgctcggcctcaggaggccgagccaagtgactcgcaaagctcggttcagaagatcttgcaagacctgatgtcgtcgcagatgaatggtgttggccactcggggaatgacacgaagacaccgaacggactaacccatggtgctaatggggttaactgcttactcggcaatgctgccgcgaataactcggggataggaggaatgggatttggcgccatgagcgggttcggtcatgggatgaggacggcaatggcgaacaatccgatggcgatgggtgcaaggatgggaatgaaccacggtgcacacgacctatcgcagctgggtcagctacagcaccagcagcaacatcagcagcagcatgacataggaagccagctgctgggcggatttagatcagggaacagcttcaataacatgcagtatgactggaaaccctcacaatagagcgagcgaccagaaaccataagagtgcagtgtgacggtgcatctgcccttgctggcaacgcgtgtggagcatttatggtgccatagtctcccctttgggcttccgcattaatgctgccgtgaaagggtaccataagcgatagcgtgcgtcccggctggtacatgcaaagtctgtaactgtcagtttgccaatctcttcttgatctactcccctgagttttacaacattttgccgattctttactgggagttgcaattccaccatgtgccacatcctttgtccactcttcacccatttaatgctgtgaaaaaaaggttcaagtagttgtagcatggtataacaggtgtgtgtgtgggaattccatattagctcttagggcatgtacagtggtgtttaatgtggaggctcttaagctgtttaaggggtgtatttgcaaaaaaatcttagagccgtctctccgtgaagagacgcctctggctcgtaaaccaagtagtaatagacgtctcacttcctactgtacgaatttgtcgtctgttctatcaatctgctgttgtacaaatacatttaattctgtatttattagtagactacatttatagacactccattgtataatagagtctcttagttgtctcttgtgcttggagaactgttttggtgtctctccactgtacatgcccttagatttagtgtttccttcgtcattgacatgctgtggaacggagagccagaattacaggactggctgccagctgggtgcccgtcacttgttgcttgcttcagttatctttgggaaaagatactctgaaagaattaggagttgtccctcgcctttttttttcccttgctggataacttgtaccttatcctctgtaatttaccatggctctcaggaacatatgtgccatttggtggttcacatattggtaacataaggggtaatcgataacgttaaattat

SEQ ID NO: 27626 - DNA, 3729 bp, Zea Mays
accaagatgatgccgtcgggtccgccgaacccgatggggcacgggcagccagtgggcggcgctgccccgtcgctactccggacgagttcttccctgctcagtggcggtggtcagccgggtatgggcggaggtggtggtggcatgctttcttcacagtcgcccttctcttcccttgtctccccacgcacacagtttggtggcaacggtcttctgggaggtgcctctctgctgaaccggccgccattcgggaatggtggccctatgccaggtccagggtcaatgcaggctgttgggatgcagatgagtacactccagcagagagctgggctggatggtgccagcgatttcattagcgcggaagggtcggatcctctatcattcccgtcttcttcacaggtcaatttgggcaatcagatgggatcagataatctgcaggcgacttcgcagcagcagcagcagcagatggatgccatgcaggatatgcaacagcagctaccaatgtcttacaaccagcaacagttgccaccacaacactcgcagcagctccagcagccacaggctacagtcaagttagagaatggaggaagcatgattagcatcaaaccagagcagcagatggcacaacctgaccagatgatgcgaagtgctagtggtgtgaaacttgagccacagcagctgcaagcccagatgatgagaagtttaagttcagtcaagatggagcaacagacttctgattcatcagcattcctgcagcagcagcaacaacaacaacatttgttgcagctgacaaaacagattcgaaattgtccggagcttgtatcaataggtggaccaaatgcaattgcaaaccctcaagctgccacagctgctcaactgaccctcttgcagcagcaacggcttctgcatatgcaacagcagcagcaacaacagattctaaagaacttacctttgcagagaaaccagttgcagcaacagcagcagcatcaacagcagcagcagttacttcgtcaacagagtctaaacatgagaactccaggaaagtcgtctccttatgagccaggaacctgtgcaaagagattgactcattacatgtatcatcaacaaaacagaccacaagataacaacattgaatactggagaaactttgtcaatgagtattttgctccaaacgctaaaaagaggtggtgtgtctcgctttatggaagtggtcgtcaaactactggagttttccctcagctcttctctttcaggatgtatggcactgtgagatttgtaatcggaaacctggccggggttttgaaacaacagttgaggtactaccgcgattatgccaaattaaatatgccagtggtacacttgaagaacttttgtacatcgacatgccacgtgagtcccagaatacgtctgggcagattattttggattacacaaaagcaatccaagaaagtgtctttgagcaattgcgtgttgtacgagaggggcatctaaggatagtttttaatccagaccttaagattgcatcttgggagttttgtgctaggcgtcatgaagaacttgttccgcggagatctataataccgcaggttagtaatcttggcgcggctgtacaaaagtaccaggccgccacacaaaattcgacgagtttgtcagctcaggacatgcagaataattgcaactcgtttgttgcatgtgcccgtcaattggccaaggcactggaggttcctttagtaaatgatttaggatacacaaaacgatatgttcgctgccttcagattgccgaggtcgtaaactgtatgaaggatttgattgatcacagcaggcagactggatctggacccattgatagcctgcataacttgccacggaggacaccttcaggggccagcactcttcaaccacagcagcagcaaactgaggagaagcaggccattccccagagttcaaaccagagtggtcaaaattctgctcctatggctggtgtgcagccttctgcctctgccaatggtgatgtgacatcaaatgttactctcagttgtgcaccttctacatctgcgccttcaccatcagttgttgggctcttgcaaaattcaatgaattctagacaagaccatgcaatgagcagcaacaacggtggtccatatagtggaggcaatgtggctattccgaaggtgaactctacaagctcgctgcactcaaacccacctacatctttcccttccccagcaccgacaacgtccaataatagcatgatgcccgctcctcaaaatacaaatcaactaagctccccaacgacatcaccaagcatacctccgatgcagccacctgctgctcggcctcaggaggccgagccaagtgactcgcaaagctcggttcagaagatcttgcaagacctgatgtcgtcgcagatgaatggtgttggccactcggggaatgacacgaagacaccgaacggactaacccatggtgctaatggggttaactgcttactcggcaatgctgccgcgaataactcggggataggaggaatgggatttggcgccatgagcgggttcggtcatgggatgaggacggcaatggcgaacaatccgatggcgatgggtgcaaggatgggaatgaaccacggtgcacacgacctatcgcagctgggtcagctacagcaccagcagcaacatcagcagcagcatgacataggaagccagctgctgggcggatttagatcagggaacagcttcaataacatgcagtatgactggaaaccctcacaatagagcgagcgaccagaaaccataagagtgcagtgtgacggtgcatctgcccttgctggcaacgcgtgtggagcatttatggtgccatagtctcccctttgggcttccgcattaatgctgccgtgaaagggtaccataagcgatagcgtgcgtcccggctggtacatgcaaagtctgtaactgtcagtttgccaatctcttcttgatctactcccctgagttttacaacattttgccgattctttactgggagttgcaattccaccatgtgccacatcctttgtccactcttcacccatttaatgctgtgaaaaaaaggttcaagtagttgtagcatggtataacaggtgtgtgtgtgggaattccatattagctcttagggcatgtacagtggtgtttaatgtggaggctcttaagctgtttaaggggtgtatttgcaaaaaaatcttagagccgtctctccgtgaagagacgcctctggctcgtaaaccaagtagtaatagacgtctcacttcctactgtacgaatttgtcgtctgttctatcaatctgctgttgtacaaatacatttaattctgtatttattagtagactacatttatagacactccattgtataatagagtctcttagttgtctcttgtgcttggagaactgttttggtgtctctccactgtacatgcccttagatttagtgtttccttcgtcattgacatgctgtggaacggagagccagaattacaggactggctgccagctgggtgcccgtcacttgttgcttgcttcagttatctttgggaaaagatactctgaaagaattaggagttgtccctcgcctttttttttcccttgctggataacttgtaccttatcctctgtaatttaccatggctctcaggaacatatgtgccatttggtggttcacatattggtaacataaggggtaatcgataacgttaaattat

SEQ ID NO: 27627 - DNA, 3883 bp, Zea Mays
ctagattcccgcggatctcgcgggcgtgcttgggggtggggtgaaacgatgcccaggtgagtacatgccgcgcgcgatcttctagtggttggtgcgagtggtggacgaccaagatgatgccgtcgggtccgccgaacccgatggggcacgggcagccagtgggcggcgctgccccgtcgctactccggacgagttcttccctgctcagtggcggtggtcagccgggtatgggcggaggtggtggtggcatgctttcttcacagtcgcccttctcttcccttgtctccccacgcacacagtttggtggcaacggtcttctgggaggtgcctctctgctgaaccggccgccattcgggaatggtggccctatgccaggtccagggtcaatgcaggctgttgggatgcagatgagtacactccagcagagagctgggctggatggtgccagcgatttcattagcgcggaagggtcggatcctctatcattcccgtcttcttcacaggtcaatttgggcaatcagatgggatcagataatctgcaggcgacttcgcagcagcagcagcagcagatggatgccatgcaggatatgcaacagcagctaccaatgtcttacaaccagcaacagttgccaccacaacactcgcagcagctccagcagccacaggctacagtcaagttagagaatggaggaagcatgattagcatcaaaccagagcagcagatggcacaacctgaccagatgatgcgaagtgctagtggtgtgaaacttgagccacagcagctgcaagcccagatgatgagaagtttaagttcagtcaagatggagcaacagacttctgattcatcagcattcctgcagcagcagcaacaacaacaacatttgttgcagctgacaaaacagattcgaaattgtccggagcttgtatcaataggtggaccaaatgcaattgcaaaccctcaagctgccacagctgctcaactgaccctcttgcagcagcaacggcttctgcatatgcaacagcagcagcaacaacagattctaaagaacttacctttgcagagaaaccagttgcagcaacagcagcagcatcaacagcagcagcagttacttcgtcaacagagtctaaacatgagaactccaggaaagtcgtctccttatgagccaggaacctgtgcaaagagattgactcattacatgtatcatcaacaaaacagaccacaagtaagtttttttattgatagagcacttttgtgttccgaagaccaggtactaacaacatagcatatcttacctgttgctctgatgcaggataacaacattgaatactggagaaactttgtcaatgagtattttgctccaaacgctaaaaagaggtggtgtgtctcgctttatggaagtggtcgtcaaactactggagttttccctcaggatgtatggcactgtgagatttgtaatcggaaacctggccggggttttgaaacaacagttgaggtactaccgcgattatgccaaattaaatatgccagtggtacacttgaagaacttttgtacatcgacatgccacgtgagtcccagaatacgtctgggcagattattttggattacacaaaagcaatccaagaaagtgtctttgagcaattgcgtgttgtacgagaggggcatctaaggatagtttttaatccagaccttaaggcgtcatgaagaacttgttccgcggagatctataataccgcaggttagtaatcttggcgcggctgtacaaaagtaccaggccgccacacaaaattcgacgagtttgtcagctcaggacatgcagaataattgcaactcgtttgttgcatgtgcccgtcaattggccaaggcactggaggttcctttagtaaatgatttaggatacacaaaacgatatgttcgctgccttcagattgccgaggtcgtaaactgtatgaaggatttgattgatcacagcaggcagactggatctggacccattgatagcctgcataacttgccacggaggacaccttcaggggccagcactcttcaaccacagcagcagcaaactgaggagaagcaggccattccccagagttcaaaccagagtggtcaaaattctgctcctatggctggtgtgcagccttctgcctctgccaatggtgatgtgacatcaaatgttactctcagttgtgcaccttctacatctgcgccttcaccatcagttgttgggctcttgcaaaattcaatgaattctagacaagaccatgcaatgagcagcaacaacggtggtccatatagtggaggcaatgtggctattccgaaggtgaactctacaagctcgctgcactcaaacccacctacatctttcccttccccagcaccgacaacgtccaataatagcatgatgcccgctcctcaaaatacaaatcaactaagctccccaacgacatcaccaagcatacctccgatgcagccacctgctgctcggcctcaggaggccgagccaagtgactcgcaaagctcggttcagaagatcttgcaagacctgatgtcgtcgcagatgaatggtgttggccactcggggaatgacacgaagacaccgaacggactaacccatggtgctaatggggttaactgcttactcggcaatgctgccgcgaataactcggggataggaggaatgggatttggcgccatgagcgggttcggtcatgggatgaggacggcaatggcgaacaatccgatggcgatgggtgcaaggatgggaatgaaccacggtgcacacgacctatcgcagctgggtcagctacagcaccagcagcaacatcagcagcagcatgacataggaagccagctgctgggcggatttagatcagggaacagcttcaataacatgcagtatgactggaaaccctcacaatagagcgagcgaccagaaaccataagagtgcagtgtgacggtgcatctgcccttgctggcaacgcgtgtggagcatttatggtgccatagtctcccctttgggcttccgcattaatgctgccgtgaaagggtaccataagcgatagcgtgcgtcccggctggtacatgcaaagtctgtaactgtcagtttgccaatctcttcttgatctactcccctgagttttacaacattttgccgattctttactgggagttgcaattccaccatgtgccacatcctttgtccactcttcacccatttaatgctgtgaaaaaaaggttcaagtagttgtagcatggtataacaggtgtgtgtgtgggaattccatattagctcttagggcatgtacagtggtgtttaatgtggaggctcttaagctgtttaaggggtgtatttgcaaaaaaatcttagagccgtctctccgtgaagagacgcctctggctcgtaaaccaagtagtaatagacgtctcacttcctactgtacgaatttgtcgtctgttctatcaatctgctgttgtacaaatacatttaattctgtatttattagtagactacatttatagacactccattgtataatagagtctcttagttgtctcttgtgcttggagaactgttttggtgtctctccactgtacatgcccttagatttagtgtttccttcgtcattgacatgctgtggaacggagagccagaattacaggactggctgccagctgggtgcccgtcacttgttgcttgcttcagttatctttgggaaaagatactctgaaagaattaggagttgtccctcgcctttttttttcccttgctggataacttgtaccttatcctctgtaatttaccatggctctcaggaacatatgtgccatttggtggttcacatattggtaacataaggggtaatcgataacgttaaattat

SEQ ID NO: 27628 - DNA, 4184 bp, Zea Mays
gtcgctgcgttttctcccatcatcatctctctccctctcgtcttcctctctcctctcggcgcttcgggccttcggcgcctccccctcctcttcgctttcctccctcccccacacagagtgacagcgcgcaccaaaccaaatcccatcgcgagataacaaaaccaggccaacggattcttttggctgcggtggcgttgccggtgccggtggtgcagcagctgctgttggtgccctgtcgctgtgccgccgccgaggtcggctcgcgtgtccggcggcctaaaccctagccggcgctggagccgctgaggcgggcgccctgcagcacccctcgtctgtctcggccaggtgcgcgcccggccgcgccgctcgaatcgccggattcgagcttcggcgcgacgtggaacgggccggcgccgcggaggggatgctcccccgtcccttctagattcccgcggatctcgcgggcgtgcttgggggtggggtgaaacgatgcccaggtgagtacatgccgcgcgcgatcttctagtggttggtgcgagtggtggacgaccaagatgatgccgtcgggtccgccgaacccgatggggcacgggcagccagtgggcggcgctgccccgtcgctactccggacgagttcttccctgctcagtggcggtggtcagccgggtatgggcggaggtggtggtggcatgctttcttcacagtcgcccttctcttcccttgtctccccacgcacacagtttggtggcaacggtcttctgggaggtgcctctctgctgaaccggccgccattcgggaatggtggccctatgccaggtccagggtcaatgcaggctgttgggatgcagatgagtacactccagcagagagctgggctggatggtgccagcgatttcattagcgcggaagggtcggatcctctatcattcccgtcttcttcacaggtcaatttgggcaatcagatgggatcagataatctgcaggcgacttcgcagcagcagcagcagcagatggatgccatgcaggatatgcaacagcagctaccaatgtcttacaaccagcaacagttgccaccacaacactcgcagcagctccagcagccacaggctacagtcaagttagagaatggaggaagcatgattagcatcaaaccagagcagcagatggcacaacctgaccagatgatgcgaagtgctagtggtgtgaaacttgagccacagcagctgcaagcccagatgatgagaagtttaagttcagtcaagatggagcaacagacttctgattcatcagcattcctgcagcagcagcaacaacaacaacatttgttgcagctgacaaaacagattcgaaattgtccggagcttgtatcaataggtggaccaaatgcaattgcaaaccctcaagctgccacagctgctcaactgaccctcttgcagcagcaacggcttctgcatatgcaacagcagcagcaacaacagattctaaagaacttacctttgcagagaaaccagttgcagcaacagcagcagcatcaacagcagcagcagttacttcgtcaacagagtctaaacatgagaactccaggaaagtcgtctccttatgagccaggaacctgtgcaaagagattgactcattacatgtatcatcaacaaaacagaccacaagataacaacattgaatactggagaaactttgtcaatgagtattttgctccaaacgctaaaaagaggtggtgtgtctcgctttatggaagtggtcgtcaaactactggagttttccctcaggatgtatggcactgtgagatttgtaatcggaaacctggccggggttttgaaacaacagttgaggtactaccgcgattatgccaaattaaatatgccagtggtacacttgaagaacttttgtacatcgacatgccacgtgagtcccagaatacgtctgggcagattattttggattacacaaaagcaatccaagaaagtgtctttgagcaattgcgtgttgtacgagaggggcatctaaggatagtttttaatccagaccttaagattgcatcttgggagttttgtgctaggcgtcatgaagaacttgttccgcggagatctataataccgcaggttagtaatcttggcgcggctgtacaaaagtaccaggccgccacacaaaattcgacgagtttgtcagctcaggacatgcagaataattgcaactcgtttgttgcatgtgcccgtcaattggccaaggcactggaggttcctttagtaaatgatttaggatacacaaaacgatatgttcgctgccttcagattgccgaggtcgtaaactgtatgaaggatttgattgatcacagcaggcagactggatctggacccattgatagcctgcataacttgccacggaggacaccttcaggggccagcactcttcaaccacagcagcagcaaactgaggagaagcaggccattccccagagttcaaaccagagtgttgtgcaccttctacatctgcgccttcaccatcagttgttgggctcttgcaaaattcaatgaattctagacaagaccatgcaatgagcagcaacaacggtggtccatatagtggaggcaatgtggctattccgaaggtgaactctacaagctcgctgcactcaaacccacctacatctttcccttccccagcaccgacaacgtccaataatagcatgatgcccgctcctcaaaatacaaatcaactaagctccccaacgacatcaccaagcatacctccgatgcagccacctgctgctcggcctcaggaggccgagccaagtgactcgcaaagctcggttcagaagatcttgcaagacctgatgtcgtcgcagatgaatggtgttggccactcggggaatgacacgaagacaccgaacggactaacccatggtgctaatggggttaactgcttactcggcaatgctgccgcgaataactcggggataggaggaatgggatttggcgccatgagcgggttcggtcatgggatgaggacggcaatggcgaacaatccgatggcgatgggtgcaaggatgggaatgaaccacggtgcacacgacctatcgcagctgggtcagctacagcaccagcagcaacatcagcagcagcatgacataggaagccagctgctgggcggatttagatcagggaacagcttcaataacatgcagtatgactggaaaccctcacaatagagcgagcgaccagaaaccataagagtgcagtgtgacggtgcatctgcccttgctggcaacgcgtgtggagcatttatggtgccatagtctcccctttgggcttccgcattaatgctgccgtgaaagggtaccataagcgatagcgtgcgtcccggctggtacatgcaaagtctgtaactgtcagtttgccaatctcttcttgatctactcccctgagttttacaacattttgccgattctttactgggagttgcaattccaccatgtgccacatcctttgtccactcttcacccatttaatgctgtgaaaaaaaggttcaagtagttgtagcatggtataacaggtgtgtgtgtgggaattccatattagctcttagggcatgtacagtggtgtttaatgtggaggctcttaagctgtttaaggggtgtatttgcaaaaaaatcttagagccgtctctccgtgaagagacgcctctggctcgtaaaccaagtagtaatagacgtctcacttcctactgtacgaatttgtcgtctgttctatcaatctgctgttgtacaaatacatttaattctgtatttattagtagactacatttatagacactccattgtataatagagtctcttagttgtctcttgtgcttggagaactgttttggtgtctctccactgtacatgcccttagatttagtgtttccttcgtcattgacatgctgtggaacggagagccagaattacaggactggctgccagctgggtgcccgtcacttgttgcttgcttcagttatctttgggaaaagatactctgaaagaattaggagttgtccctcgcctttttttttcccttgctggataacttgtaccttatcctctgtaatttaccatggctctcaggaacatatgtgccatttggtggttcacatattggtaacataaggggtaatcgataacgttaaattat

SEQ ID NO: 27629 - DNA, 1396 bp, Zea Mays
ccgacgcatgcaactatctcaatcgtcgtcgtcgtctatttatccaccgcaccgcgcgccgaggcgtcaccgtcgacacgtatgtaccagccctgtgcatgctgggccgccacgcttagcactcgcaggtcacagcacaggcagcgcctcgctctcaccaaccgcgccgcccgcggccgctacaaatagtaccctcagcgcgcgcccagcacggcacgccggcgtcgatcgcaccacgcacgttactatcatcactcgaccaaactaacaacagctcaggctgaaacagcgatgacgacgacgacgacaacgctgccgacggggcgcgccgtggccctgctgctgctcctgctggccacgacggcgacggaggccgcgaacccgtgcaacccggcgcagctgacgccgtgcgcggggccggcgctgttcggcggcgcggtgccgccggcgtgctgcgcgcagctgcgggcgcagcaggggtgcctgtgcgggtacgcgcgcagccccaactacgggagctacatccgcagccccaacgcggcgaggctcttcgccatctgcaacctgcccatgccgcgctgccgttattagcgggcagtagtatatatactagctagctattccaatacaatcatgctcagtcgttggtatatcgtacgtactcatgtgaagcatgcggtgcacaccatggatcatgtaggacgttctgttacatgaataaaatccaggacgtctgagtttgtgcggcaatgtaggtgtgtagggatggatatatagttcgcgaatcaatacccgcaaaacaaaactcaactcatatccgtatccataaacgttcgtgggtatggatctctacttatatccgtatccgccgggtattcgcaattcgacggatatccgttatccgcccgcccactacaattttagcattcaacatcaaacaataattttatcacatttcaaaaacaattatcatttcaacaacattaaatgaaaatttcaacatcaagcaacatgtcatggataaaaattgaaaaataaaaatttaggataatatattaaatctggatggctcatatgtcatatatccattgggtaacgaatatggatactggatatctatacccggaaaaaattattcacggataccttattatatataaccatacccgtggataccaaattccaccatactcatatccaatggataattgtccacggttatttactcgtacccattgccatctctagttccgtgacatgaatatattacttctatatgacaggagtaatatataagaagtcatatgatattattgatccataaccacaccattctttctcaaatttaagatggttaagactttggatcatgtctgctgtcagaaatggaaagttt

SEQ ID NO: 27630 - DNA, 1715 bp, Zea Mays
gtgctcaactccgcatcctgcaaggattccttgttctcaatctggttagacagcaaactgagactacaaactgatcctatccttatcctagagtattttctctggcggcatggttatgaatatgctatttccaatcactatgatcgccattgtgtttgggaggaagtagcacaaaataaaaagctgaacaagttcaaccacacaataattgaccagcaatttgagttttatcaagcggatggactgacaaggttcaacccatcggatcccagcaggcttctaccaagctatgtccctgaaggctcttttatcgcaagagagcacacaccgatgtccaacttattttcctgcctgtggtacaatgaagttgatcgattcacacctcgtgaccagctcagctttgcatatacatacttaaaactgagaaggacaaatcctgacagaccattccgtctcaatatgtttaaggattgtgagagacgatcaatagcgaagctattccatcaccggacagaagagagacacaacagtgcacaattaacaagatgacacatccttcctagtgatggagggcagaagagagaggtcagggattgtattctttgatatagttcagctatccacaagactctccattgaaactttatgcccctgtctaggagtttgtactttatataatgcaagccttctttcctttgtcactccagtcctgcaggccagttcccgcctaacatttttttgcagttgacaaggcggattaggagtttctaactgtttggtttttctttgttctccgtaaatctctgtttattcttttgataatatggcccatggatgatctggggaagctatgagtgatcatggacttttcccagattgcccatgcacaatgtattattaccacaccactgtaggactgtgtagtgaggccattgttctcctgcaattctgactgaaatgtaccatacacaactagtaaattactcaccccttacgcgagtctttgatcgatgtatttacacagttaaaagaatattgcttaagcatatagaaacaataatatatggatacatgtaaacagaagtgatagaattatcttaaacagtagtagaatggttcagtctagaaatataacaacataagcaggatatatgttatattacatcggtactgcttgtagagattgagtgactataaacatgcacaaaagcaacaaaatattgatcttaaagatcaaagaataatgaggcgcttgaagaaagtttgcaatgagtttttcaagctacgcattgagaatgaatcaggcatatgtacatttttttagacattaaaggccacaaagtatagataaatagaacagacgaccatgtttaatctttatggagtttattgttctcccttccgatatatagtgttcctttcttcagcttatatgtgttgtgtaaagtaataaatattgttcaacatgccaacatagttgcatcgtgtattttaatacattagatttttatgagatcgtattataacttgagtaaattctattcatgcgactaaaggttttacatatgggcatgaaatagaaggcatatgtttaggaatataaccttagtgttggtcttcgacgggtctaggaaaaaaacaaaatggtaattataagaacatttttttattagtcacttatttttttttacgtaaagcataatgaacaattatgg

SEQ ID NO: 27631 - DNA, 1726 bp, Zea Mays
cttgagatgtcagcttatcactgttactgttatcactttccaggttctcaatctggttagacagcaaactgagactacaaactgatcctatccttatcctagagtattttctctggcggcatggttatgaatatgctatttccaatcactatgatcgccattgtgtttgggaggaagtagcacaaaataaaaagctgaacaagttcaaccacacaataattgaccagcaatttgagttttatcaagcggatggactgacaaggttcaacccatcggatcccagcaggcttctaccaagctatgtccctgaaggctcttttatcgcaagagagcacacaccgatgtccaacttattttcctgcctgtggtacaatgaagttgatcgattcacacctcgtgaccagctcagctttgcatatacatacttaaaactgagaaggacaaatcctgacagaccattccgtctcaatatgtttaaggattgtgagagacgatcaatagcgaagctattccatcaccggacagaagagagacacaacagtgcacaattaacaagatgacacatccttcctagtgatggagggcagaagagagaggtcagggattgtattctttgatatagttcagctatccacaagactctccattgaaactttatgcccctgtctaggagtttgtactttatataatgcaagccttctttcctttgtcactccagtcctgcaggccagttcccgcctaacatttttttgcagttgacaaggcggattaggagtttctaactgtttggtttttctttgttctccgtaaatctctgtttattcttttgataatatggcccatggatgatctggggaagctatgagtgatcatggacttttcccagattgcccatgcacaatgtattattaccacaccactgtaggactgtgtagtgaggccattgttctcctgcaattctgactgaaatgtaccatacacaactagtaaattactcaccccttacgcgagtctttgatcgatgtatttacacagttaaaagaatattgcttaagcatatagaaacaataatatatggatacatgtaaacagaagtgatagaattatcttaaacagtagtagaatggttcagtctagaaatataacaacataagcaggatatatgttatattacatcggtactgcttgtagagattgagtgactataaacatgcacaaaagcaacaaaatattgatcttaaagatcaaagaataatgaggcgcttgaagaaagtttgcaatgagtttttcaagctacgcattgagaatgaatcaggcatatgtacatttttttagacattaaaggccacaaagtatagataaatagaacagacgaccatgtttaatctttatggagtttattgttctcccttccgatatatagtgttcctttcttcagcttatatgtgttgtgtaaagtaataaatattgttcaacatgccaacatagttgcatcgtgtattttaatacattagatttttatgagatcgtattataacttgagtaaattctattcatgcgactaaaggttttacatatgggcatgaaatagaaggcatatgtttaggaatataaccttagtgttggtcttcgacgggtctaggaaaaaaacaaaatggtaattataagaacatttttttattagtcacttatttttttttacgtaaagcataatgaacaattatgg

SEQ ID NO: 27632 - DNA, 720 bp, Zea Mays
gtcacctacgttctgggcccgcggatcagaccttctcccaccagggttgttacaaccaacactgccatatgcggcggcgctctggctctccacccggggatttcggcctcacgtcgcacgcctcgcctggagtctggattcgtgggctatacaagccaatcgtgcgcacatttcttcttccccaaccacagacgtgaaccaaagctgcgctgccaagaaccgtcagtcgtcgtgagagggggaaaccagctcattgtggcagaatcttgcgtctgcgggccgatagccagccggggagctcaagcagggtcgcgcgggtgcccagacggtgtggaggtcgtcggtgggggaaacccggatcgtgcttgggtggcaatcgctcgccggagacatcatcccgcgccgtgggatcgcccctggaggagacgaaattcctacgccaatccctctcgatgagtcagtggccgagaattcaggtgttcagcaggtagaagttgctgagcaggagctcattgaaggagaagaatatgtggtccaagaggtgccatataatgaggagtacgagctcatctaggtgacgtctcgcagtcagcttgatggtgccaaggaataatatatagtttgctttattgttatcatttgtttttgtaagacttccgctatgtaataatgatacttgtgccatttatctctatacactttatcattatatttgatgtt

SEQ ID NO: 27633 - DNA, 282 bp, Zea Mays
atttatattcatacaatgatgatcgtcatttgttggtacccatagaaggttttttttcacgtgaacatgctaattattgcagaacttacaatttcctcctctcatcgatcttcctctctgatatatattagcaggcgtagccaagggacatagatatatacatccatttattacgccattacatcaactgtagcacgtcgtctttttaccactccattaagcattattattactggtcacgcgatttggttcagcttctgggacgacaaggtttctatcgca

SEQ ID NO: 27634 - DNA, 1438 bp, Zea Mays
caaatccaaagttcgacgaaaagggaccaatgtcgatcgccataaaagccgtctatctcgatctggacggtacaaaaccctgcacgcctccccatccacctgtcactcttaccgccagccccacatcacggagcatcccccttaataacagcaaactaccacacccatgtccacctccgtctccgccgccgccgttgccgctctcgtcccacccctcaccggccgccggtcgccgccggcatctcgcgtaccgcagatttgccgcagaagaatcagatccaaaccccgtatcttctcttcttccccctccttccccattgtccccgccgctgccatggccaccggcggcgccgcccccaccgcctccgatgccgggtccaagaagaagttgctcatcttagactccgaggaggatctcgcggtttctcttgcgaagtacactgcggagctgtcggagaagttcgcggccgagaggggtgccttcaccgccgtgctctctggcggatccctcatcgaggcactcaggaagctgacggagccgccgtacctggattcagtggactggagcaagtggcacgtcttctgggtggatgagagggtcgtgcccaaggaccatgtggatagcaactacaagctcgcctatgatgggtttctctccaaggtgccgattcctcctggacaagtttatgctataaacgatgcgttgtcagctgaaggagcggcagacgactacgaagcgtgcctgaagcagcttgtcaagaacggtgtgatttctatgtcagcggcgactggatttcccaggtttgatctccagcttctgggaatgggacctgatggccacattgcgtctctcttccctggccaccctcttgttaacgagaaagagagtaatcaactcatccgcatacgttgcgatggtggtgactggagctggaaaggcggcagcggtgcagaaggcgctctcagacaagcaaacctcgtcagacctgctgcctgttgagatggctgtgctacaagatggagaattcacctggttcactgataaggcagcggtgtccttgctgcagaacaagtagagtctccatggtaaccttggctcggctcgaagccattttagctcataaaataaaagatccatgggcctgcgtgcatagctgcattcgtcctccaggatttcgtgtaacggagactcgatccttttatgtgtattgttcggagtaatgttcaaaaactctattgtcttccggcttttctgaaacattgctcggtaagtgtttggtttagtacatggttcgctgttccgcgctagacgcatggataggaaatgtggctgcattgaattcttccaggcttgtcgatcctggcatgttccagtttccagtggttttcagtgctcgtgccatctcagatatgaagagtggtctgcattcccggtgat

SEQ ID NO: 27635 - DNA, 2009 bp, Zea Mays
gtcccgttgaatgtctcctttcgcaggggtcttcagggggagaacttggggagttggtatgcgctagtaaatcgggtagcggggctttctttaaacccttcgaaagatactttcagatggagcttgcatcaaaacgggaagttttcctcccagtctatgtatgctgcattgatagggagggaaatatctcggcaggaaactctcatctggaaacttaggatcccattgaaaattaagatcttctgttggttcttaacacgaggggtgattttgacaaaggataacttaatcaaaaggaaatggaatgggtcaaaaagtgtgtgttctgttcccatgatgaaaccatcccacatctttttttcgactgccactatgctagatttctttggcgatcgatctactttacctttggtattagagaaccaactagcttgcaggatatggggtcttcttggttgcaggggttcaataaagacacaaaggcaaagatatatgttggagccataactatctgttgggcactgtggcttagtcgaaatgatgtggtttttgacaagaatcctattcaaacttacttgcaggtactctttcgaggaacctactggtgtcgtttctggggactactccaaaagcgtgaggaggacaccataaggattaaagatgcttgcagggtactggaagccaccacgatgcaaatcttagcaatgcacggttggagctttagaaacaggctaactaatagctagttctccaggtcccaactgcgcttgggtttgtttgccgccacggagcatcccccttaataacagcaaactaccacacccatgtccacctccgtctccgccgccgccgttgccgctctcgtcccacccctcaccggccgccggtcgccgccggcatctcgcgtaccgcagatttgccgcagaagaatcagatccaaaccccgtatcttctcttcttccccctccttccccattgtccccgccgctgccatggccaccggcggcgccgcccccaccgcctccgatgccgggtccaagaagaagttgctcatcttagactccgaggaggatctcgcggtttctcttgcgaagtacactgcggagctgtcggagaagttcgcggccgagaggggtgccttcaccgccgtgctctctggcggatccctcatcgaggcactcaggaagctgacggagccgccgtacctggattcagtggactggagcaagtggcacgtcttctgggtggatgagagggtcgtgcccaaggaccatgtggatagcaactacaagctcgcctatgatgggtttctctccaaggtgccgattcctcctggacaagtttatgctataaacgatgcgttgtcagctgaaggagcggcagacgactacgaagcgtgcctgaagcagcttgtcaagaacggtgtgatttctatgtcagcggcgactggatttcccagtaatcaactcatccgcatacgttgcgatggtggtgactggagctggaaaggcggcagcggtgcagaaggcgctctcagacaagcaaacctcgtcagacctgctgcctgttgagatggctgtgctacaagatggagaattcacctggttcactgataaggcagcggtgtccttgctgcagaacaagtagagtctccatggtaaccttggctcggctcgaagccattttagctcataaaataaaagatccatgggcctgcgtgcatagctgcattcgtcctccaggatttcgtgtaacggagactcgatccttttatgtgtattgttcggagtaatgttcaaaaactctattgtcttccggcttttctgaaacattgctcggtaagtgtttggtttagtacatggttcgctgttccgcgctagacgcatggataggaaatgtggctgcattgaattcttccaggcttgtcgatcctggcatgttccagtttccagtggttttcagtgctcgtgccatctcagatatgaagagtggtctgcattcccggtgat

SEQ ID NO: 27636 - DNA, 1158 bp, Zea Mays
tcagttttgcttacgatgcactccctgtgtttcattggttgaatcggaggatgcattctaatactgagtactgcagcatccatggtagcaaagccatggaggacaaggactctgtgcctcatagtgtggttgagaaagatactgaagcccttctgctccatgatgtgcttcttaatggtatacttgcaattggcacacttggccatcacgtggactcactttgccctgtggcttgcattgaagaagatgatctctttatcatggatgatgagaaagcaattgtggaagagagagatgatgaggaacccaggaatgatcaggtgaaagaagatgttgcattggaaacagagccatgtgaaccagtatggcctattgttgagcctgctaagatgcattcattgtcaatgaaagaagacaactttacatgctttgtagcagaagaaatcctgatacgtgaggtggaagatgggggaggtgctaatatccaggaacgaccacttctgatgttagaaaaggtggagaaagtaagaactacacttgctgatttatttgcagcagaagtattctcatcaagttctccaagggagtatagttgccaggatatcattgacgttgctgtggcatccacttcaaagcatgcatcatgcatggaaaagatgcatcaaaagaaaccaaggaagccaacaccaaaaccactgaaagcgacaagaaaattaagtcgggtcatgaggaagatgttggggaagaagatccacccagagcagctcaatgggcgtagcaatgcagagggcccccttactgcatgatgtttattcttgccgacaaatttgcttctctatttggttacattggatccctatggctcagattccttgccagagagaagcgtccatggacagtcgtcgacgatgtggaagttccgttttttgttgttgtgttttgtcgccagtgaagcgtgcatgaataccaaccattctgctttcccatgttctcttgcttatttgcatgtataaatcaactgttggggtgtgtgtctgtgatcttgtaagctgtcatcatctggcgccacggcctgcgctgcgctgcactgcactgccttgtcgtcgcggcatgccaaatatatatattctttaataaaatatctgctttacgtttgca

SEQ ID NO: 27637 - DNA, 451 bp, Zea Mays
aaaaaaaccaccggcccctagtcggctaatcttcaccttatcccaccctcgctatgcacatccaccactgcccatgctaggctcgctgcggtgccgcgtcatgccgcgcccgcgcaccgccaccagtgtctcatcacacatcaccgagctccgtcgagcgctggagaatggacatcagccacccccatccgaaggcttgcagcgcccgaagctacgccagagcaccacggacatcgacgcctctggttgcctttggtgcaatctatgctgaggtaaagaagaagacgtcgaggtggatctccaggagttccaggacgttgatgagttcgaggattaggctagcgacctcccccagtcagctgcctgtggtgggttgtttacgttggctacgtttcgattctgcgtactttgatttatattatgtaaatgactctagtctgtaatattatta

SEQ ID NO: 27638 - DNA, 569 bp, Zea Mays
tgcccacctcagctgctgcataaaaaaaccaccggcccctagtcggctaatcttcaccttatcccaccctcgctatgcacatccaccactgcccatgctaggctcgctgcggtgccgcgtcatgccgcgcccgcgcaccgccaccagtgtctcatcacacatcaccgagctccgtcgagcgctggagaatggacatcagccacccccatccgaaggcttgcagcgcccgaagctacgccagagcaccacggacatcgacgcctctgactgcgatccattttcgagcttcaaggaatcgacagtcaagcttcggcaaccaagtgatcgaatttttcgagttctacaaagttgaagaccctgagcatctgtttggtgaatgcaagtgtcctctgtcccattatgtcccatttactttataatacactgtcccgcatactatgaacaacttaaggatttactagctttctatttacctggtccttgattaccttttgggctactatggttagattcatgctattgttttactttaatcaatgaacatgatgagatacaatgatgatactatg

SEQ ID NO: 27639 - DNA, 1463 bp, Zea Mays
cccaatacgccgagagcccccagacatccatcccgaagacccgagtgcacttccgttgccgccgcccgccgggcgatttttaggtcctcgctttccccacgcgtgtggcgtgttccgctcgcgcccgcccggcctcccaccctctccagcgccgccgcctcctcttcccggccgaaggagcaccgccccagccgatcttctctcccccacgccccatcaggccgtttctggctgctcttgggcctccctcgccctccctgacggccccgagctcgccctccatctccgccccagctcgcgccatctcggtgcctcgagctcgtcgtccgcgcttctgtggccactgccgggaagcatgaggaggaggcctgggatcgctggcttgcagaatgcggcggctactcgtgaccaattccggctggtcggggagaatgtggccaaggtgaggaccgatgtcatgaaggagcagcttgcgacgttccggtcacagctcgaggaattcgctcgcaagcataagagtgacatccgtaaaaacccagtattcagacagcagttccatgagatgtgcgcaaaagtcggagtagatccattggcatctaataaaggagtctgggcagaacttctagggattggggttcagatagttgacatatgcattgctaccagatcacataatggtggcttgattgacttactagatctccgcaaactgctcggtcagaagaggaaagctactcttgaatcattatctgaagatgactgtttgcgtgctataagcaagctaaaagtccttggtagtggttttgaagtaatttctgttgggaggagaaagcttgtgcgttcagttcctaccgaattaaataaagaccacagtgggatacttgggctagctcaggctgatggctatgtcacggtggaacaagttgaaaaggaattctcatggtctactgggcgtgcgattgatgctcttgaaactttgctcaaggaggggcttgctatgatcgacgatggccacagggatggcaagcgaagatattggttcccatgcgtcactgtcagctccgacacagcagctgttgaagtcaagtcataacctgtaagtaaaatgtcgattccacagtgtgttcacgtccccattccatgaggatgaggtggaaaccagtggcacggatgtgtgtaatgattggtatgttaagaattcagttggaacatcacactttgaatatgaaaggtggcatgattcttatttaggggcagttcgtttcttccggaacggatgcatggatggaacaatttctagctggtttgtttctctaatttgtataagttttgatcagctggaatgattcctggtccattcctagacaaacgaacaaggccttagaattcaggtttctttttttttgtacaatatttagagttaatataattctggccttctggctggcagaatgtttgtggct

SEQ ID NO: 27640 - DNA, 1476 bp, Zea Mays
cccaatacgccgagagcccccagacatccatcccgaagacccgagtgcacttccgttgccgccgcccgccgggcgatttttaggtcctcgctttccccacgcgtgtggcgtgttccgctcgcgcccgcccggcctcccaccctctccagcgccgccgcctcctcttcccggccgaaggagcaccgccccagccgatcttctctcccccacgccccatcaggccgtttctggctgctcttgggcctccctcgccctccctgacggccccgagctcgccctccatctccgccccagctcgcgccatctcggtgcctcgagctcgtcgtccgcgcttctgtggccactgccgggaagcatgaggaggaggcctgggatcgctggcttgcagaatgcggcggctactcgtgaccaattccggctggtcggggagaatgtggccaaggtgaggaccgatgtcatgaaggagcagcttgcgacgttccggtcacagctcgaggaattcgctcgcaagcataagagtgacatccgtaaaaacccagtattcagacagcagttccatgagatgtgcgcaaaagtcggagtagatccattggcatctaataaaggagtctgggcagaacttctagggattggtgacttctactatgaacttgatagttgacatatgcattgctaccagatcacataatggtggcttgattgacttactagatctccgcaaactgctcggtcagaagaggaaagctactcttgaatcattatctgaagatgactgtttgcgtgctataagcaagctaaaagtccttggtagtggttttgaagtaatttctgttgggaggagaaagcttgtgcgttcagttcctaccgaattaaataaagaccacagtgggatacttgggctagctcaggctgatggctatgtcacggtggaacaagttgaaaaggaattctcatggtctactgggcgtgcgattgatgctcttgaaactttgctcaaggaggggcttgctatgatcgacgatggccacagggatggcaagcgaagatattggttcccatgcgtcactgtcagctccgacacagcagctgttgaagtcaagtcataacctgtaagtaaaatgtcgattccacagtgtgttcacgtccccattccatgaggatgaggtggaaaccagtggcacggatgtgtgtaatgattggtatgttaagaattcagttggaacatcacactttgaatatgaaaggtggcatgattcttatttaggggcagttcgtttcttccggaacggatgcatggatggaacaatttctagctggtttgtttctctaatttgtataagttttgatcagctggaatgattcctggtccattcctagacaaacgaacaaggccttagaattcaggtttctttttttttgtacaatatttagagttaatataattctggccttctggctggcagaatgtttgtggct

SEQ ID NO: 27641 - DNA, 2031 bp, Zea Mays
agtttcccggctccctcgctcacgcgccgcggcatcactccggccggctggccagtcgcccactcttcccacccacaccgccgctgcctttccttccacggcgaactctccgcgggcgacgtccagactggcaacggcattccaataaaagaatgcgcccctgctctggccaactctctccacctgcattccccgttccgctaaaccctagccgcctccggcgcgtagtagattcgccatcagagacgacgctcggcggccctgaggagggatgacctacgtcaacccagacccccagccgctcgccgccgctacggcggatgattccgcaacccagcatcaagctgcggtgaccgccgcgccgcagtcgacgcgaggcgctctcgggttttttgcgacggcggagccgaagcagggcgcgaccatggtggcgccatcgtccccgcagggcgttcccgggttcgcggtcgtgccccaggcccagggggtcgagaacatagcgccccccgcgtccccgcaaggccctcccgggttttgcgtgacgcccgggctcgcgccacagcaaggtgctccggtgatggcgccgccgcagggtgtaaccatgatggctccgcaacagcagcatttcgcgcctgcgatggtgcctggctcccagcaagttatgcagatgctccttcaagccctccaagcccaagcccaagcccaagcccaggccatggttgctcaccaacccgctcaaggcatggcgccatcgcaatgtttgcccatgtgccatccgtccacggtggagatgcagcaagctcaagctggacacgtgacggcaccaccacctgtgccactcggccctccattgatgatgcagcagcagcagcaaccttcacaagctgatacagtgataatggcacaaccgcctctgccactcgaccctccattgttgcagcagcagcagccttcacaagctgatacagtgataatggcacaaccgcctctgcctcttggctctgcgatgcttcagcaacagcctccacagggggccacgatgatgatggcacagccacctctgccattattccctccatcagtgatgctgcaacacaatccacagggcaaccaggtgacgatggcacagccacaattcgctgctctaccatgcaagcgccagcgtcttgaccaatatgacaacaattacggacagcatatgactggccatcaggaggaaacagcaataaccaatgctgcaataggacaattttatgggcctaatatacacaatggggttccttattttggtgcacctgagccctcccttcctccagatgcaacaaacaccatttatgttgagggcctccctatcaactgtactagacgggaagttgcgcatatatttcgccaatatatggggttccttgaaatgagactggtcaacaaaggatctaataaacatttgtgctttgttgattttgcaaccccagcacaagctttttttgccatgagaaatcttcaaggctacaagtttgatgagcaggaccctcactcacgcattttgaacctgcagttctctcgctctcctcgtatgggttcacatgcatcttgattttgccttaaggcttcagcttagtctatgtggaagaattgttgcaactgacatcggtacttaaagtactggaggttgccttgctgtatgatatagtggattccattctctactggtgctttcttgggtcatccactattgatcggtattgtcagctggttagtggggcagattatctgttgatggacgtgaaccgcaatttgcaggtgtctcggtggttccagcctgtttcgaacatattggtttgcatggttgccagggccattttgatgtaaatggattcatgagaattggattatagcatagtttacagttatcctgtacctgatgatgacttttgcttaggaacatgttaatccaccggtacccaattcagagtttacagttggtttttgtggtagtatgccgaagtatttttgttgctgtttctgactttc

SEQ ID NO: 27642 - DNA, 121 bp, Zea Mays
caagcggcagggcgcccaacccagcctgtgcctgctcaatccccactcccccaagcggccaagccatccatggaacgtgtctggattggcaaggcagaagtcgatggttgctatataagct

SEQ ID NO: 27643 - DNA, 542 bp, Zea Mays
cagttatcttcttgagtggtctgaaggatgagaaagggactgcatcctcagatgcaatggatctcatatgtgacgcagagtggtaggctgatcaataccatgatgaccaaggtgaaccataccggcaaagtgtaccacatgagggccaagcgacaaatggctcaaagcctcggccagatcgcaaagttcaaacgtcgatacgagcaggaagcagtggaaagcaaggacaagtagttgggacggagctatggcctctgtaacctaagtcggttctgttgactgcacagttttcagctaaggacatgattttattttagatcacatcatcttttgttccacttcagaattgggtttgtaccccgtcgttagcaaactatggcacttgttccatcgtaaagccccaagaaaatagtctattgattgcttttttttttctctgtcctttgagtttcatgattcatttttcttttgttattgctatgtttgatgatcttgtcttttatggtctctaacaacagtaattctagtatgtggtgccttga

SEQ ID NO: 27644 - DNA, 541 bp, Zea Mays
atttgaatatactatcggtctgaaggatgagaaagggactgcatcctcagatgcaatggatctcatatgtgacgcagagtggtaggctgatcaataccatgatgaccaaggtgaaccataccggcaaagtgtaccacatgagggccaagcgacaaatggctcaaagcctcggccagatcgcaaagttcaaacgtcgatacgagcaggaagcagtggaaagcaaggacaagtagttgggacggagctatggcctctgtaacctaagtcggttctgttgactgcacagttttcagctaaggacatgattttattttagatcacatcatcttttgttccacttcagaattgggtttgtaccccgtcgttagcaaactatggcacttgttccatcgtaaagccccaagaaaatagtctattgattgcttttttttttctctgtcctttgagtttcatgattcatttttcttttgttattgctatgtttgatgatcttgtcttttatggtctctaacaacagtaattctagtatgtggtgccttga

SEQ ID NO: 27645 - DNA, 607 bp, Zea Mays
ccatacatcctgacaccactggttccaactagcagcgaccatggtccacaggaatgaattttgcatctccccacaggctgctggtctgaaggatgagaaagggactgcatcctcagatgcaatggatctcatatgtgacgcagagtggtaggctgatcaataccatgatgaccaaggtgaaccataccggcaaagtgtaccacatgagggccaagcgacaaatggctcaaagcctcggccagatcgcaaagttcaaacgtcgatacgagcaggaagcagtggaaagcaaggacaagtagttgggacggagctatggcctctgtaacctaagtcggttctgttgactgcacagttttcagctaaggacatgattttattttagatcacatcatcttttgttccacttcagaattgggtttgtaccccgtcgttagcaaactatggcacttgttccatcgtaaagccccaagaaaatagtctattgattgcttttttttttctctgtcctttgagtttcatgattcatttttcttttgttattgctatgtttgatgatcttgtcttttatggtctctaacaacagtaattctagtatgtggtgccttga

SEQ ID NO: 27646 - DNA, 538 bp, Zea Mays
tcaccggtctcaaggtctgaaggatgagaaagggactgcatcctcagatgcaatggatctcatatgtgacgcagagtggtaggctgatcaataccatgatgaccaaggtgaaccataccggcaaagtgtaccacatgagggccaagcgacaaatggctcaaagcctcggccagatcgcaaagttcaaacgtcgatacgagcaggaagcagtggaaagcaaggacaagtagttgggacggagctatggcctctgtaacctaagtcggttctgttgactgcacagttttcagctaaggacatgattttattttagatcacatcatcttttgttccacttcagaattgggtttgtaccccgtcgttagcaaactatggcacttgttccatcgtaaagccccaagaaaatagtctattgattgcttttttttttctctgtcctttgagtttcatgattcatttttcttttgttattgctatgtttgatgatcttgtcttttatggtctctaacaacagtaattctagtatgtggtgccttga

SEQ ID NO: 27647 - DNA, 1053 bp, Zea Mays
ctcataccatgcctttggaatgcatctgatgaaattttgaaataatgagggaattaggtgtcagctgggatgttgaactgtatggagaattgctcaggataggtggtggaaaggaaaggatgacagcttacttcaaccagacaggatggccggctaaagcaccaaagacagatgacaaaagaaaggagttcatagcttctcttcacaagaggaaaacagaattattcatggccctaattgagaaaaagttgcttcctctccgtccaggtgttcaaaggttaatcgatgaagctttaggaaaggcagttaaagttgcagtgtgcagtacatcaaatgagaaagctgtttcagcaatagtgtcgtacttattggggcctgatagagctgataagattaccatatttgctggagatgtggttcctcacaaaaaacctgacccagcaatctacatattagcagcaactacacttggagttgatccacaaagctgtgttgttattgaagacagtactatagggctcgcagcggcaaaagctgccggcatgaagtgtatcgtaacaaaaagcggaagaggacttcgagacagcagatgcagtgttcgattgcattggtgacccgccagaagtgcgcttcgatttggatttctgcgccaagttgctcaagaaacaatatgtgagctgaaagggggctagtgcaagtgatataccaagtacgaggttcctgaatatggagaaagagtccatggcatgccaatgttggttcttcaagccatgacctgatactaggacttggaagtccacgttctacccaatagtaacttatagaatgacattcactactgcccacccagttggcagttgcaaatgtgttagtcattcaacaaattggaaaccactcgaataagggatcaccaagtccaaactcttcagtcaaagcaataacaattgaggttacgagtcgaaaaatatgtaaggcaatcaaactattataagtgggtgtttgaatgtactagaactaatagttagtggctaaaattagttgagacatccaaac

SEQ ID NO: 27648 - DNA, 849 bp, Zea Mays
cttccaaccgctgtggaattttggctaccatcccactttcgctttgggtgaaagataaagaaaaagaactttggctaatgagggtcgtcgcaggaattcagtgagaacacaaagaatgtgctcttgtcatgtgcattcatacacttggaaaagaaggagttcatcaagcagtttgctgagatttcatcaataaaccaacgaattttgttattcggtccagcaggttctgagatttatcaggaaacattggtaaaggcacttgcgaaacattttggtgctagacttcttgtcgtggattcacttttgctaccttggatccctgatggtaatgatcttggtggtttgtgcgaggaagatcatggcttcttctgctctgctgaatcacttcgcccagacttttctgctggtgaagaagttgagaggctagctatgaccgagctaatagaggtcatttcagaagagaacaaatctggacctctgattgtgttacttaaggatgtagagaaatcattcattggagttaccgagtcactttcatcttcacggagcaaatttgaatcgcttccatctggtgttcttattataggatcccacactcagatggacagccgcaaagaaaagagaggaaggataaggacacaaagaaaagaagtaaaaagaggataaaggtatactctagcttatgacctgctgcctatttgtgaaattgttgcgatttatctagtgtatatatatttagttatgataactctgttctaggtactttgcttacttaaaatttgtttgatgccctcaccaattagaaaccgggactgataaacatgtccaaacagagcatgttgtctcata

SEQ ID NO: 27649 - DNA, 600 bp, Zea Mays
tccccttcctctcccctaggagatctctgtttcccatctgcacttccgagttccaggcttccaaccgctgtggaattttggctaccatcccactttcgctttgggtgaaagataaagaaaaagaactttggctaatgagggtcgtcgcaggaattcagtgagaacacaaagaatgtgctcttgtcatgtgcattcatacacttggaaaagaaggagttcatcaagcagtttgctgagatttcatcaataaaccaacgaattttgttattcggtccagcaggttctgagatttatcaggaaacattggtaaaggcacttgcgaaacattttggtgctagacttcttgtcgtggattcacttttgctaccttggagaggaaggataaggacacaaagaaaagaagtaaaaagaggataaaggtatactctagcttatgacctgctgcctatttgtgaaattgttgcgatttatctagtgtatatatatttagttatgataactctgttctaggtactttgcttacttaaaatttgtttgatgccctcaccaattagaaaccgggactgataaacatgtccaaacagagcatgttgtctcata

SEQ ID NO: 27650 - DNA, 848 bp, Zea Mays
gtcgagaccgcgcgcgtgcgcctgaagctaaacctcgccgcgcgcgcccgccgccacaacctcaccggcgccacgcctccaccccgcgcccaccccgccgcccctcgccgtgtgcccccgtcgctgcacccgccctgcctccagcagcagaacgaaagggatctctggtccccgagccctggctcgtccccttccgattccaatctggtctcgccgagcctggcgacgagggagagatggggaagaaccaggcgtacaaggcaatgcagtgggcgcggctggggtcctcgtccgacgcgctgggcaccgccgacgccctcgaagacggcatggatgggatgaaacaaggaattattaatccaagtgatattgatgttacctttgaggattttccttattatgtcagtgagaacacaaagaatgtgctcttgtcatgtgcattcatacacttggaaaagaaggagttcatcaagcagtttgctgagatttcatcaataaaccaacgaattttgttattcggtccagcaggttctgagatttatcaggaaacattggtaaaggcacttgcgaaacattttggtgctagacttcttgtcgtggattcacttttgctaccttggagaggaaggataaggacacaaagaaaagaagtaaaaagaggataaaggtatactctagcttatgacctgctgcctatttgtgaaattgttgcgatttatctagtgtatatatatttagttatgataactctgttctaggtactttgcttacttaaaatttgtttgatgccctcaccaattagaaaccgggactgataaacatgtccaaacagagcatgttgtctcata

SEQ ID NO: 27651 - DNA, 1555 bp, Zea Mays
gtcgagaccgcgcgcgtgcgcctgaagctaaacctcgccgcgcgcgcccgccgccacaacctcaccggcgccacgcctccaccccgcgcccaccccgccgcccctcgccgtgtgcccccgtcgctgcacccgccctgcctccagcagcagaacgaaagggatctctggtccccgagccctggctcgtccccttccgattccaatctggtctcgccgagcctggcgacgagggagagatggggaagaaccaggcgtacaaggcaatgcagtgggcgcggctggggtcctcgtccgacgcgctgggcaccgccgacgccctcgaagacggcatggatgggatgaaacaaggaattattaatccaagtgatattgatgttacctttgaggattttccttattatgtcagtgagaacacaaagaatgtgctcttgtcatgtgcattcatacacttggaaaagaaggagttcatcaagcagtttgctgagatttcatcaataaaccaacgaattttgttattcggtccagcaggttctgagatttatcaggaaacattggtaaaggcacttgcgaaacattttggtgctagacttcttgtcgtggattcacttttgctaccttggatccctgatggtaatgatcttggtggtttgtgcgaggaagatcatggcttcttctgctctgctgaatcacttcgcccagacttttctgctggtgaagaagttgagaggctagctatgaccgagctaatagaggtcatttcagaagagaacaaatctggacctctgattgtgttacttaaggatgtagagaaatcattcattggagttaccgagtcactttcatcttcacggagcaaatttgaatcgcttccatctggtgttcttattataggatcccacactcagatggacagccgcaaagaaaaggtacatgcattattactgataatctagacaaatttggacagtgcgagtttcaagtcctgatggtattgtggcatattggttcctgcatgcattttgcaaatgaacaaggctaagagttattttataccttgcattgctgtaatttttacttctccccatcagggacaggggttcttgttgagatatcatgttaaccctttatttttgatcagttatctctcttcaagtttatctgttggggcctaatcctcttagcgacgcgtcatattagaacccgggtgttgtgttaaagcttggacaaccaatcatttattattcgagaatttaatttggttttattatcaatttaaacctttctataggaagagagtggctcttcactcccatcggattgacaaaaaagaggaaggataaggacacaaagaaaagaagtaaaaagaggataaaggtatactctagcttatgacctgctgcctatttgtgaaattgttgcgatttatctagtgtatatatatttagttatgataactctgttctaggtactttgcttacttaaaatttgtttgatgccctcaccaattagaaaccgggactgataaacatgtccaaacagagcatgttgtctcata

SEQ ID NO: 27652 - DNA, 887 bp, Zea Mays
gtcgagaccgcgcgcgtgcgcctgaagctaaacctcgccgcgcgcgcccgccgccacaacctcaccggcgccacgcctccaccccgcgcccaccccgccgcccctcgccgtgtgcccccgtcgctgcacccgccctgcctccagcagcagaacgaaagggatctctggtccccgagccctggctcgtccccttccgattccaatctggtctcgccgagcctggcgacgagggagagatggggaagaaccaggcgtacaaggcaatgcagtgggcgcggctggggtcctcgtccgacgcgctgggcaccgccgacgccctcgaagacggcatggatgggatgaaacaaggaattattaatccaagtgatattgatgttacctttgaggattttccttattatgtcagtgagaacacaaagaatgtgctcttgtcatgtgcattcatacacttggaaaagaaggagttcatcaagcagtttgctgagatttcatcaataaaccaacgaattttgttattcggtccagcaggttctgagatttatcaggaaacattggtaaaggcacttgcgaaacattttggtgctagacttcttgtcgtggattcacttttgctaccttgggaagagagtggctcttcactcccatcggattgacaaaaaagaggaaggataaggacacaaagaaaagaagtaaaaagaggataaaggtatactctagcttatgacctgctgcctatttgtgaaattgttgcgatttatctagtgtatatatatttagttatgataactctgttctaggtactttgcttacttaaaatttgtttgatgccctcaccaattagaaaccgggactgataaacatgtccaaacagagcatgttgtctcata

SEQ ID NO: 27653 - DNA, 419 bp, Zea Mays
gtccccttcctctcccctaggagatctctgtttcccatctgcacttccgagttccaggcttccaaccgctgtggaattttggctaccatcccactttcgctttgggtgaaagataaagaaaaagaactttggctaatgagggtcgtcgcaggaattcagtgagaacacaaagaatgtgctcttgtcatgtgcattcatacacttggaaaagaaggagttcatcaagcagtttgctgagatttcatcaataaaccaacgaattttgttattcggtccagcaggttctgagatttatcaggaaacattggtaaaggcacttgcgaaacattttggtgctagacttcttgtcgtggattcacttttgctaccttgggggaccaagttatggttatcgaggcagagtgatgcttgcttttgaa

SEQ ID NO: 27654 - DNA, 673 bp, Zea Mays
tttccctgtcgagaccgcgcgcgtgcgcctgaagctaaacctcgccgcgcgcgcccgccgccacaacctcaccggcgccacgcctccaccccgcgcccaccccgccgcccctcgccgtgtgcccccgtcgctgcacccgccctgcctccagcagcagaacgaaagggatctctggtccccgagccctggctcgtccccttccgattccaatctggtctcgccgagcctggcgacgagggagagatggggaagaaccaggcgtacaaggcaatgcagtgggcgcggctggggtcctcgtccgacgcgctgggcaccgccgacgccctcgaagacggcatggatgggatgaaacaaggaattattaatccaagtgatattgatgttacctttgaggattttccttattatgtcagtgagaacacaaagaatgtgctcttgtcatgtgcattcatacacttggaaaagaaggagttcatcaagcagtttgctgagatttcatcaataaaccaacgaattttgttattcggtccagcaggttctgagatttatcaggaaacattggtaaaggcacttgcgaaacattttggtgctagacttcttgtcgtggattcacttttgctaccttgggggaccaagttatggttatcgaggcagagtgatgcttgcttttgaa

SEQ ID NO: 27655 - DNA, 2795 bp, Zea Mays
aaggccaagcacaggccctccctccctcccttccctgcatccgccactcccactctctccctccccacctcctcctcgtcccgttgaatcattcagcttttgaaactatttttttgtgctctcaaggcaaaagagcacacttaactcttccacgcctgtctctctctctctccctctccagtcacacacacactatctctgtccatcggccgatcggcggcatggccacgccattagctccagcgagctccttcattaccaggccactggcgctggcgctagtgctcgtcgcggccgcgctctgccgtccggcttcctgcgcagccgccgcggccgccgcggacaggatcacgcggctccccgggcagccggaggtgagcttcggccagtactccggctacgtcggcgtggacggcgacggcggcggcaagcgggccctgttctactacttcgtggaggccgatgcccccgaccctgcctccaagcctctcgtcctctggctcaacggcgggcctgggtgctcgtcgctgggcgtaggggccttctcagagaacgggccgttccggcctagtgggcaggtgctggtgaagaacgaatacagctggaacaaagaggccaatgtgatatacctggagacgccggctggcgttggctactcatactctgccgacgctgcctactaccagggcgtggatgacaagatgacagccatggacaacatggtgttcctgcaaaggtggctccaaaagttcccacagtacaggggcagggacctgtacatcgccggagaaagctacgcagggcactacatcccgcagctcgccgaggccatggtggagttcaacaacaaggaggagaggatcttcaacctcaaaggcgtcgccctgggcaacccggtgctggagttcgcgacggacttcaactcccgcgccgagtacttctggtcgcacggcctcatctccgacgccacgttccgcgccttcacctccgcctgcaactactcccgctacgtcgccgagtactacggcggcgcgctgtcgccgctgtgcgccagggtgatgaaccgggtgacgcgcgagaccagccgcttcgtcgacaagtacgacgtcacgctcgacgtcttcctctcgtccgtgctctcccagtccaagaccctctcgccgcacgtcgggcagcgggtcgacgtgtgcgtggaggacgagacggtgaggtacctcaaccggcgggacgtgcaggcggcgctgcacgcgaggctcgtcggcgtcgacaagtgggcggtctgcagcagcgttctccagtacgagctgctcaacctgcagatcccgaccatcaacgtcgtcggatcgctcgtgagatccgggatccgagtgctggtttacagcggcgaccaggactcggtgatccctctcacggggagccggaccctggtacagagcttggcgcgtggcatggggctcaagaccaccaccccctacagagtctggttcgaagggcagcaggttggaggatggacacaggtgtacggaggcggcgcgctgtccttcgccaccgtcagaggcgcctcccacgaggcgcccttctcgcagcccggccggtcgctcgtgctcttccgagcgttcctgcagggccagcctctgcccgaaaccttctcgtgatgagcaatggctggctggctggctctggtgcggctcttgatctgaaggcaagtcactggtttcctggacgcagcagctcttctgcgcgtgcgagggggtgggttttgcactctagtaaactgtaagaaggtgttccggtgtgttcgctgtttcttcagcatccaaggctcggcaattgtctagagaagtggaaagaattcgtctctcgtctgcgtgtgttcgtttttgtctgtaaatgttctgctagtgctgcaagaacattgcatattcttggacacgaagagtgggaaaaaaacacacacacacacacgaagaaaacaagtgttggcaaaccggcaggcaatgatgcccaagaaaagctatacggcaggtgccatgagatcggcagagacgaacacctgtaaatgcaggcatgaagaagcaaaagcacctggaaggggcggcagcggcaccatgagagcccccgccgcccggtccaccgattcacgtccgtgtccatgatcctaggataggtgccaccgtttcagacttcgagtaaaggcgttctctcggccatcgattccacggagcgcggcaggaagagctagctggcatgtgacggtctgatggccgtctttctgcactgcctctgaatcgggagcaccggacggacaatgatggctggctatgaggttgtagttgtacagggagacgggtgggtcttccaggagtaaaggggactccagcagaggagacgagccagccacgcatgagcgctagggtagggtgctcgaaagtttcagcagataggataggatggaacataggctgtggtaagcatctctagcagttccaaaaaaaatccctaaaaatcaattaaggatgttattaaccgaaaatcatgctccaacaatctcataaatgaggtcccaaatatatcaacttcgtaaatattcttctttgtttagtccccagacttatggagttgtctagcattctcgatagcctatttcgtattttcaatcgcaccataaaatcacttgtataccatcgagttcgcgctcatgtaaaaatgattcactttgaataatttgagttgtggatttcgggggtgaggaagatggaccaatatgaatatatagcctccttccatgacaaaag

SEQ ID NO: 27656 - DNA, 2801 bp, Zea Mays
aaggccaagcacaggccctccctccctcccttccctgcatccgccactcccactctctccctccccacctcctcctcgtcccgttgaatcattcagcttttgaaactatttttttgtgctctcaaggcaaaagagcacacttaactcttccacgcctgtctctctctctctccctctccagtcacacacacactatctctgtccatcggccgatcggcggcatggccacgccattagctccagcgagctccttcattaccaggccactggcgctggcgctagtgctcgtcgcggccgcgctctgccgtccggcttcctgcgcagccgccgcggccgccgcggacaggatcacgcggctccccgggcagccggaggtgagcttcggccagtactccggctacgtcggcgtggacggcgacggcggcggcaagcgggccctgttctactacttcgtggaggccgatgcccccgaccctgcctccaagcctctcgtcctctggctcaacggcgggcctgggtgctcgtcgctgggcgtaggggccttctcagagaacgggccgttccggcctagtgggcaggtgctggtgaagaacgaatacagctggaacaaagaggccaatgtgatatacctggagacgccggctggcgttggctactcatactctgccgacgctgcctactaccagggcgtggatgacaagatgacagccatggacaacatggtgttcctgcaaaggtggctccaaaagttcccacagtacaggggcagggacctgtacatcgccggagaaagctacgcagggcactacatcccgcagctcgccgaggccatggtggagttcaacaacaaggaggagaggatcttcaacctcaaaggcgtcgccctgggcaacccggtgctggagttcgcgacggacttcaactcccgcgccgagtacttctggtcgcacggcctcatctccgacgccacgttccgcgccttcacctccgcctgcaactactcccgctacgtcgccgagtactacggcggcgcgctgtcgccgctgtgcgccagggtgatgaaccgggtgacgcgcgagaccagccgcttcgtcgacaagtacgacgtcacgctcgacgtcttcctctcgtccgtgctctcccagtccaagaccctctcgccgcacgagcaggtcgggcagcgggtcgacgtgtgcgtggaggacgagacggtgaggtacctcaaccggcgggacgtgcaggcggcgctgcacgcgaggctcgtcggcgtcgacaagtgggcggtctgcagcagcgttctccagtacgagctgctcaacctgcagatcccgaccatcaacgtcgtcggatcgctcgtgagatccgggatccgagtgctggtttacagcggcgaccaggactcggtgatccctctcacggggagccggaccctggtacagagcttggcgcgtggcatggggctcaagaccaccaccccctacagagtctggttcgaagggcagcaggttggaggatggacacaggtgtacggaggcggcgcgctgtccttcgccaccgtcagaggcgcctcccacgaggcgcccttctcgcagcccggccggtcgctcgtgctcttccgagcgttcctgcagggccagcctctgcccgaaaccttctcgtgatgagcaatggctggctggctggctctggtgcggctcttgatctgaaggcaagtcactggtttcctggacgcagcagctcttctgcgcgtgcgagggggtgggttttgcactctagtaaactgtaagaaggtgttccggtgtgttcgctgtttcttcagcatccaaggctcggcaattgtctagagaagtggaaagaattcgtctctcgtctgcgtgtgttcgtttttgtctgtaaatgttctgctagtgctgcaagaacattgcatattcttggacacgaagagtgggaaaaaaacacacacacacacacgaagaaaacaagtgttggcaaaccggcaggcaatgatgcccaagaaaagctatacggcaggtgccatgagatcggcagagacgaacacctgtaaatgcaggcatgaagaagcaaaagcacctggaaggggcggcagcggcaccatgagagcccccgccgcccggtccaccgattcacgtccgtgtccatgatcctaggataggtgccaccgtttcagacttcgagtaaaggcgttctctcggccatcgattccacggagcgcggcaggaagagctagctggcatgtgacggtctgatggccgtctttctgcactgcctctgaatcgggagcaccggacggacaatgatggctggctatgaggttgtagttgtacagggagacgggtgggtcttccaggagtaaaggggactccagcagaggagacgagccagccacgcatgagcgctagggtagggtgctcgaaagtttcagcagataggataggatggaacataggctgtggtaagcatctctagcagttccaaaaaaaatccctaaaaatcaattaaggatgttattaaccgaaaatcatgctccaacaatctcataaatgaggtcccaaatatatcaacttcgtaaatattcttctttgtttagtccccagacttatggagttgtctagcattctcgatagcctatttcgtattttcaatcgcaccataaaatcacttgtataccatcgagttcgcgctcatgtaaaaatgattcactttgaataatttgagttgtggatttcgggggtgaggaagatggaccaatatgaatatatagcctccttccatgacaaaag

SEQ ID NO: 27657 - DNA, 1345 bp, Zea Mays
accgccgtcatgttctctatggcgctcccgctggctctcacgctccgcctcagcctgccattgccaccaccgtcttgcccgctgccccgccgccgctcgcaggctcctccgccccattctcgggatctggtgttgggtcacctcctccagctccggctatgcttcgtcgtccgtgccctccccgtccctcgtcgcgttcgggtgggccccgcccatgactctcacgatgtcactcctcggctcctcgccccctccgcgcacagcagtgtcagcgtcttcaggtgcctcttcgttgcggtgctggtgccaaccgcggagcaagacggagactgcgagggacgttgattcggatgcttcagtacgcgcgagggctgggctgggcgacctgggttgatgcttcgaaaagcaaagattatgacacttaatgacaacagaaaaagcaggaggctctgaagcagctgaggaagagcctaaccttcacccttcaaagatatatagaaatgagtagatggcctccaatcacttcctcatttttaatgtatttcaaatgttcttggtactacagcaagctcatggtactttaatcctcaattcctgaagcacaggtctactacagcaggtacaacaagataggatagaagacaataccttgcaacactggctgttcctttctcttttttttgttttttcccgttcacaaatatgcttctctgtagtcgtaattttacagttagctacaataatctaataacatagcaattccataatttgagccgaagttgtggttgaagcctgtacttatcattattttccatatatacacaactaatacagaatatgacaccacaaaaagtattcttcaagagaactaaatagatatttgcactaacacttgctcttgtctcatccaaaatttgacattatctgaaggttacaaaacagtgagctacaactgatacaacccactgcaaccgaagaagaaattcagaattcctagccaccaaactacgaagacaaaaatgtcgaggagttgctttatatagatccagacatgtttcctccacaaggttatagatgcactgtcactattcacgcattatacaagatatatagcagatggtggttcccattttgcaccactcatcaagagcaacaacacttttggagagatgtatctgtataaatataaaccagctgttggactatttctgatctgtatatattgaagcagcgcctagaaacatattgttaccagctcttggtgcacactactttaatactacttaatatgtattatagtctcagttcactctccagctgacataaatgctacaattccattgac

SEQ ID NO: 27658 - DNA, 1034 bp, Zea Mays
accgccgtcatgttctctatggcgctcccgctggctctcacgctccgcctcagcctgccattgccaccaccgtcttgcccgctgccccgccgccgctcgcaggctcctccgccccattctcgggatctggtgttgggtcacctcctccagctccggctatgcttcgtcgtccgtgccctccccgtccctcgtcgcgttcgggtgggccccgcccatgactctcacgatgtcactcctcggctcctcgccccctccgcgcacagcagtgtcagcgtcttcaggtgcctcttcgttgcggtgctggtgccaaccgcggagcaagacggagactgcgagggacgttgattcggatgcttcagtacgcgcgagggctgggctgggcgacctgggttgatgcttcgaaaagcaaagattatgacacttaatgacaacagaaaaagcaggaggctctgaagcagctgaggaagagcctaaccttcacccttcaaagatatatagaaatgagtagatggcctccaatcacttcctcatttttaatgtatttcaaatgttcttggtactacagcaagctcatggtactttaatcctcaattcctgaagcacaggtctactacagcaggttacaaaacagtgagctacaactgatacaacccactgcaaccgaagaagaaattcagaattcctagccaccaaactacgaagacaaaaatgtcgaggagttgctttatatagatccagacatgtttcctccacaaggttatagatgcactgtcactattcacgcattatacaagatatatagcagatggtggttcccattttgcaccactcatcaagagcaacaacacttttggagagatgtatctgtataaatataaaccagctgttggactatttctgatctgtatatattgaagcagcgcctagaaacatattgttaccagctcttggtgcacactactttaatactacttaatatgtattatagtctcagttcactctccagctgacataaatgctacaattccattgac

SEQ ID NO: 27659 - DNA, 2687 bp, Zea Mays
ccgcatgctcctgctgccgcctcaccgccgtcatgttctctatggcgctcccgctggctctcacgctccgcctcagcctgccattgccaccaccgtcttgcccgctgccccgccgccgctcgcaggctcctccgccccattctcgggatctggtgttgggtcacctcctccagctccggctatgcttcgtcgtccgtgccctccccgtccctcgtcgcgttcgggtgggccccgcccatgactctcacgatgtcactcctcggctcctcgccccctccgcgcacagcagtgtcagcgtcttcaggtgcctcttcgttgcggtgctggtgccaaccgcggagcaagacggagactgcgagggacgttgattcggatgcttcagtacgcgcgagggctgggctgggcgacctgggttgatgcttcgaaaaggtatgagccattctcctcctccctacaaccttcatcttctccgaaacttttactgaatgtgacatcgcagcgccagatccatcctaaagagttatagcttcatacgaaaaaacaggttagttcctctttattttttagaacgggcacttacaataccattttttcactgtgaagaaaagggacaaaaagggattctcacctgaacagcagattactagatcagatacggactggtgatgttgactaaattaattactataaagtacgccatcgtcgttgcctggaagctagaaagaaatcagtttatactaactcaaaacgaataatatatataatgcacatttaactaactaaaaaaagatagaaagacttcagctcaccaacatatacggtatctgcatctgtgaataatatatatgatgcacatttaactaactcaaaaaagagagaaagacttcagctcaccatcgtatacggtatctgcatctgtgttctacatatgtaggctgagaagtaaactaaaagtttctacaatatagaacaattattaggaacatagaaaatatggtatgaggaaatatgtgaaacattgtgcacaagaaacgtttattctggtgatgggtgtaattggatcaccacctctattgtcatgcatacattagttgttaatattgatgtttcttatcaataaatctattcaatgtcaaaacatgatttaaccacaactcctaaaattatgaaggtactcctcatgcccgacatgtatgcagggacaatatcatatatgtagctattatttttttatttgcatggctggcaaatggtttgtagctataccaaatttgcatgaaaaagaaaaaaactaaaatttatcatactcataactgtcatacttattatgtatgattagatttgtcattaaacaatttacaaagcatgtctgatcatacatgttaagatcaaagttcaaaatctgttatatatggtataatacctctgagaggataacgactattacaacatctttatattcttaacatgtatgaattcgataattgacatggtactatgtcttttataaaatttgtcactcccagggctgttataatacaatattgttaacatgtaaatttaaaatataatttttcaaagctgttacaagttacataacatctttgacattataacaacttaaaatcttaacatcaaagtcagtagctgactagctggtttattgcccgaggtcctacttcataatcatatgaaatcaacttctatcatgctatgctacttggggcctatttggtttgttgagattcttagaatctagcacaaaaaatcataatatgccaaacatgtctcattttgtatctagattctagacaaaaatctgagtatccaactacaccttgataatataagataatgggcacattatccaaagctaaaatcccatgcctaccaaacgacaccttggaaagatatcgtgcttaagttttgtaatgcagattcaatataacaagccaaaattgtatagtataccaagttaacaactcacaaagaccttaaattgtgataaaccggttcaaattgatgtcttgtgcatgtgttcaatatatgtggtcttttctcaatatatatgtttatgtacattattattcacttactaatttgttatcctaactgattctgattgcctgttatcctaaccgattctacatgcctgctcatctcgctggacgaatgcatcttcaatttagcaaagattatgacacttaatgacaacagaaaaagcaggaggctctgaagcagctgaggaagagcctaaccttcacccttcaaagatatatagaaatgagtagatggcctccaatcacttcctcatttttaatgtatttcaaatgttcttggtactacagcaagctcatggtactttaatcctcaattcctgaagcacaggtctactacagcagccacaaggttatagatgcactgtcactattcacgcattatacaagatatatagcagatggtggttcccattttgcaccactcatcaagagcaacaacacttttggagagatgtatctgtataaatataaaccagctgttggactatttctgatctgtatatattgaagcagcgcctagaaacatattgttaccagctcttggtgcacactactttaatactacttaatatgtattatagtctcagttcactctccagctgacataaatgctacaattccattgac

SEQ ID NO: 27660 - DNA, 2844 bp, Zea Mays
gtcaaatctccaccgttccaccccgtcccgccgtccgcatgctcctgctgccgcctcaccgccgtcatgttctctatggcgctcccgctggctctcacgctccgcctcagcctgccattgccaccaccgtcttgcccgctgccccgccgccgctcgcaggctcctccgccccattctcgggatctggtgttgggtcacctcctccagctccggctatgcttcgtcgtccgtgccctccccgtccctcgtcgcgttcgggtgggccccgcccatgactctcacgatgtcactcctcggctcctcgccccctccgcgcacagcagtgtcagcgtcttcaggtgcctcttcgttgcggtgctggtgccaaccgcggagcaagacggagactgcgagggacgttgattcggatgcttcagtacgcgcgagggctgggctgggcgacctgggttgatgcttcgaaaaggtatgagccattctcctcctccctacaaccttcatcttctccgaaacttttactgaatgtgacatcgcagcgccagatccatcctaaagagttatagcttcatacgaaaaaacaggttagttcctctttattttttagaacgggcacttacaataccattttttcactgtgaagaaaagggacaaaaagggattctcacctgaacagcagattactagatcagatacggactggtgatgttgactaaattaattactataaagtacgccatcgtcgttgcctggaagctagaaagaaatcagtttatactaactcaaaacgaataatatatataatgcacatttaactaactaaaaaaagatagaaagacttcagctcaccaacatatacggtatctgcatctgtgaataatatatatgatgcacatttaactaactcaaaaaagagagaaagacttcagctcaccatcgtatacggtatctgcatctgtgttctacatatgtaggctgagaagtaaactaaaagtttctacaatatagaacaattattaggaacatagaaaatatggtatgaggaaatatgtgaaacattgtgcacaagaaacgtttattctggtgatgggtgtaattggatcaccacctctattgtcatgcatacattagttgttaatattgatgtttcttatcaataaatctattcaatgtcaaaacatgatttaaccacaactcctaaaattatgaaggtactcctcatgcccgacatgtatgcagggacaatatcatatatgtagctattatttttttatttgcatggctggcaaatggtttgtagctataccaaatttgcatgaaaaagaaaaaaactaaaatttatcatactcataactgtcatacttattatgtatgattagatttgtcattaaacaatttacaaagcatgtctgatcatacatgttaagatcaaagttcaaaatctgttatatatggtataatacctctgagaggataacgactattacaacatctttatattcttaacatgtatgaattcgataattgacatggtactatgtcttttataaaatttgtcactcccagggctgttataatacaatattgttaacatgtaaatttaaaatataatttttcaaagctgttacaagttacataacatctttgacattataacaacttaaaatcttaacatcaaagtcagtagctgactagctggtttattgcccgaggtcctacttcataatcatatgaaatcaacttctatcatgctatgctacttggggcctatttggtttgttgagattcttagaatctagcacaaaaaatcataatatgccaaacatgtctcattttgtatctagattctagacaaaaatctgagtatccaactacaccttgataatataagataatgggcacattatccaaagctaaaatcccatgcctaccaaacgacaccttggaaagatatcgtgcttaagttttgtaatgcagattcaatataacaagccaaaattgtatagtataccaagttaacaactcacaaagaccttaaattgtgataaaccggttcaaattgatgtcttgtgcatgtgttcaatatatgtggtcttttctcaatatatatgtttatgtacattattattcacttactaatttgttatcctaactgattctgattgcctgttatcctaaccgattctacatgcctgctcatctcgctggacgaatgcatcttcaatttagcaaagattatgacacttaatgacaacagaaaaagcaggaggctctgaagcagctgaggaagagcctaaccttcacccttcaaagatatatagaaatgagtagatggcctccaatcacttcctcatttttaatgtatttcaaatgttcttggtactacagcaagctcatggtactttaatcctcaattcctgaagcacaggtctactacagcaggttacaaaacagtgagctacaactgatacaacccactgcaaccgaagaagaaattcagaattcctagccaccaaactacgaagacaaaaatgtcgaggagttgctttatatagatccagacatgtttcctgttatagatgcactgtcactattcacgcattatacaagatatatagcagatggtggttcccattttgcaccactcatcaagagcaacaacacttttggagagatgtatctgtataaatataaaccagctgttggactatttctgatctgtatatattgaagcagcgcctagaaacatattgttaccagctcttggtgcacactactttaatactacttaatatgtattatagtctcagttcactctccagctgacataaatgctacaattccattgac

SEQ ID NO: 27661 - DNA, 2851 bp, Zea Mays
gtcaaatctccaccgttccaccccgtcccgccgtccgcatgctcctgctgccgcctcaccgccgtcatgttctctatggcgctcccgctggctctcacgctccgcctcagcctgccattgccaccaccgtcttgcccgctgccccgccgccgctcgcaggctcctccgccccattctcgggatctggtgttgggtcacctcctccagctccggctatgcttcgtcgtccgtgccctccccgtccctcgtcgcgttcgggtgggccccgcccatgactctcacgatgtcactcctcggctcctcgccccctccgcgcacagcagtgtcagcgtcttcaggtgcctcttcgttgcggtgctggtgccaaccgcggagcaagacggagactgcgagggacgttgattcggatgcttcagtacgcgcgagggctgggctgggcgacctgggttgatgcttcgaaaaggtatgagccattctcctcctccctacaaccttcatcttctccgaaacttttactgaatgtgacatcgcagcgccagatccatcctaaagagttatagcttcatacgaaaaaacaggttagttcctctttattttttagaacgggcacttacaataccattttttcactgtgaagaaaagggacaaaaagggattctcacctgaacagcagattactagatcagatacggactggtgatgttgactaaattaattactataaagtacgccatcgtcgttgcctggaagctagaaagaaatcagtttatactaactcaaaacgaataatatatataatgcacatttaactaactaaaaaaagatagaaagacttcagctcaccaacatatacggtatctgcatctgtgaataatatatatgatgcacatttaactaactcaaaaaagagagaaagacttcagctcaccatcgtatacggtatctgcatctgtgttctacatatgtaggctgagaagtaaactaaaagtttctacaatatagaacaattattaggaacatagaaaatatggtatgaggaaatatgtgaaacattgtgcacaagaaacgtttattctggtgatgggtgtaattggatcaccacctctattgtcatgcatacattagttgttaatattgatgtttcttatcaataaatctattcaatgtcaaaacatgatttaaccacaactcctaaaattatgaaggtactcctcatgcccgacatgtatgcagggacaatatcatatatgtagctattatttttttatttgcatggctggcaaatggtttgtagctataccaaatttgcatgaaaaagaaaaaaactaaaatttatcatactcataactgtcatacttattatgtatgattagatttgtcattaaacaatttacaaagcatgtctgatcatacatgttaagatcaaagttcaaaatctgttatatatggtataatacctctgagaggataacgactattacaacatctttatattcttaacatgtatgaattcgataattgacatggtactatgtcttttataaaatttgtcactcccagggctgttataatacaatattgttaacatgtaaatttaaaatataatttttcaaagctgttacaagttacataacatctttgacattataacaacttaaaatcttaacatcaaagtcagtagctgactagctggtttattgcccgaggtcctacttcataatcatatgaaatcaacttctatcatgctatgctacttggggcctatttggtttgttgagattcttagaatctagcacaaaaaatcataatatgccaaacatgtctcattttgtatctagattctagacaaaaatctgagtatccaactacaccttgataatataagataatgggcacattatccaaagctaaaatcccatgcctaccaaacgacaccttggaaagatatcgtgcttaagttttgtaatgcagattcaatataacaagccaaaattgtatagtataccaagttaacaactcacaaagaccttaaattgtgataaaccggttcaaattgatgtcttgtgcatgtgttcaatatatgtggtcttttctcaatatatatgtttatgtacattattattcacttactaatttgttatcctaactgattctgattgcctgttatcctaaccgattctacatgcctgctcatctcgctggacgaatgcatcttcaatttagcaaagattatgacacttaatgacaacagaaaaagcaggaggctctgaagcagctgaggaagagcctaaccttcacccttcaaagatatatagaaatgagtagatggcctccaatcacttcctcatttttaatgtatttcaaatgttcttggtactacagcaagctcatggtactttaatcctcaattcctgaagcacaggtctactacagcaggttacaaaacagtgagctacaactgatacaacccactgcaaccgaagaagaaattcagaattcctagccaccaaactacgaagacaaaaatgtcgaggagttgctttatatagatccagacatgtttcctccacaaggttatagatgcactgtcactattcacgcattatacaagatatatagcagatggtggttcccattttgcaccactcatcaagagcaacaacacttttggagagatgtatctgtataaatataaaccagctgttggactatttctgatctgtatatattgaagcagcgcctagaaacatattgttaccagctcttggtgcacactactttaatactacttaatatgtattatagtctcagttcactctccagctgacataaatgctacaattccattgac

SEQ ID NO: 27662 - DNA, 2858 bp, Zea Mays
gtcaaatctccaccgttccaccccgtcccgccgtccgcatgctcctgctgccgcctcaccgccgtcatgttctctatggcgctcccgctggctctcacgctccgcctcagcctgccattgccaccaccgtcttgcccgctgccccgccgccgctcgcaggctcctccgccccattctcgggatctggtgttgggtcacctcctccagctccggctatgcttcgtcgtccgtgccctccccgtccctcgtcgcgttcgggtgggccccgcccatgactctcacgatgtcactcctcggctcctcgccccctccgcgcacagcagtgtcagcgtcttcaggtgcctcttcgttgcggtgctggtgccaaccgcggagcaagacggagactgcgagggacgttgattcggatgcttcagtacgcgcgagggctgggctgggcgacctgggttgatgcttcgaaaaggtatgagccattctcctcctccctacaaccttcatcttctccgaaacttttactgaatgtgacatcgcagcgccagatccatcctaaagagttatagcttcatacgaaaaaacaggttagttcctctttattttttagaacgggcacttacaataccattttttcactgtgaagaaaagggacaaaaagggattctcacctgaacagcagattactagatcagatacggactggtgatgttgactaaattaattactataaagtacgccatcgtcgttgcctggaagctagaaagaaatcagtttatactaactcaaaacgaataatatatataatgcacatttaactaactaaaaaaagatagaaagacttcagctcaccaacatatacggtatctgcatctgtgaataatatatatgatgcacatttaactaactcaaaaaagagagaaagacttcagctcaccatcgtatacggtatctgcatctgtgttctacatatgtaggctgagaagtaaactaaaagtttctacaatatagaacaattattaggaacatagaaaatatggtatgaggaaatatgtgaaacattgtgcacaagaaacgtttattctggtgatgggtgtaattggatcaccacctctattgtcatgcatacattagttgttaatattgatgtttcttatcaataaatctattcaatgtcaaaacatgatttaaccacaactcctaaaattatgaaggtactcctcatgcccgacatgtatgcagggacaatatcatatatgtagctattatttttttatttgcatggctggcaaatggtttgtagctataccaaatttgcatgaaaaagaaaaaaactaaaatttatcatactcataactgtcatacttattatgtatgattagatttgtcattaaacaatttacaaagcatgtctgatcatacatgttaagatcaaagttcaaaatctgttatatatggtataatacctctgagaggataacgactattacaacatctttatattcttaacatgtatgaattcgataattgacatggtactatgtcttttataaaatttgtcactcccagggctgttataatacaatattgttaacatgtaaatttaaaatataatttttcaaagctgttacaagttacataacatctttgacattataacaacttaaaatcttaacatcaaagtcagtagctgactagctggtttattgcccgaggtcctacttcataatcatatgaaatcaacttctatcatgctatgctacttggggcctatttggtttgttgagattcttagaatctagcacaaaaaatcataatatgccaaacatgtctcattttgtatctagattctagacaaaaatctgagtatccaactacaccttgataatataagataatgggcacattatccaaagctaaaatcccatgcctaccaaacgacaccttggaaagatatcgtgcttaagttttgtaatgcagattcaatataacaagccaaaattgtatagtataccaagttaacaactcacaaagaccttaaattgtgataaaccggttcaaattgatgtcttgtgcatgtgttcaatatatgtggtcttttctcaatatatatgtttatgtacattattattcacttactaatttgttatcctaactgattctgattgcctgttatcctaaccgattctacatgcctgctcatctcgctggacgaatgcatcttcaatttagcaaagattatgacacttaatgacaacagaaaaagcaggaggctctgaagcagctgaggaagagcctaaccttcacccttcaaagatatatagaaatgagtagatggcctccaatcacttcctcatttttaatgtatttcaaatgttcttggtactacagcaagctcatggtactttaatcctcaattcctgaagcacaggtctactacagcaggtacaacgttacaaaacagtgagctacaactgatacaacccactgcaaccgaagaagaaattcagaattcctagccaccaaactacgaagacaaaaatgtcgaggagttgctttatatagatccagacatgtttcctccacaaggttatagatgcactgtcactattcacgcattatacaagatatatagcagatggtggttcccattttgcaccactcatcaagagcaacaacacttttggagagatgtatctgtataaatataaaccagctgttggactatttctgatctgtatatattgaagcagcgcctagaaacatattgttaccagctcttggtgcacactactttaatactacttaatatgtattatagtctcagttcactctccagctgacataaatgctacaattccattgac

SEQ ID NO: 27663 - DNA, 3274 bp, Zea Mays
gcacgatccggcgtcaacggccacagaacgcatgaaaccaaaatccagcaacgtccgcttccaaatctccacgagtgcacgggaatcttccggagagcactgaggggatcgtgtcaaatctccaccgttccaccccgtcccgccgtccgcatgctcctgctgccgcctcaccgccgtcatgttctctatggcgctcccgctggctctcacgctccgcctcagcctgccattgccaccaccgtcttgcccgctgccccgccgccgctcgcaggctcctccgccccattctcgggatctggtgttgggtcacctcctccagctccggctatgcttcgtcgtccgtgccctccccgtccctcgtcgcgttcgggtgggccccgcccatgactctcacgatgtcactcctcggctcctcgccccctccgcgcacagcagtgtcagcgtcttcaggtgcctcttcgttgcggtgctggtgccaaccgcggagcaagacggagactgcgagggacgttgattcggatgcttcagtacgcgcgagggctgggctgggcgacctgggttgatgcttcgaaaaggtatgagccattctcctcctccctacaaccttcatcttctccgaaacttttactgaatgtgacatcgcagcgccagatccatcctaaagagttatagcttcatacgaaaaaacaggttagttcctctttattttttagaacgggcacttacaataccattttttcactgtgaagaaaagggacaaaaagggattctcacctgaacagcagattactagatcagatacggactggtgatgttgactaaattaattactataaagtacgccatcgtcgttgcctggaagctagaaagaaatcagtttatactaactcaaaacgaataatatatataatgcacatttaactaactaaaaaaagatagaaagacttcagctcaccaacatatacggtatctgcatctgtgaataatatatatgatgcacatttaactaactcaaaaaagagagaaagacttcagctcaccatcgtatacggtatctgcatctgtgttctacatatgtaggctgagaagtaaactaaaagtttctacaatatagaacaattattaggaacatagaaaatatggtatgaggaaatatgtgaaacattgtgcacaagaaacgtttattctggtgatgggtgtaattggatcaccacctctattgtcatgcatacattagttgttaatattgatgtttcttatcaataaatctattcaatgtcaaaacatgatttaaccacaactcctaaaattatgaaggtactcctcatgcccgacatgtatgcagggacaatatcatatatgtagctattatttttttatttgcatggctggcaaatggtttgtagctataccaaatttgcatgaaaaagaaaaaaactaaaatttatcatactcataactgtcatacttattatgtatgattagatttgtcattaaacaatttacaaagcatgtctgatcatacatgttaagatcaaagttcaaaatctgttatatatggtataatacctctgagaggataacgactattacaacatctttatattcttaacatgtatgaattcgataattgacatggtactatgtcttttataaaatttgtcactcccagggctgttataatacaatattgttaacatgtaaatttaaaatataatttttcaaagctgttacaagttacataacatctttgacattataacaacttaaaatcttaacatcaaagtcagtagctgactagctggtttattgcccgaggtcctacttcataatcatatgaaatcaacttctatcatgctatgctacttggggcctatttggtttgttgagattcttagaatctagcacaaaaaatcataatatgccaaacatgtctcattttgtatctagattctagacaaaaatctgagtatccaactacaccttgataatataagataatgggcacattatccaaagctaaaatcccatgcctaccaaacgacaccttggaaagatatcgtgcttaagttttgtaatgcagattcaatataacaagccaaaattgtatagtataccaagttaacaactcacaaagaccttaaattgtgataaaccggttcaaattgatgtcttgtgcatgtgttcaatatatgtggtcttttctcaatatatatgtttatgtacattattattcacttactaatttgttatcctaactgattctgattgcctgttatcctaaccgattctacatgcctgctcatctcgctggacgaatgcatcttcaatttagcaaagattatgacacttaatgacaacagaaaaagcaggaggctctgaagcagctgaggaagagcctaaccttcacccttcaaagatatatagaaatgagtagatggcctccaatcacttcctcatttttaatgtatttcaaatgttcttggtactacagcaagctcatggtactttaatcctcaattcctgaagcacaggtctactacagcaggtacaacaagataggatagaagacaataccttgcaacactggctgttcctttctcttttttttgttttttcccgttcacaaatatgcttctctgtagtcgtaattttacagttagctacaataatctaataacatagcaattccataatttgagccgaagttgtggttgaagcctgtacttatcattattttccatatatacacaactaatacagaatatgacaccacaaaaagtattcttcaagagaactaaatagatatttgcactaacacttgctcttgtctcatccaaaatttgacattatctgaaggttacaaaacagtgagctacaactgatacaacccactgcaaccgaagaagaaattcagaattcctagccaccaaactacgaagacaaaaatgtcgaggagttgctttatatagatccagacatgtttcctccacaaggttatagatgcactgtcactattcacgcattatacaagatatatagcagatggtggttcccattttgcaccactcatcaagagcaacaacacttttggagagatgtatctgtataaatataaaccagctgttggactatttctgatctgtatatattgaagcagcgcctagaaacatattgttaccagctcttggtgcacactactttaatactacttaatatgtattatagtctcagttcactctccagctgacataaatgctacaattccattgac

SEQ ID NO: 27664 - DNA, 836 bp, Zea Mays
tggggctcatcaattaaagacgtcatcgcttagcaggagcacaaagtgcagaagcagagccagtcctaactgcttagccaggaaagaagcagagcgtgcttagccatgtactcatccagctgccatgtgatgtccgagaagccaaacggttccaaggcggtgacgctgctgctcaggctgtccacgctggttctgtcgctcatctcggcggtcgtcatggccaccgccaccagcgactgcaccatctacggccacggcggcgccgccaaggtcactatcatgttcaagaactaccggcccttcgttttcctggtagttttgaacatcgcggcggcggtgctggaggcagcagccatctacctacaggtcgtgaagggcgacgacggcgacgaggcgcccaagcttccccggatcatcctggttgtcctcgacgtcgtggtgctcgcgctggtcaacgcggcgacgggcgcggtggtcgcggcggtcatcgcctacggccccgagatcgacgcgtgcaccgtcgcaggtggtggccgattccgcgagcaggtgcgcaggtccgagctcctgtcgatcgccgcgagcatctccgctgtgtccgccgccgtcgctaaggacgtgccgctgcccttctccgtgtggcccctctcgtcggaatcaggcgactactactgatcttggttattatttgtcaggtgatgttgagtactgtgagtgtgaaggctttctgccagcgaaattccaatttatgtcaactgaatgccactacgataagctatccttcgaaaaaatttcagcacaaatcatatatttgatttccatctggctgctccagt

SEQ ID NO: 27665 - DNA, 647 bp, Zea Mays
ctttaggtacgctagttgatcacgtgatgcggaagtcgagctgagtcgaccacaagatgctgttaatcgtgggtttcttcgcaaagtgatactgatgaatgaacttgaagatttcatgatcggatcaagcgccaggatgtgagatgctctccaagtggacgtcgtctaacaacactaacgtagtgttttatcccaggcaagccccggtgcatttgccacctccttctgttttaaaaacttttatcacttacctgctgcattaggtgataggagttgtgtgaataaacaattgatgcattaccattccttggaatttgattatactccttgctacctgttttataaagagaaccaatgaggcttagccctgcctagagaactaaaacttgattctttttaaaagaatgttgtgtaacactggtatgggtttgttttatgaaaaaggacttgtaatggtgagagcatcatctgcagtgatgaattcatcattcaagtatggtacctctgtcaggtacatggttttgggaaggaaataataatatgagaccagacgttgagcaggaaaggtcgcccgtctgtgtcgattaaggaccgtaccgaaagtaggcttgctgatctaggaccctttaactggccacatgcctcgt

SEQ ID NO: 27666 - DNA, 1025 bp, Zea Mays
ggctttagcctcatccgaccaggcctatctcaaaatctctacaaagaaaatccagccgccgttggcttcttctgtagtgtgtatctccttcacgtcacttcctccccatcacgtttttcctctacccaggtcgagctcgccctactgtgcttgcctgtgctcgtcggccatctccctggtggccgacctcgcccctgccccagccacagcttccccttcggccctgctgctgcaagcactcagcctctcctatggcacacgccccacctgcgacaccgtcgacccccgaagcgaggtccgtgcgacgtttgccaagtgttcgatggaaggtccgaaccgggaacctcgcctttctcgcggatcttcgggtcggtttgtgaattggtacgctagttgatcacgtgatgcggaagtcgagctgagtcgaccacaagatgctgttaatcgtgggtttcttcgcaaagtgatactgatgaatgaacttgaagatttcatgatcggatcaagcgccaggatgtgagatgctctccaagtggacgtcgtctaacaacactaacgtagtgttttatcccaggcaagccccggtgcatttgccacctccttctgttttaaaaacttttatcacttacctgctgcattaggtgataggagttgtgtgaataaacaattgatgcattaccattccttggaatttgattatactccttgctacctgttttataaagagaaccaatgaggcttagccctgcctagagaactaaaacttgattctttttaaaagaatgttgtgtaacactggtatgggtttgttttatgaaaaaggacttgtaatggtgagagcatcatctgcagtgatgaattcatcattcaagtatggtacctctgtcaggtacatggttttgggaaggaaataataatatgagaccagacgttgagcaggaaaggtcgcccgtctgtgtcgattaaggaccgtaccgaaagtaggcttgctgatctaggaccctttaactggccacatgcctcgt

SEQ ID NO: 27667 - DNA, 618 bp, Zea Mays
ataaccttcgcttgaccgtggacgccgtggcaccagtacgaagcatatgattcctgttacttagttagctcaacaacgcgtataaataagcttgttgcccgctggaacaagaacacgacgacgagaacgacgacagcggcaggacgaaggagctagcaggagcaacggcagccctcggctcacgtcacatggcgacgacggcgatcggatcaggacgcgggtccgggacggcggcgctgtgctttctcgtggcctgtctcctcctggcctcgccgtcgtcgttcgttgctgggactgaagcggcggcggcctacggcgcaggcgcaggtgcaggcaggaagctgatgcagacatctgcgggagctatgggataccccggaactaatctaccaccagcgacatacccggcggtgccttgttgcccgtgaactctgatcctacagctgccgcggccgatacaaccctgcatattttatacaaatccaacaaagtaactattacatgcatatgctacgcgcgtgcttgttacagtgtacagtatatatgctgtaggtgtgtgagctatattattgttcaaaataaaaataaaaaaacctagcttgtggcacaaacattttc

SEQ ID NO: 27668 - DNA, 1315 bp, Zea Mays
gggccgatacatgctaatacccgggggacagaaaaatccccacccgaggcgtggaagacacctcgtcgtcctcctcgcgtgcgagcgccgccaccgcgctcacatcagtgtcgcctggcgtcagcgcattgtgcccttcccatcgaactctgccgaccccacatcttcccatacgagtggtgtttctccaaggttcgctgttggccatatccacgtcgtcatcctcgatccagacgagtgtgtgtgccatatccacaggtcttcgacagatttagcaagaatgtttggaagagcatctcctaggatgaacttgatccaatctgcagctatgaaaaaaatatcccccagatctactactaacaagcgcaagaagagaacatcaccaaaagataaagagaaagagttaaagagagactacaaggctcttaaagaggcaagacaacaaagcggggtctcatgggatgagcggttgtgtagaatagaagcagaagaacccatttggaataacctcaccactagtaacgagagacttaagaagtttcggactaaatcttttccactatttgaggctttaggagagctatatgatgggaatattgctgagggaaccatgaattttacttctattgagccttctcgacctcatgtcacacaaccttgtcaaggtgctgctacacagccttctcaagccgctttcacacttacacagccttctcaaatcgctttcacacagccttctctagctgctttcgcacagccttctcgaaccgcttttagacatccttctctacccgctttcccatagtcttctcaagccgcttttgcacagccttctcaaaccactttcacacagccttctgaagacactttcacacagccttctcaagccgctttcacacaaccttctcaagctaatatctcataagccatttctgatgaagatgacgagcttagagtattggatccaacaacccctacatcagtgagcaaaaggacaaaaaatgttggtactggtaattcaagaacaagaattaacaagcatacacaagatgggaatgtggttgagatgatgggaaggtttctagaaatgaaagaaaaacaagctgaggcggaggaaagggccacaactaatgcaaatgaggatgatttccctattcaaacatgcattgctattgtggatggaatggaagagctttctgatgatgagaaggttgatgcttatgatgtgtttaaggatgcccaaaaccgggacattttcatgactgccaaagatgctacgcgcataaaatggttgaggaagaagattgcaagaaca

SEQ ID NO: 27669 - DNA, 679 bp, Zea Mays
gggccgatacatgctaatacccgggggacagaaaaatccccacccgaggcgtggaagacacctcgtcgtcctcctcgcgtgcgagcgccgccaccgcgctcacatcagtgtcgcctggcgtcagcgcattgtgcccttcccatcgaactctgccgaccccacatcttcccatacgagtggtgtttctccaaggttcgctgttggccatatccacgtcgtcatcctcgatccagacgagtgtgtgtgccatatccacaggtcttcgacagatttagggtgaggataagtagcaggctgctcggcctacctcctcattggccagaagctctcctcagttctccactttgcccagcatgagcctcctcgcctcctcgttggtttcctatgaggccagattgagccaacaagaatgtttggaagagcatctcctaggatgaacttgatccaatctgcagctatgaaaaaaatatcccccagatctactactaacaagcgcaagaagagaacatcaccaaaagagcaaactggaatagtggactagaaaagggtttagttgaaattcttcaagaccacaacaatgactgttataagggccaaaatgggtggtcatcggaagcatggaatagaattgtcaagttcttccatgagaaattctcttatgtcacatttacaaaatgcc

SEQ ID NO: 27670 - DNA, 1183 bp, Zea Mays
gggccgatacatgctaatacccgggggacagaaaaatccccacccgaggcgtggaagacacctcgtcgtcctcctcgcgtgcgagcgccgccaccgcgctcacatcagtgtcgcctggcgtcagcgcattgtgcccttcccatcgaactctgccgaccccacatcttcccatacgagtggtgtttctccaaggttcgctgttggccatatccacgtcgtcatcctcgatccagacgagtgtgtgtgccatatccacaggtcttcgacagatttagggtgaggataagtagcaggctgctcggcctacctcctcattggccagaagctctcctcagttctccactttgcccagcatgagcctcctcgcctcctcgttggtttcctatgaggccagattgagccaaattgaattgtgccaaggataagaaaaatggataagcgaactaggaatagaagagaagaggaggacgaggagttaatgctctttcttttccctgctctttatctaattactaatggagggagagagagaaaagagcaaggcatgcttctattctacctggcaaggagagacttaaagagattcttgaagggcatgggaagaaatgtcttgtcgcattccgtatggagcctcgtatattcaaagatatagtaacatttcttagagaagaacacatcctacatgacacaaggggtgttaccatggaagaaaaactaggaatgttccttttcatgttgtcctataatgctagttatgagtatttacaacatgaattcaaacatagcggtgaaactatccatcgacacatccaatcagttttccatgtaatcccactctcatgtatagatttgtgaagcccgccactggaatttcagttcattggaagattagcacggatgaacggttctttccttacttccaaaattgcattggagctattgatggaacacatgttccaattaccatttcggcagaaaagcaagccccctataggaatcgaaaaggcacactaagtcaaaatgtaatgttggtttgtgattttgacttgaacttcacttttatatcatctggttgggaggggttagctacagatgctagggttctaaggtctgtactacttgcaggattccatgttcccgagggaaatattatcttgtcgatggaggatatgttaacacacca

SEQ ID NO: 27671 - DNA, 1054 bp, Zea Mays
gggccgatacatgctaatacccgggggacagaaaaatccccacccgaggcgtggaagacacctcgtcgtcctcctcgcgtgcgagcgccgccaccgcgctcacatcagtgtcgcctggcgtcagcgcattgtgcccttcccatcgaactctgccgaccccacatcttcccatacgagtggtgtttctccaaggttcgctgttggccatatccacgtcgtcatcctcgatccagacgagtgtgtgtgccatatccacaggtcttcgacagatttagattgaattgtgccaaggataagaaaaatggataagcgaactaggaatagaagagaagaggaggacgaggagttaatgctctttcttttccctgctctttatctaattactaatggagggagagagagaaaagagcaaggcatgcttctattctacctggcaaggagagacttaaagagattcttgaagggcatgggaagaaatgtcttgtcgcattccgtatggagcctcgtatattcaaagatatagtaacatttcttagagaagaacacatcctacatgacacaaggggtgttaccatggaagaaaaactaggaatgttccttttcatgttgtcctataatgctagttatgagtatttacaacatgaattcaaacatagcggtgaaactatccatcgacacatccaatcagttttccatgtaatcccactctcatgtatagatttgtgaagcccgccactggaatttcagttcattggaagattagcacggatgaacggttctttccttacttccaaaattgcattggagctattgatggaacacatgttccaattaccatttcggcagaaaagcaagccccctataggaatcgaaaaggcacactaagtcaaaatgtaatgttggtttgtgattttgacttgaacttcacttttatatcatctggttgggaggggttagctacagatgctagggttctaaggtctgtactacttgcaggattccatgttcccgagggaaatattatcttgtcgatggaggatatgttaacacacca

SEQ ID NO: 27672 - DNA, 620 bp, Zea Mays
aatcgcctccccaccccattcttatctcctcgccaccgcttgctatccgtcgcctcgccgcgcgcgcgtacatctacaacgacaggacgccgttcgacaagctggctgacaactacttctgccctgtttgtggagctccgaagagaaggttcagaccctacgagccagcagtctccaagaacgcgaacgccaccgatgccagaaaggcgaggaaggaggagctgaagaaggaggagagcatggggaaagccttgcctattgccatcgtcgtcgggatcattgccttggctggcctgtacttctacctcaacaatgtctacagctaaacgacgaatagatccgtttggtgcggcgaacaggattcatgccgttttgcagtctttttccctttgttaatcgttgcaatgtgctgtcttggtgcatgtactactagggctccaagactgtatacaagttttgctgttcatcttgaaataccacacattacataaccagcagttaacatgaagtgttttacttacttatttccagcgtttagtttggcgttcggattcgaacaggtcatctgtgggctaaacgagtttgatcaagtaaaaatctcagcgagctttatgctgtcc

SEQ ID NO: 27673 - DNA, 628 bp, Zea Mays
cagctttccacattgccagggcagggtccccgacctcgcgcgcgcgccaaaaggcgaaaagggggcgacctggctgtacatctacaacgacaggacgccgttcgacaagctggctgacaactacttctgccctgtttgtggagctccgaagagaaggttcagaccctacgagccagcagtctccaagaacgcgaacgccaccgatgccagaaaggcgaggaaggaggagctgaagaaggaggagagcatggggaaagccttgcctattgccatcgtcgtcgggatcattgccttggctggcctgtacttctacctcaacaatgtctacagctaaacgacgaatagatccgtttggtgcggcgaacaggattcatgccgttttgcagtctttttccctttgttaatcgttgcaatgtgctgtcttggtgcatgtactactagggctccaagactgtatacaagttttgctgttcatcttgaaataccacacattacataaccagcagttaacatgaagtgttttacttacttatttccagcgtttagtttggcgttcggattcgaacaggtcatctgtgggctaaacgagtttgatcaagtaaaaatctcagcgagctttatgctgtcc

SEQ ID NO: 27674 - DNA, 2268 bp, Zea Mays
caaacagtagctgcacaagaacaaaacagcagcagaagcctcgctctccatgccctggcacagagagtgtaagcagcatgcatggatctaacaatgtcaaccacgacgatgtccacgtccccagcgctcgaccatgaccatgaccatggtcaccacctcctctcctcagcctcacccacctccacagactcgccggcaacggcaatgcggccgcggccgccgtctctcccgcctacgatcccggcctgcgacccgcacgacgggccagcaagcctgcagctcatcgaggacctgaccacccacgccggcgccatccagcagcgcgtcctcggcgagatcctcgccatgaacgccggcacggactacgtccgcggcttccttggcgccaacgacgacgacgactccgccgagggacgccacgccgacgagctcgcggccacgttcaaggagcgcgtgccggtcgtggagtacgaggacgtgaagccgtacatcgagcgcatcgccaacggtgccccctcgtcgctcatctcctccaagaccatcaccgagctcctcactagctccggcacatctggcgggcaaccgaagctgatgccatccacagaggaggagctcgaccgcaagaccttcctctacaacctcctcgtccccgtgatgaacaagtacgtggaaggcctggacgaagggaggtgcatgtacctgctgttcgtgaagccggagatgaagacgccgtcggggcttgtggcgcggccggtgctcacgagctactacaagagccggcacttccgggagcggccggacagcccgtacacgcggtacacgagccccaacgaggccatcctgtgcgcggacagcgcgcagagcatgtacgcgcagctgctctgcggcctggcccgccgcggcgaggtgctgcgcgtgggcgccgtcttcgcctccgccttcctgcgcgcgctcaagttcctcgagggccactggcgcgcgctgtgcgacgacatccgcgccggccgcgtggacgcggcgcgcgtcaccgaccgcgcctgccgggacgccgtcgccagggtcgtggcgcggccggacgcggcgctggccgacgccatcgccgcggagtgcgaggccggggccgcgtcgtggcggggcatcgtgcggcggctctggccgcggaccaagtacatcgacgtcatcgtcacggggtccatggcgcagtacgtgcccctgctggagttctacggcggcggcctgccgctggtgtccaccatgtacgcctcctcggagtgctacttcggcatcaacctccgcccgctggaccggccggaggacgtggcctacacgctgctgcccaacatgtgctactacgagttcatcaaggtggagaaggacggcgaggaggtccgggacggggaggtggtggaccttgtcgacgtcgaggtcggagcctactacgagctcgtggtcaccacgttcacaggtctgtaccggtaccgcgtgggcgacatcctacaggtgtcaggcttccacaacgcggcgccgcagttccggttcgtgcaccgccgcaacgtggtgctgagcgtggacaccgacaagacctccgaggacgacctcctccgcgccgtcaccgccgccaagcgcctcctggcgccgctgggcgccatcctctccgagtacaccgcctacgccgggctggactccgtgtaccggcggtgccggagtcgcgaccgctccgtggggccgctggagatccgcgtggtgtccccgggcgccttcgacgagctcatggatctctgcgtctcccacgggtcctcggtcaaccagtacaagacgccccgctgcatcaagcaccccgacgccatcgccgtgctggaggcgcgcgtcgtcggcaggttcttcagcgacaccgtgccgcactgggagccgttcaatgtcgtcgacgctaacgccgccacggaagcggacgcccacggcgccgccaccgccagctgaaacgaaggcgcaagggtgcgctatgcccaacaacggtttagttggtttataatatatatatgatgatataattaattacgtagataattattgtgcatgtctagtgcgatgttcagttcacaggagggtgaatcgtggcgcgtgcgtatgtgtttgttgctgtagtgtgtatgttgtccaattgcattcgagattgatcatttgcttgtcaactggtcattcactcgttgtccctgttatctattatcaacaattcttcagcatttttaagataatggaaaaagttgactt

SEQ ID NO: 27675 - DNA, 1031 bp, Zea Mays
cctagatgcctaggcgatcgagaaggcgctactgttttccatggaaccccacacagcatcaaccagaagagacgcatttcaggcattaaaatagccccagagaacaggtcattggaaggtcagaaatggtaccaatccgtttttttttgtctgccgatatttctgtcagagtcgggctttgtttgtgatcagtttcagatcattgtgtcgatcagaaccttaagcaggcagtccatttgccgcctaatcacagatagcacaagattaacattgcatataaaagttcttgacaacatggtcaattcattcctggtgacatggccatccaacagaagaaaaaaaattgatattgctgatcaacgaaacagttctggacccagattggtcagggaatcagttggtttgtttattctacacctggaagggcatcgaagaaaatctctctttatttctcaccagaatcttcagttgtcagaaggccagctaaagaagggcaaagcttcagatgcatacgcgcataaactaaaagtaaatcatgttcctgtttttgtacaggagaagggatctgattgggcagtggacctggctacctagattttcttgaaatttaagaagcctcagtatcgtgtatttacatgttctttttccagtacgatagatttacttttccgtaaagtggcgtaaaccgtaagtattttttcctcccaacagtcctctcctaacgactaacaaagttcaattcatgcgaaattcggatgtttcattttaaaaaaaggatcttcagtgtgtgaacaaatgtatggatgaatatcactgccctgaagagaccagagaagctggtacctttcacattctgtccgtagaagtgatgcatcatcattttactgaaaccaggtgacgcatctgatgagaattttggctgtgtctgctgctctgctaagaagagagcagacaattgcatagaacagaaaagagacaccaaaaattgaggaggcatgcagccatatatgaagctttgacccataatagat

SEQ ID NO: 27676 - DNA, 1096 bp, Zea Mays
ttcaggggactactggatccacctagatgcctaggcgatcgagaaggcgctactgttttccatgtggaattatccaggtaataaacacaagccgaagaatgcacagtatgcagaagtttgcggatgtcaggtggcactttgtaagaaacaagaatccattatgcattgcagggctatggaatgagttgaaaacaggaaccccacacagcatcaaccagaagagacgcatttcaggcattaaaatagccccagagaacaggtcattggaaggtcagaaatgaaccttaagcaggcagtccatttgccgcctaatcacagatagcacaagattaacattgcatataaaagttcttgacaacatggtcaattcattcctggtgacatggccatccaacagaagaaaaaaaattgatattgctgatcaacgaaacagttctggacccagattggtcagggaatcagttggtttgtttattctacacctggaagggcatcgaagaaaatctctctttatttctcaccagaatcttcagttgtcagaaggccagctaaagaagggcaaagcttcagatgcatacgcgcataaactaaaagtaaatcatgttcctgtttttgtacaggagaagggatctgattgggcagtggacctggctacctagattttcttgaaatttaagaagcctcagtatcgtgtatttacatgttctttttccagtacgatagatttacttttccgtaaagtggcgtaaaccgtaagtattttttcctcccaacagtcctctcctaacgactaacaaagttcaattcatgcgaaattcggatgtttcattttaaaaaaaggatcttcagtgtgtgaacaaatgtatggatgaatatcactgccctgaagagaccagagaagctggtacctttcacattctgtccgtagaagtgatgcatcatcattttactgaaaccaggtgacgcatctgatgagaattttggctgtgtctgctgctctgctaagaagagagcagacaattgcatagaacagaaaagagacaccaaaaattgaggaggcatgcagccatatatgaagctttgacccataatagat

SEQ ID NO: 27677 - DNA, 1086 bp, Zea Mays
ttcaggggactactggatccacctagatgcctaggcgatcgagaaggcgctactgttttccatgtggaattatccaggtaataaacacaagccgaagaatgcacagtatgcagaagtttgcggatgtcaggtggcactttgtaagaaacaagaatccattatgcattgcagggctatggaatgagttgaaaacaggaaccccacacagcatcaaccagaagagacgcatttcaggcattaaaatagccccagagaacaggtcattggaagaaccttaagcaggcagtccatttgccgcctaatcacagatagcacaagattaacattgcatataaaagttcttgacaacatggtcaattcattcctggtgacatggccatccaacagaagaaaaaaaattgatattgctgatcaacgaaacagttctggacccagattggtcagggaatcagttggtttgtttattctacacctggaagggcatcgaagaaaatctctctttatttctcaccagaatcttcagttgtcagaaggccagctaaagaagggcaaagcttcagatgcatacgcgcataaactaaaagtaaatcatgttcctgtttttgtacaggagaagggatctgattgggcagtggacctggctacctagattttcttgaaatttaagaagcctcagtatcgtgtatttacatgttctttttccagtacgatagatttacttttccgtaaagtggcgtaaaccgtaagtattttttcctcccaacagtcctctcctaacgactaacaaagttcaattcatgcgaaattcggatgtttcattttaaaaaaaggatcttcagtgtgtgaacaaatgtatggatgaatatcactgccctgaagagaccagagaagctggtacctttcacattctgtccgtagaagtgatgcatcatcattttactgaaaccaggtgacgcatctgatgagaattttggctgtgtctgctgctctgctaagaagagagcagacaattgcatagaacagaaaagagacaccaaaaattgaggaggcatgcagccatatatgaagctttgacccataatagat

SEQ ID NO: 27678 - DNA, 912 bp, Zea Mays
ctgcgatcggccgctgcgttggaaccccacacagcatcaaccagaagagacgcatttcaggcattaaaatagccccagagaacaggtcattggaagaaccttaagcaggcagtccatttgccgcctaatcacagatagcacaagattaacattgcatataaaagttcttgacaacatggtcaattcattcctggtgacatggccatccaacagaagaaaaaaaattgatattgctgatcaacgaaacagttctggacccagattggtcagggaatcagttggtttgtttattctacacctggaagggcatcgaagaaaatctctctttatttctcaccagaatcttcagttgtcagaaggccagctaaagaagggcaaagcttcagatgcatacgcgcataaactaaaagtaaatcatgttcctgtttttgtacaggagaagggatctgattgggcagtggacctggctacctagattttcttgaaatttaagaagcctcagtatcgtgtatttacatgttctttttccagtacgatagatttacttttccgtaaagtggcgtaaaccgtaagtattttttcctcccaacagtcctctcctaacgactaacaaagttcaattcatgcgaaattcggatgtttcattttaaaaaaaggatcttcagtgtgtgaacaaatgtatggatgaatatcactgccctgaagagaccagagaagctggtacctttcacattctgtccgtagaagtgatgcatcatcattttactgaaaccaggtgacgcatctgatgagaattttggctgtgtctgctgctctgctaagaagagagcagacaattgcatagaacagaaaagagacaccaaaaattgaggaggcatgcagccatatatgaagctttgacccataatagat

SEQ ID NO: 27679 - DNA, 1812 bp, Zea Mays
tttgaaccaaataaaatatcaaggaatgcattaaagttgaaaatacattgatcacacagccaaactccttgggatatttttaagttccacttcaattttccttgcagtagtctgttttctttgcaacaaaagtgaacatcattcctgacagtactctgttttctttgtatgttctgatataatattacatcattcctgaatttcagaattagataagcaaactttagcctttttcaatttcctgttttattatgttttaaaactccatgtagtcagtacagtaacaattcctgacttatgaaactttattcatcttaattttcgaaattctgttctggattcttgattgcctgatatattgctatatgctcatttgagataagtcagatgccatgttcactttgtagaaacctgcacaagttcctacaggtgtgtaacaaacaaaatgatggtttgtacctttatgagatatgatagtgagcatctgagcgggtggaacgagcctgcaacaaaccgagcttggctcagctcgcccatctgacgagcttgaaaaggcggctcgactcgctcctagcgtcggctcggtccgagcggagcgtgttgcgagcccgagccagctcgttgcgctcgagtttttttccagccgatagttgttcctttctataaattcaccttgttctttctcaacatgtatgtagaaatctatgttgtatttcttaagccaaattagcaaatattttgtcagtaggtgtaataagtccggtcgcacctacaccgatggccatacccaacgttgcggagacaaaaacaaggagcatggaagaggaagtaatcaagctgcagaaatgcttacaggacaaggatgagcaactgtgttcatccacaagtagcacggaacagctacaggagaagcaggtgttgcatcagctaagttagctcggatgtagtgcatgtcattgctgaaagagctgaatgagaaggacagctcactcaaagaccatagacttcgagtgaacaatctaggtgagcagcttgatcttctccagaaggatgtacaagcaagggaggtcacacaaatgcaacttaaagatatagttataaggatcgagaccaacatcatggatgaagttgccaaagcttttgaaattgcgatgttgagagggggaatcggaatattgtctactcactggacgaacaaaaccaagaaccttgaatcacagttaaaaagcaccagagaactgatcaggagctgaagaagagggttctgaagcttgaattttgtctctggtcctgtcatcccctggtgtgttcgccaccgcacctaccgctgttactagctcccttgctcttctcttgctgcgactgggatatagcatcgtggatcttgaacctaggccagaatttaggcaggtctagaaccaccatgatgcctggaacatagtcctattttatctgacaactctttcttgtcctgattcttggcggggtttcggcatcttctgataggaccatgctaacaggatgctcaacttttacgctccaggaacccaaatgaaccttcaacttgcttattctgtgagatctgtgagcaagcgagttgtcctagaacagttggctcctcacaatgggtattcgacgctagccccatccctgccacagacttgggaaaggcacagtgatttttatggtgacatgaagacattcctctttaaattatatctttaagcatccatttttcgccctactggtgcatacaagaatttgcaatggagaccttattttcttcacagcatccaagacaatgttcatttc

SEQ ID NO: 27680 - DNA, 1810 bp, Zea Mays
tttgaaccaaataaaatatcaaggaatgcattaaagttgaaaatacattgatcacacagccaaactccttgggatatttttaagttccacttcaattttccttgcagtagtctgttttctttgcaacaaaagtgaacatcattcctgacagtactctgttttctttgtatgttctgatataatattacatcattcctgaatttcagaattagataagcaaactttagcctttttcaatttcctgttttattatgttttaaaactccatgtagtcagtacagtaacaattcctgacttatgaaactttattcatcttaattttcgaaattctgttctggattcttgattgcctgatatattgctatatgctcatttgagataagtcagatgccatgttcactttgtagaaacctgcacaagttcctacaggtgtgtaacaaacaaaatgatggtttgtacctttatgagatatgatagtgagcatctgagcgggtggaacgagcctgcaacaaaccgagcttggctcagctcgcccatctgacgagcttgaaaaggcggctcgactcgctcctagcgtcggctcggtccgagcggagcgtgttgcgagcccgagccagctcgttgcgctcgagtttttttccagccgatagttgttcctttctataaattcaccttgttctttctcaacatgtatgtagaaatctatgttgtatttcttaagccaaattagcaaatattttgtcagtaggtgtaataagtccggtcgcacctacaccgatggccatacccaacgttgcggagacaaaaacaaggagcatggaagaggaagtaatcaagctgcagaaatgcttacaggacaaggatgagcaactgtgttcatccacaagtagcacggaacagtaccatcatgagttggatgatcttagaacacatctgtcatttactcaagctacaggagaagcagagctgaatgagaaggacagctcactcaaagaccatagacttcgagtgaacaatctaggtgagcagcttgatcttctccagaaggatgtacaagcaagggaggtcacacaaatgcaacttaaagatatagttataaggatcgagaccaacatcatggatgaagttgccaaagcttttgaaattgcgatgttgagagggggaatcggaatattgtctactcactggacgaacaaaaccaagaaccttgaatcacagttaaaaagcaccagagaactgatcaggagctgaagaagagggttctgaagcttgaattttgtctctggtcctgtcatcccctggtgtgttcgccaccgcacctaccgctgttactagctcccttgctcttctcttgctgcgactgggatatagcatcgtggatcttgaacctaggccagaatttaggcaggtctagaaccaccatgatgcctggaacatagtcctattttatctgacaactctttcttgtcctgattcttggcggggtttcggcatcttctgataggaccatgctaacaggatgctcaacttttacgctccaggaacccaaatgaaccttcaacttgcttattctgtgagatctgtgagcaagcgagttgtcctagaacagttggctcctcacaatgggtattcgacgctagccccatccctgccacagacttgggaaaggcacagtgatttttatggtgacatgaagacattcctctttaaattatatctttaagcatccatttttcgccctactggtgcatacaagaatttgcaatggagaccttattttcttcacagcatccaagacaatgttcatttc

SEQ ID NO: 27681 - DNA, 2451 bp, Zea Mays
ataattgataagattggcaccagtaaacatctctttgaaccaaataaaatatcaaggaatgcattaaagttgaaaatacattgatcacacagccaaactccttgggatatttttaagttccacttcaattttccttgcagtagtctgttttctttgcaacaaaagtgaacatcattcctgacagtactctgttttctttgtatgttctgatataatattacatcattcctgaatttcagaattagataagcaaactttagcctttttcaatttcctgttttattatgttttaaaactccatgtagtcagtacagtaacaattcctgacttatgaaactttattcatcttaattttcgaaattctgttctggattcttgattgcctgatatattgctatatgctcatttgagataagtcagatgccatgttcactttgtagaaacctgcacaagttcctacaggtgtgtaacaaacaaaatgatggtttgtacctttatgagatatgatagtgagcatctgagcgggtggaacgagcctgcaacaaaccgagcttggctcagctcgcccatctgacgagcttgaaaaggcggctcgactcgctcctagcgtcggctcggtccgagcggagcgtgttgcgagcccgagccagctcgttgcgctcgagtttttttccagccgatagttgttcctttctataaattcaccttgttctttctcaacatgtatgtagaaatctatgttgtatttcttaagccaaattagcaaatattttgtcagtaggtgtaataagtccggtcgcacctacaccgatggccatacccaacgttgcggagacaaaaacaaggagcatggaagaggaagtaatcaagctgcagaaatgcttacaggacaaggatgagcaactgtgttcatccacaagtagcacggaacagtaccatcatgagttggatgatcttagaacacatctgtcatttactcaagctacaggagaagcagagctgaatgagaaggacagctcactcaaagaccatagacttcgagtgaacaatctaggtgagcagcttgatcttctccagaaggatgtacaagcaagggaggtcacacaaatgcaacttaaagatatagttataaggatcgagaccaacatcatggatgaagttgccaaagcttttgaaattgcgatgttgagagggggaatcggaatattgtctactcactggacgaacaaaaccaagaaccttgaatcacagatattattatgcgctcttgtcacaacaattgagaacatgaacctgggggcatggcgtggaggggcacccacggtagctgatttgtttctctacgtccagttcttggaaaaggctacctgcactaattcagcattgggaagtgtcatgtgatgacaccttagatccaacagtacctcttataaactatcagaccttcccaataaaagatggttgagtttcatggtaaacttatttatatactacactaaacaagctaactggctaagcttagcagaaaatgttcactacgatctgccaaaaccacttataatttgtgccagatggaggagaaactaatcttttaaactgaagcatatgcatagctgaaactaaattcttatttgaagcataattttagttaagaaaactaactttttgtgtgttcgcgctctgaatccgcacaaacagtttcctgtttctctatgaaccctaacccccccaatctcggcggagatcaagtgcaccccctcgcccctcccctggttggtggatgttggatatagaggcgttgcagaaggtattgtgcaggaaaacatagcttctgctattcgttggtttcccctgttcacgtgtcattctctgtttctcttttctcttaaaaaatggaaaacatattgtcccttcagttcaccacttgctcggtggcaattgcagttacttatcttgcagttacttcaaacatggtggccacatcttttgatctgtgtgtgcttataattgtagatttgaaagatgcaacccattgcgataatgattgttttatgtgatatgattagcaaaaatattagattaggcatatttgagcatccctgagaactgccggtgagttgggtctgtgatagatttcttcatctccgagaaatggaattttactcattcaatttatttccaggaacccaaatgaaccttcaacttgcttattctgtgagatctgtgagcaagcgagttgtcctagaacagttggctcctcacaatgggtattcgacgctagccccatccctgccacagacttgggaaaggcacagtgatttttatggtgacatgaagacattcctctttaaattatatctttaagcatccatttttcgccctactggtgcatacaagaatttgcaatggagaccttattttcttcacagcatccaagacaatgttcatttc

SEQ ID NO: 27682 - DNA, 1538 bp, Zea Mays
gatgaagtggaggagggtcaacaacggccgtgcgtgcatgccggcgacagcacacgtacggatcatcttgaaaataataacaaaaaagtgcgacaagtcgatgatccggaagcggtacatgcacctgacggaggagttcctgtcggagaacccgagcatgtgcgcgtacatggcgccgtcgctggacgcgcggcaggacgtggtggtgacggaggtgccgaagctggggaaggcggcggcgcagaaggcgatcaaggagtgggggcagcccaagtcgcggatcacgcacctggtgttctgcaccacgtcgggggtggacatgccgggcgccgactaccagctgaccaaggcgctggggctgcgcccgtccgtgaaccgcctgatgatgtaccagcaggggtgcttcgcgggcggcacggtgctgcgcgtggccaaggacctggcggagaacaaccgcggggcgagggtcctggtggtgtgctcggagatcacggccgtgacgttccgcgggccgtccgagtcgcacctggactcgctcgtggggcaggcgctgttcggcgacggcgcggcggccgtcgtggtgggcgccgacccggacgggcgggtcgagcgcccgctgttccagctcgtgtcggcggcgcagaccatcctgcccgactcggagggcgccatcgacggccacctccgcgaggtggggctgacgttccacctgctcaaggacgtgcccgggctcatctccaagaacatcgagcgcgcgctggaggacgcgttcgagccgctcggcatctccgactggaactccatcttctgggtggcgcaccccggcgggcccgccatcctggaccaggtggaggccagggtcgggctggacaaggccaggatgcgcgccacccgccacgtcctctccgagtacggcaacatgtccagcgcctgcgtgctcttcatcctggacgagatgcgcaagcgctccgccgaggacggccaggccaccaccggcgaggggctcgactggggcgtcctcttcggcttcggcccgggcctcaccgtcgagaccgtcgtgctccacagcgtccccatcaccaccggagcgcccaccgccgcctgagtcgtccatctatcctcgcgatcgctccagacatgaacgacccgacctacgaataatgtatctgcgtaattaattactatctgtcttgtgtcctagtagctgttttaaaacccttaattaattttattatgggcgagctagctcaagagtggagtcataaaaccgcatggatggtgaggtattgtatagtacctgtgtaagacaagcttggctggtttttttattttatattttaatctgtttgctcaagacaaaacaaaaaaaaaaatgaattgttgagctgtcattaatttgcagtgcaccagctcaagttggttgtactcctatcctatgtatgaaatgaaatcccttctagtagtatctaaaaaggaattgtagtaggctgtcgttttccagtgcgtgcacctcaatagtgagaggtctattgccgtcc

SEQ ID NO: 27683 - DNA, 4140 bp, Zea Mays
atcacacggccgtgaggagcaactctgttcctcatctcccgttcaccccgcgggcgcagggcgcgctctctcctcgtggcgatcgccgaccgtagcggccgctgcccgggttttcgtcggccgcttcgccatgtcttcgctggacccttcgccagcgacgagcacccaacagcagaagcaattggagagtttggtaaatctactgacgcagggaagcaggttctaccgcaaagcatataatgaactgttctcaggtgtaactactgagcaggatccggattcatcgactaatattcctgagtatatgctttttgggtggcatctcttcttaatgctccatttgagatcaccagaattgttcaaggacctggtgtcctgcatccatggattagttgctgtgttggccatacttttgattcacgtgccagctaaatttaggagcttcacgattgaaggctcttctcacttaatcaaacaaactgagaaaggcgtggatcttattgcttcattatgtcataactatcatacctctgaagaacgtttgaaagaaatgttgcacaagtctcacaatgcaatagaagacattttccatatgaaagcactaagtgcttcagagtgcaaaccagaaaatttggataagatagacacagatgacctgatgtatttcaaaggtctgattgatatggaatgtttccagtcaaatttggaaaaaatggagaaactatgtaattctaatagctgtaaaggggagcttgattttaaatcaattttgatcaataatgattatattccctatgatgagaactcgacgggggattccaccaatttaggacattcaaagtgtgcctttgaaacattggcatctcccacaaagacaataaagaacatgctgactgttcctagttctcctttgtcaccagccaccggtggttcagtcaagattgtgcaaatgacaccagtaacttctgccatgacgacagctaagtggcttcgtgaggtgatatcttcattgccagataagccttcatctaagcttcagcagtttctgtcatcatgcgatagggatttgacaaatgctgtcacagaaagggtcagcatagttttggaagcaatttttccaaccaaatcttctgccaatcggggtgtatcgttaggtctcaattgtgcaaatgcctttgacattccgtgggcagaagccagaaaagtggaggcttccaagttgtactatagggtattagaggcaatctgcagagcggagttacaaaacagcaatgtaaataatctaactccattgctgtcaaatgagcgtttccaccgatgtttgattgcatgttcagcggacttagtattggcgacacataagacagtcatcatgatgtttcctgctgttcttgagagtaccggtctaactgcatttgatttgagcaaaataattgagaactttgtgagacatgaagagaccctcccaagagaattgaaaaggcacctaaattccttagaagaacagcttttggaaagcatggcatgggagaaaggttcatcattgtataactcactgattgttgccaggccatctgttgcttcagaaataaaccgccttggtcttttggctgaaccaatgccatctcttgatgacttagtgtcaaggcagaatgttcgtatcgagggcttgcctgctacaccatctaaaaaacgtgctgctggtccagatgacaacgctgatcctcgatcaccaaagagatcgtgcaatgaatctaggaacacagtagtagagcgcaatttgcagacacctccacccaagcaaagccacatggtgtcaactagtttgaaagcaaaatgccatccactccagtccacatttgcaagtccaactgtctgtaatcctgttggtgggaatgaaaaatgtgctgacgtgacaattcatatattcttttccaagattctgaagttggctgctattagaataagaaacttgtgcgaaagggttcaatgtgtggaacagacagagcgtgtctataatgtcttcaagcagattcttgagcaacagacaacattattttttaatagacacatcgatcaacttatcctttgctgtctttatggtgttgcaaaggtttgtcaattagaactcacattcagggagatactcaacaattacaaaagagaagcacaatgcaagccagaagttttttcaagtatctatattgggagtacgaaccgtaatgggcagcgaagcctttcctggtgtcactaatatcatctggtactcatccagaagacaagaagaatgctagtggccaaattcctggatcacccaagccatctcctttcccaaatttaccagatatgtccccgaagaaagtttcagcatctcataatgtatatgtgtctcctttgcggcaaaccaagttggatctactgctgtcaccaagttccaggagtttttatgcatgcattggtgaaggcacccatgcttatcagagcccatctaaggatttggctgctataaatagccgcctaaattataatggcaggaaagtaaacagtcgattaaatttcgacatggtgagtgactcagtggtagccggcagtctgggccagataaatggtggttctacctcggatcctgcagctgcatttagccccctttcaaagaagagagagacagatacttgatcaattataaatggtggcctctctcgtatatagctcacagatccgtgctccgtagcagtctattcttctgaataagtggattaactggagcgatttaactgtacatgtatgtgttagtgagaagcagcagtttttaggcagcaaactgtttcaagttagcttttgagctatcaccatttctctgctgattgaacatatccgctgtgtagagtgctaatgaatctttagttttcattgggctgacataacaaatctttatcctagttggctggttgttgggaggcattcatcagggttatatttggttgtcaaaaagtactgtacttaattcacatctttcacatttttcactagcaatagcagccccaaattgctttcctgactaggaacatattctttacaggtataagcatgccaactctaaactatatgaatcctttttatattctcatttttaagtacttctctgtttctgctacttttgtactgtatatttccagcttctccatcagactgatgatcccatattcagtgtgctgcaagtgatttgacatatgtggcttatccttcagtgagatgaagaaaacctgaaatgctatcaccatttaaaacattggcttctggaagttcaggtgattagcaggagacgttctgacattgccattgacatgtacggtagtgatggcaggagacgttcttaaacagcagctgctccttcagcttgtaatgtctgattgtattgaccaagagcatccaccttgccttatggtactaactgaatgagctggtgacgctgactcatctgcataatggcagatgcttaaccatctttaggagctcatgtcatgattccagctgcaccgtgtgcaaatgtgaaggccctgcaagggctttccaggccgcaccaatcctgcttgcttcttgaagatacatatggtgccacctaaataaaagctgtttctggttatgtctgtccttgacatgtcaacagattagtgttgggttgcagtcatgtggtgtttaagtcttggagaaggcgagaagtcattgctgccagcattgtgatcgtcaggcacagaagtactcaaaagtgagagctacttgttgcgagcaaacggagggcgatataggttgatagccaatttcagttctctatatacaagcagcggattttgtttagagttagcttttgagatgcatcatttctttcacatctgattctgtgtgttgtaactcggagtcgcgtagaagttagaatgctaactgaccttaattttcaccgaataatttgctagcgtttttcagtatgaaatccttgtcttaaattttggaatgtacctgtcatgggtatattttgtctttagatacttgtcatgtttttaatcatttattacatatttatagttttgactatcttttttcatctctatcaaatcatattcccttgctttcggaatttgttcc

SEQ ID NO: 27684 - DNA, 4314 bp, Zea Mays
gtcatcgttcgcatcacacggccgtgaggagcaactctgttcctcatctcccgttcaccccgcgggcgcagggcgcgctctctcctcgtggcgatcgccgaccgtagcggccgctgcccgggttttcgtcggccgcttcgccatgtcttcgctggacccttcgccagcgacgagcacccaacagaagcaattggagagtttggtaaatctactgacgcagggaagcaggttctaccgcaaagcatataatgaactgttctcaggtgtaactactgagcaggatccggattcatcgactaatattcctgagtatatgctttttgggtggcatctcttcttaatgctccatttgagatcaccagaattgttcaaggacctggtgtcctgcatccatggattagttgctgtgttggccatacttttgattcacgtgccagctaaatttaggagcttcacgattgaaggctcttctcacttaatcaaacaaactgagaaaggcgtggatcttattgcttcattatgtcataactatcatacctctgaagaacgtttgaaagaaatgttgcacaagtctcacaatgcaatagaagacattttccatatgaaagcactaagtgcttcagagtgcaaaccagaaaatttggataagatagacacagatgacctgatgtatttcaaaggtctgattgatatggaatgtttccagtcaaatttggaaaaaatggagaaactatgtaattctaatagctgtaaaggggagcttgattttaaatcaattttgatcaataatgattatattccctatgatgagaactcgacgggggattccaccaatttaggacattcaaagtgtgcctttgaaacattggcatctcccacaaagacaataaagaacatgctgactgttcctagttctcctttgtcaccagccaccggtggttcagtcaagattgtgcaaatgacaccagtaacttctgccatgacgacagctaagtggcttcgtgaggtgatatcttcattgccagataagccttcatctaagcttcagcagtttctgtcatcatgcgatagggatttgacaaatgctgtcacagaaagggtcagcatagttttggaagcaatttttccaaccaaatcttctgccaatcggggtgtatcgttaggtctcaattgtgcaaatgcctttgacattccgtgggcagaagccagaaaagtggaggcttccaagttgtactatagggtattagaggcaatctgcagagcggagttacaaaacagcaatgtaaataatctaactccattgctgtcaaatgagcgtttccaccgatgtttgattgcatgttcagcggacttagtattggcgacacataagacagtcatcatgatgtttcctgctgttcttgagagtaccggtctaactgcatttgatttgagcaaaataattgagaactttgtgagacatgaagagaccctcccaagagaattgaaaaggcacctaaattccttagaagaacagcttttggaaagcatggcatgggagaaaggttcatcattgtataactcactgattgttgccaggccatctgttgcttcagaaataaaccgccttggtcttttggctgaaccaatgccatctcttgatgacttagtgtcaaggcagaatgttcgtatcgagggcttgcctgctacaccatctaaaaaacgtgctgctggtccagatgacaacgctgatcctcgatcaccaaagagatcgtgcaatgaatctaggaacacagtagtagagcgcaatttgcagacacctccacccaagcaaagccacatggtgtcaactagtttgaaagcaaaatgccatccactccagtccacatttgcaagtccaactgtctgtaatcctgttggtgggaatgaaaaatgtgctgacgtgacaattcatatattcttttccaagattctgaagttggctgctattagaataagaaacttgtgcgaaagggttcaatgtgtggaacagacagagcgtgtctataatgtcttcaagcagattcttgagcaacagacaacattattttttaatagacacatcgatcaacttatcctttgctgtctttatggtgttgcaaaggtttgtcaattagaactcacattcagggagatactcaacaattacaaaagagaagcacaatgcaagccagaagttttttcaagtatctatattgggagtacgaaccgtaatggggtattagtatcgcgccatgttggtatcattactttttacaatgaggtatttgttccagcagcgaagcctttcctggtgtcactaatatcatctggtactcatccagaagacaagaagaatgctagtggccaaattcctggatcacccaagccatctcctttcccaaatttaccagatatgtccccgaagaaagtttcagcatctcataatgtatatgtgtctcctttgcggcaaaccaagttggatctactgctgtcaccaagttccaggagtttttatgcatgcattggtgaaggcacccatgcttatcagagcccatctaaggatttggctgctataaatagccgcctaaattataatggcaggaaagtaaacagtcgattaaatttcgacatggtgagtgactcagtggtagccggcagtctgggccagataaatggtggttctacctcggatcctgcagctgcatttagccccctttcaaagaagagagagacagatacttgatcaattataaatggtggcctctctcgtatatagctcacagatccgtgctccgtagcagtctattcttctgaataagtggattaactggagcgatttaactgtacatgtatgtgttagtgagaagcagcagtttttaggcagcaaactgtttcaagttagcttttgagctatcaccatttctctgctgattgaacatatccgctgtgtagagtgctaatgaatctttagttttcattgggctgacataacaaatctttatcctagttggctggttgttgggaggcattcatcagggttatatttggttgtcaaaaagtactgtacttaattcacatctttcacatttttcactagcaatagcagccccaaattgctttcctgactaggaacatattctttacagcttctccatcagactgatgatcccatattcagtgtgctgcaagtgatttgacatatgtggcttatccttcaggacgattggttttctgcatcaatcaatcttttttaggacaagatatttttgtatgctacacttcccaaattgcaattaatccagaagtctaccttgttttattctattagttctcagcaacagtgaatgaatatgaatcagtcatgctgatagatgttcatctggttattccaaacaatctgacatcgcatctctttctgcaagtgagatgaagaaaacctgaaatgctatcaccatttaaaacattggcttctggaagttcaggtgattagcaggagacgttctgacattgccattgacatgtacggtagtgatggcaggagacgttcttaaacagcagctgctccttcagcttgtaatgtctgattgtattgaccaagagcatccaccttgccttatggtactaactgaatgagctggtgacgctgactcatctgcataatggcagatgcttaaccatctttaggagctcatgtcatgattccagctgcaccgtgtgcaaatgtgaaggccctgcaagggctttccaggccgcaccaatcctgcttgcttcttgaagatacatatggtgccacctaaataaaagctgtttctggttatgtctgtccttgacatgtcaacagattagtgttgggttgcagtcatgtggtgtttaagtcttggagaaggcgagaagtcattgctgccagcattgtgatcgtcaggcacagaagtactcaaaagtgagagctacttgttgcgagcaaacggagggcgatataggttgatagccaatttcagttctctatatacaagcagcggattttgtttagagttagcttttgagatgcatcatttctttcacatctgattctgtgtgttgtaactcggagtcgcgtagaagttagaatgctaactgaccttaattttcaccgaataatttgctagcgtttttcagtatgaaatccttgtcttaaattttggaatgtacctgtcatgggtatattttgtctttagatacttgtcatgtttttaatcatttattacatatttatagttttgactatcttttttcatctctatcaaatcatattcccttgctttcggaatttgttcc

SEQ ID NO: 27685 - DNA, 3784 bp, Zea Mays
gtcatcgttcgcatcacacggccgtgaggagcaactctgttcctcatctcccgttcaccccgcgggcgcagggcgcgctctctcctcgtggcgatcgccgaccgtagcggccgctgcccgggttttcgtcggccgcttcgccatgtcttcgctggacccttcgccagcgacgagcacccaacagaagcaattggagagtttggtaaatctactgacgcagggaagcaggttctaccgcaaagcatataatgaactgttctcaggtgtaactactgagcaggatccggattcatcgactaatattcctgagtatatgctttttgggtggcatctcttcttaatgctccatttgagatcaccagaattgttcaaggacctggtgtcctgcatccatggattagttgctgtgttggccatacttttgattcacgtgccagctaaatttaggagcttcacgattgaaggctcttctcacttaatcaaacaaactgagaaaggcgtggatcttattgcttcattatgtcataactatcatacctctgaagaacgtttgaaagaaatgttgcacaagtctcacaatgcaatagaagacattttccatatgaaagcactaagtgcttcagagtgcaaaccagaaaatttggataagatagacacagatgacctgatgtatttcaaaggtctgattgatatggaatgtttccagtcaaatttggaaaaaatggagaaactatgtaattctaatagctgtaaaggggagcttgattttaaatcaattttgatcaataatgattatattccctatgatgagaactcgacgggggattccaccaatttaggacattcaaagtgtgcctttgaaacattggcatctcccacaaagacaataaagaacatgctgactgttcctagttctcctttgtcaccagccaccggtggttcagtcaagattgtgcaaatgacaccagtaacttctgccatgacgacagctaagtggcttcgtgaggtgatatcttcattgccagataagccttcatctaagcttcagcagtttctgtcatcatgcgatagggatttgacaaatgctgtcacagaaagggtcagcatagttttggaagcaatttttccaaccaaatcttctgccaatcggggtgtatcgttaggtctcaattgtgcaaatgcctttgacattccgtgggcagaagccagaaaagtggaggcttccaagttgtactatagggtattagaggcaatctgcagagcggagttacaaaacagcaatgtaaataatctaactccattgctgtcaaatgagcgtttccaccgatgtttgattgcatgttcagcggacttagtattggcgacacataagacagtcatcatgatgtttcctgctgttcttgagagtaccggtctaactgcatttgatttgagcaaaataattgagaactttgtgagacatgaagagaccctcccaagagaattgaaaaggcacctaaattccttagaagaacagcttttggaaagcatggcatgggagaaaggttcatcattgtataactcactgattgttgccaggccatctgttgcttcagaaataaaccgccttggtcttttggctgaaccaatgccatctcttgatgacttagtgtcaaggcagaatgttcgtatcgagggcttgcctgctacaccatctaaaaaacgtgctgctggtccagatgacaacgctgatcctcgatcaccaaagagatcgtgcaatgaatctaggaacacagtagtagagcgcaatttgcagacacctccacccaagcaaagccacatggtgtcaactagtttgaaagcaaaatgccatccactccagtccacatttgcaagtccaactgtctgtaatcctgttggtgggaatgaaaaatgtgctgacgtgacaattcatatattcttttccaagattctgaagttggctgctattagaataagaaacttgtgcgaaagggttcaatgtgtggaacagacagagcgtgtctataatgtcttcaagcagattcttgagcaacagacaacattattttttaatagacacatcgatcaacttatcctttgctgtctttatggtgttgcaaaggtttgtcaattagaactcacattcagggagatactcaacaattacaaaagagaagcacaatgcaagccagaagttttttcaagtatctatattgggagtacgaaccgtaatggggtattagtatcgcgccatgttggtatcattactttttacaatgaggtatttgttccagcagcgaagcctttcctggtgtcactaatatcatctggtactcatccagaagacaagaagaatgctagtggccaaattcctggatcacccaagccatctcctttcccaaatttaccagatatgtccccgaagaaagtttcagcatctcataatgtatatgtgtctcctttgcggcaaaccaagttggatctactgctgtcaccaagttccaggagtttttatgcatgcattggtgaaggcacccatgcttatcagagcccatctaaggatttggctgctataaatagccgcctaaattagtatgaatctcaaaatgacaatttcttttgtccaacatgatttcatgtctacaacactaatttatatcactccatttcgtgttaaatttgcagtaatggcaggaaagtaaacagtcgattaaatttcgacatggtgagtgactcagtggtagccggcagtctgggccagataaatggtggttctacctcggatcctgcagctgcatttagccccctttcaaagaagagagagacagatacttgatcaattataaatggtggcctctctcgtatatagctcacagatccgtgctccgtagcagtctattcttctgaataagtggattaactggagcgatttaactgtacatgtatgtgttagtgagaagcagcagtttttaggcagcaaactgtttcaagttagcttttgagctatcaccatttctctgctgattgaacatatccgctgtgtagagtgctaatgaatctttagttttcattgggctgacataacaaatctttatcctagttggctggttgttgggaggcattcatcagggttatatttggttgtcaaaaagtactgtacttaattcacatctttcacatttttcactagcaatagcagccccaaattgctttcctgactaggaacatattctttacagcttctccatcagactgatgatcccatattcagtgtgctgcaagtgatttgacatatgtggcttatccttcagattagtgttgggttgcagtcatgtggtgtttaagtcttggagaaggcgagaagtcattgctgccagcattgtgatcgtcaggcacagaagtactcaaaagtgagagctacttgttgcgagcaaacggagggcgatataggttgatagccaatttcagttctctatatacaagcagcggattttgtttagagttagcttttgagatgcatcatttctttcacatctgattctgtgtgttgtaactcggagtcgcgtagaagttagaatgctaactgaccttaattttcaccgaataatttgctagcgtttttcagtatgaaatccttgtcttaaattttggaatgtacctgtcatgggtatattttgtctttagatacttgtcatgtttttaatcatttattacatatttatagttttgactatcttttttcatctctatcaaatcatattcccttgctttcggaatttgttcc

SEQ ID NO: 27686 - DNA, 4110 bp, Zea Mays
gtcatcgttcgcatcacacggccgtgaggagcaactctgttcctcatctcccgttcaccccgcgggcgcagggcgcgctctctcctcgtggcgatcgccgaccgtagcggccgctgcccgggttttcgtcggccgcttcgccatgtcttcgctggacccttcgccagcgacgagcacccaacagaagcaattggagagtttggtaaatctactgacgcagggaagcaggttctaccgcaaagcatataatgaactgttctcaggtgtaactactgagcaggatccggattcatcgactaatattcctgagtatatgctttttgggtggcatctcttcttaatgctccatttgagatcaccagaattgttcaaggacctggtgtcctgcatccatggattagttgctgtgttggccatacttttgattcacgtgccagctaaatttaggagcttcacgattgaaggctcttctcacttaatcaaacaaactgagaaaggcgtggatcttattgcttcattatgtcataactatcatacctctgaagaacgtttgaaagaaatgttgcacaagtctcacaatgcaatagaagacattttccatatgaaagcactaagtgcttcagagtgcaaaccagaaaatttggataagatagacacagatgacctgatgtatttcaaaggtctgattgatatggaatgtttccagtcaaatttggaaaaaatggagaaactatgtaattctaatagctgtaaaggggagcttgattttaaatcaattttgatcaataatgattatattccctatgatgagaactcgacgggggattccaccaatttaggacattcaaagtgtgcctttgaaacattggcatctcccacaaagacaataaagaacatgctgactgttcctagttctcctttgtcaccagccaccggtggttcagtcaagattgtgcaaatgacaccagtaacttctgccatgacgacagctaagtggcttcgtgaggtgatatcttcattgccagataagccttcatctaagcttcagcagtttctgtcatcatgcgatagggatttgacaaatgctgtcacagaaagggtcagcatagttttggaagcaatttttccaaccaaatcttctgccaatcggggtgtatcgttaggtctcaattgtgcaaatgcctttgacattccgtgggcagaagccagaaaagtggaggcttccaagttgtactatagggtattagaggcaatctgcagagcggagttacaaaacagcaatgtaaataatctaactccattgctgtcaaatgagcgtttccaccgatgtttgattgcatgttcagcggacttagtattggcgacacataagacagtcatcatgatgtttcctgctgttcttgagagtaccggtctaactgcatttgatttgagcaaaataattgagaactttgtgagacatgaagagaccctcccaagagaattgaaaaggcacctaaattccttagaagaacagcttttggaaagcatggcatgggagaaaggttcatcattgtataactcactgattgttgccaggccatctgttgcttcagaaataaaccgccttggtcttttggctgaaccaatgccatctcttgatgacttagtgtcaaggcagaatgttcgtatcgagggcttgcctgctacaccatctaaaaaacgtgctgctggtccagatgacaacgctgatcctcgatcaccaaagagatcgtgcaatgaatctaggaacacagtagtagagcgcaatttgcagacacctccacccaagcaaagccacatggtgtcaactagtttgaaagcaaaatgccatccactccagtccacatttgcaagtccaactgtctgtaatcctgttggtgggaatgaaaaatgtgctgacgtgacaattcatatattcttttccaagattctgaagttggctgctattagaataagaaacttgtgcgaaagggttcaatgtgtggaacagacagagcgtgtctataatgtcttcaagcagattcttgagcaacagacaacattattttttaatagacacatcgatcaacttatcctttgctgtctttatggtgttgcaaaggtttgtcaattagaactcacattcagggagatactcaacaattacaaaagagaagcacaatgcaagccagaagttttttcaagtatctatattgggagtacgaaccgtaatggggtattagtatcgcgccatgttggtatcattactttttacaatgaggtatttgttccagcagcgaagcctttcctggtgtcactaatatcatctggtactcatccagaagacaagaagaatgctagtggccaaattcctggatcacccaagccatctcctttcccaaatttaccagatatgtccccgaagaaagtttcagcatctcataatgtatatgtgtctcctttgcggcaaaccaagttggatctactgctgtcaccaagttccaggagtttttatgcatgcattggtgaaggcacccatgcttatcagagcccatctaaggatttggctgctataaatagccgcctaaattataatggcaggaaagtaaacagtcgattaaatttcgacatggtgagtgactcagtggtagccggcagtctgggccagataaatggtggttctacctcggatcctgcagctgcatttagccccctttcaaagaagagagagacagatacttgatcaattataaatggtggcctctctcgtatatagctcacagatccgtgctccgtagcagtctattcttctgaataagtggattaactggagcgatttaactgtacatgtatgtgttagtgagaagcagcagtttttaggcagcaaactgtttcaagttagcttttgagctatcaccatttctctgctgattgaacatatccgctgtgtagagtgctaatgaatctttagttttcattgggctgacataacaaatctttatcctagttggctggttgttgggaggcattcatcagggttatatttggttgtcaaaaagtactgtacttaattcacatctttcacatttttcactagcaatagcagccccaaattgctttcctgactaggaacatattctttacagcttctccatcagactgatgatcccatattcagtgtgctgcaagtgatttgacatatgtggcttatccttcagtgagatgaagaaaacctgaaatgctatcaccatttaaaacattggcttctggaagttcaggtgattagcaggagacgttctgacattgccattgacatgtacggtagtgatggcaggagacgttcttaaacagcagctgctccttcagcttgtaatgtctgattgtattgaccaagagcatccaccttgccttatggtactaactgaatgagctggtgacgctgactcatctgcataatggcagatgcttaaccatctttaggagctcatgtcatgattccagctgcaccgtgtgcaaatgtgaaggccctgcaagggctttccaggccgcaccaatcctgcttgcttcttgaagatacatatggtgccacctaaataaaagctgtttctggttatgtctgtccttgacatgtcaacagattagtgttgggttgcagtcatgtggtgtttaagtcttggagaaggcgagaagtcattgctgccagcattgtgatcgtcaggcacagaagtactcaaaagtgagagctacttgttgcgagcaaacggagggcgatataggttgatagccaatttcagttctctatatacaagcagcggattttgtttagagttagcttttgagatgcatcatttctttcacatctgattctgtgtgttgtaactcggagtcgcgtagaagttagaatgctaactgaccttaattttcaccgaataatttgctagcgtttttcagtatgaaatccttgtcttaaattttggaatgtacctgtcatgggtatattttgtctttagatacttgtcatgtttttaatcatttattacatatttatagttttgactatcttttttcatctctatcaaatcatattcccttgctttcggaatttgttcc

SEQ ID NO: 27687 - DNA, 4206 bp, Zea Mays
gtcatcgttcgcatcacacggccgtgaggagcaactctgttcctcatctcccgttcaccccgcgggcgcagggcgcgctctctcctcgtggcgatcgccgaccgtagcggccgctgcccgggttttcgtcggccgcttcgccatgtcttcgctggacccttcgccagcgacgagcacccaacagcagaagcaattggagagtttggtaaatctactgacgcagggaagcaggttctaccgcaaagcatataatgaactgttctcaggtgtaactactgagcaggatccggattcatcgactaatattcctgagtatatgctttttgggtggcatctcttcttaatgctccatttgagatcaccagaattgttcaaggacctggtgtcctgcatccatggattagttgctgtgttggccatacttttgattcacgtgccagctaaatttaggagcttcacgattgaaggctcttctcacttaatcaaacaaactgagaaaggcgtggatcttattgcttcattatgtcataactatcatacctctgaagaacgtttgaaagaaatgttgcacaagtctcacaatgcaatagaagacattttccatatgaaagcactaagtgcttcagagtgcaaaccagaaaatttggataagatagacacagatgacctgatgtatttcaaaggtctgattgatatggaatgtttccagtcaaatttggaaaaaatggagaaactatgtaattctaatagctgtaaaggggagcttgattttaaatcaattttgatcaataatgattatattccctatgatgagaactcgacgggggattccaccaatttaggacattcaaagtgtgcctttgaaacattggcatctcccacaaagacaataaagaacatgctgactgttcctagttctcctttgtcaccagccaccggtggttcagtcaagattgtgcaaatgacaccagtaacttctgccatgacgacagctaagtggcttcgtgaggtgatatcttcattgccagataagccttcatctaagcttcagcagtttctgtcatcatgcgatagggatttgacaaatgctgtcacagaaagggtcagcatagttttggaagcaatttttccaaccaaatcttctgccaatcggggtgtatcgttaggtctcaattgtgcaaatgcctttgacattccgtgggcagaagccagaaaagtggaggcttccaagttgtactatagggtattagaggcaatctgcagagcggagttacaaaacagcaatgtaaataatctaactccattgctgtcaaatgagcgtttccaccgatgtttgattgcatgttcagcggacttagtattggcgacacataagacagtcatcatgatgtttcctgctgttcttgagagtaccggtctaactgcatttgatttgagcaaaataattgagaactttgtgagacatgaagagaccctcccaagagaattgaaaaggcacctaaattccttagaagaacagcttttggaaagcatggcatgggagaaaggttcatcattgtataactcactgattgttgccaggccatctgttgcttcagaaataaaccgccttggtcttttggctgaaccaatgccatctcttgatgacttagtgtcaaggcagaatgttcgtatcgagggcttgcctgctacaccatctaaaaaacgtgctgctggtccagatgacaacgctgatcctcgatcaccaaagagatcgtgcaatgaatctaggaacacagtagtagagcgcaatttgcagacacctccacccaagcaaagccacatggtgtcaactagtttgaaagcaaaatgccatccactccagtccacatttgcaagtccaactgtctgtaatcctgttggtgggaatgaaaaatgtgctgacgtgacaattcatatattcttttccaagattctgaagttggctgctattagaataagaaacttgtgcgaaagggttcaatgtgtggaacagacagagcgtgtctataatgtcttcaagcagattcttgagcaacagacaacattattttttaatagacacatcgatcaacttatcctttgctgtctttatggtgttgcaaaggtttgtcaattagaactcacattcagggagatactcaacaattacaaaagagaagcacaatgcaagccagaagttttttcaagtatctatattgggagtacgaaccgtaatggggtattagtatcgcgccatgttggtatcattactttttacaatgaggtatttgttccagcagcgaagcctttcctggtgtcactaatatcatctggtactcatccagaagacaagaagaatgctagtggccaaattcctggatcacccaagccatctcctttcccaaatttaccagatatgtccccgaagaaagtttcagcatctcataatgtatatgtgtctcctttgcggcaaaccaagttggatctactgctgtcaccaagttccaggagtttttatgcatgcattggtgaaggcacccatgcttatcagagcccatctaaggatttggctgctataaatagccgcctaaattataatggcaggaaagtaaacagtcgattaaatttcgacatggtgagtgactcagtggtagccggcagtctgggccagataaatggtggttctacctcggatcctgcagctgcatttagccccctttcaaagaagagagagacagatacttgatcaattataaatggtggcctctctcgtatatagctcacagatccgtgctccgtagcagtctattcttctgaataagtggattaactggagcgatttaactgtacatgtatgtgttagtgagaagcagcagtttttaggcagcaaactgtttcaagttagcttttgagctatcaccatttctctgctgattgaacatatccgctgtgtagagtgctaatgaatctttagttttcattgggctgacataacaaatctttatcctagttggctggttgttgggaggcattcatcagggttatatttggttgtcaaaaagtactgtacttaattcacatctttcacatttttcactagcaatagcagccccaaattgctttcctgactaggaacatattctttacaggtataagcatgccaactctaaactatatgaatcctttttatattctcatttttaagtacttctctgtttctgctacttttgtactgtatatttccagcttctccatcagactgatgatcccatattcagtgtgctgcaagtgatttgacatatgtggcttatccttcagatgaagaaaacctgaaatgctatcaccatttaaaacattggcttctggaagttcaggtgattagcaggagacgttctgacattgccattgacatgtacggtagtgatggcaggagacgttcttaaacagcagctgctccttcagcttgtaatgtctgattgtattgaccaagagcatccaccttgccttatggtactaactgaatgagctggtgacgctgactcatctgcataatggcagatgcttaaccatctttaggagctcatgtcatgattccagctgcaccgtgtgcaaatgtgaaggccctgcaagggctttccaggccgcaccaatcctgcttgcttcttgaagatacatatggtgccacctaaataaaagctgtttctggttatgtctgtccttgacatgtcaacagattagtgttgggttgcagtcatgtggtgtttaagtcttggagaaggcgagaagtcattgctgccagcattgtgatcgtcaggcacagaagtactcaaaagtgagagctacttgttgcgagcaaacggagggcgatataggttgatagccaatttcagttctctatatacaagcagcggattttgtttagagttagcttttgagatgcatcatttctttcacatctgattctgtgtgttgtaactcggagtcgcgtagaagttagaatgctaactgaccttaattttcaccgaataatttgctagcgtttttcagtatgaaatccttgtcttaaattttggaatgtacctgtcatgggtatattttgtctttagatacttgtcatgtttttaatcatttattacatatttatagttttgactatcttttttcatctctatcaaatcatattcccttgctttcggaatttgttcc

SEQ ID NO: 27688 - DNA, 4113 bp, Zea Mays
gtcatcgttcgcatcacacggccgtgaggagcaactctgttcctcatctcccgttcaccccgcgggcgcagggcgcgctctctcctcgtggcgatcgccgaccgtagcggccgctgcccgggttttcgtcggccgcttcgccatgtcttcgctggacccttcgccagcgacgagcacccaacagcagaagcaattggagagtttggtaaatctactgacgcagggaagcaggttctaccgcaaagcatataatgaactgttctcaggtgtaactactgagcaggatccggattcatcgactaatattcctgagtatatgctttttgggtggcatctcttcttaatgctccatttgagatcaccagaattgttcaaggacctggtgtcctgcatccatggattagttgctgtgttggccatacttttgattcacgtgccagctaaatttaggagcttcacgattgaaggctcttctcacttaatcaaacaaactgagaaaggcgtggatcttattgcttcattatgtcataactatcatacctctgaagaacgtttgaaagaaatgttgcacaagtctcacaatgcaatagaagacattttccatatgaaagcactaagtgcttcagagtgcaaaccagaaaatttggataagatagacacagatgacctgatgtatttcaaaggtctgattgatatggaatgtttccagtcaaatttggaaaaaatggagaaactatgtaattctaatagctgtaaaggggagcttgattttaaatcaattttgatcaataatgattatattccctatgatgagaactcgacgggggattccaccaatttaggacattcaaagtgtgcctttgaaacattggcatctcccacaaagacaataaagaacatgctgactgttcctagttctcctttgtcaccagccaccggtggttcagtcaagattgtgcaaatgacaccagtaacttctgccatgacgacagctaagtggcttcgtgaggtgatatcttcattgccagataagccttcatctaagcttcagcagtttctgtcatcatgcgatagggatttgacaaatgctgtcacagaaagggtcagcatagttttggaagcaatttttccaaccaaatcttctgccaatcggggtgtatcgttaggtctcaattgtgcaaatgcctttgacattccgtgggcagaagccagaaaagtggaggcttccaagttgtactatagggtattagaggcaatctgcagagcggagttacaaaacagcaatgtaaataatctaactccattgctgtcaaatgagcgtttccaccgatgtttgattgcatgttcagcggacttagtattggcgacacataagacagtcatcatgatgtttcctgctgttcttgagagtaccggtctaactgcatttgatttgagcaaaataattgagaactttgtgagacatgaagagaccctcccaagagaattgaaaaggcacctaaattccttagaagaacagcttttggaaagcatggcatgggagaaaggttcatcattgtataactcactgattgttgccaggccatctgttgcttcagaaataaaccgccttggtcttttggctgaaccaatgccatctcttgatgacttagtgtcaaggcagaatgttcgtatcgagggcttgcctgctacaccatctaaaaaacgtgctgctggtccagatgacaacgctgatcctcgatcaccaaagagatcgtgcaatgaatctaggaacacagtagtagagcgcaatttgcagacacctccacccaagcaaagccacatggtgtcaactagtttgaaagcaaaatgccatccactccagtccacatttgcaagtccaactgtctgtaatcctgttggtgggaatgaaaaatgtgctgacgtgacaattcatatattcttttccaagattctgaagttggctgctattagaataagaaacttgtgcgaaagggttcaatgtgtggaacagacagagcgtgtctataatgtcttcaagcagattcttgagcaacagacaacattattttttaatagacacatcgatcaacttatcctttgctgtctttatggtgttgcaaaggtttgtcaattagaactcacattcagggagatactcaacaattacaaaagagaagcacaatgcaagccagaagttttttcaagtatctatattgggagtacgaaccgtaatggggtattagtatcgcgccatgttggtatcattactttttacaatgaggtatttgttccagcagcgaagcctttcctggtgtcactaatatcatctggtactcatccagaagacaagaagaatgctagtggccaaattcctggatcacccaagccatctcctttcccaaatttaccagatatgtccccgaagaaagtttcagcatctcataatgtatatgtgtctcctttgcggcaaaccaagttggatctactgctgtcaccaagttccaggagtttttatgcatgcattggtgaaggcacccatgcttatcagagcccatctaaggatttggctgctataaatagccgcctaaattataatggcaggaaagtaaacagtcgattaaatttcgacatggtgagtgactcagtggtagccggcagtctgggccagataaatggtggttctacctcggatcctgcagctgcatttagccccctttcaaagaagagagagacagatacttgatcaattataaatggtggcctctctcgtatatagctcacagatccgtgctccgtagcagtctattcttctgaataagtggattaactggagcgatttaactgtacatgtatgtgttagtgagaagcagcagtttttaggcagcaaactgtttcaagttagcttttgagctatcaccatttctctgctgattgaacatatccgctgtgtagagtgctaatgaatctttagttttcattgggctgacataacaaatctttatcctagttggctggttgttgggaggcattcatcagggttatatttggttgtcaaaaagtactgtacttaattcacatctttcacatttttcactagcaatagcagccccaaattgctttcctgactaggaacatattctttacagcttctccatcagactgatgatcccatattcagtgtgctgcaagtgatttgacatatgtggcttatccttcagtgagatgaagaaaacctgaaatgctatcaccatttaaaacattggcttctggaagttcaggtgattagcaggagacgttctgacattgccattgacatgtacggtagtgatggcaggagacgttcttaaacagcagctgctccttcagcttgtaatgtctgattgtattgaccaagagcatccaccttgccttatggtactaactgaatgagctggtgacgctgactcatctgcataatggcagatgcttaaccatctttaggagctcatgtcatgattccagctgcaccgtgtgcaaatgtgaaggccctgcaagggctttccaggccgcaccaatcctgcttgcttcttgaagatacatatggtgccacctaaataaaagctgtttctggttatgtctgtccttgacatgtcaacagattagtgttgggttgcagtcatgtggtgtttaagtcttggagaaggcgagaagtcattgctgccagcattgtgatcgtcaggcacagaagtactcaaaagtgagagctacttgttgcgagcaaacggagggcgatataggttgatagccaatttcagttctctatatacaagcagcggattttgtttagagttagcttttgagatgcatcatttctttcacatctgattctgtgtgttgtaactcggagtcgcgtagaagttagaatgctaactgaccttaattttcaccgaataatttgctagcgtttttcagtatgaaatccttgtcttaaattttggaatgtacctgtcatgggtatattttgtctttagatacttgtcatgtttttaatcatttattacatatttatagttttgactatcttttttcatctctatcaaatcatattcccttgctttcggaatttgttcc

SEQ ID NO: 27689 - DNA, 3884 bp, Zea Mays
gtcatcgttcgcatcacacggccgtgaggagcaactctgttcctcatctcccgttcaccccgcgggcgcagggcgcgctctctcctcgtggcgatcgccgaccgtagcggccgctgcccgggttttcgtcggccgcttcgccatgtcttcgctggacccttcgccagcgacgagcacccaacagcagaagcaattggagagtttggtaaatctactgacgcagggaagcaggttctaccgcaaagcatataatgaactgttctcaggtgtaactactgagcaggatccggattcatcgactaatattcctgagtatatgctttttgggtggcatctcttcttaatgctccatttgagatcaccagaattgttcaaggacctggtgtcctgcatccatggattagttgctgtgttggccatacttttgattcacgtgccagctaaatttaggagcttcacgattgaaggctcttctcacttaatcaaacaaactgagaaaggcgtggatcttattgcttcattatgtcataactatcatacctctgaagaacgtttgaaagaaatgttgcacaagtctcacaatgcaatagaagacattttccatatgaaagcactaagtgcttcagagtgcaaaccagaaaatttggataagatagacacagatgacctgatgtatttcaaaggtctgattgatatggaatgtttccagtcaaatttggaaaaaatggagaaactatgtaattctaatagctgtaaaggggagcttgattttaaatcaattttgatcaataatgattatattccctatgatgagaactcgacgggggattccaccaatttaggacattcaaagtgtgcctttgaaacattggcatctcccacaaagacaataaagaacatgctgactgttcctagttctcctttgtcaccagccaccggtggttcagtcaagattgtgcaaatgacaccagtaacttctgccatgacgacagctaagtggcttcgtgaggtgatatcttcattgccagataagccttcatctaagcttcagcagtttctgtcatcatgcgatagggatttgacaaatgctgtcacagaaagggtcagcatagttttggaagcaatttttccaaccaaatcttctgccaatcggggtgtatcgttaggtctcaattgtgcaaatgcctttgacattccgtgggcagaagccagaaaagtggaggcttccaagttgtactatagggtattagaggcaatctgcagagcggagttacaaaacagcaatgtaaataatctaactccattgctgtcaaatgagcgtttccaccgatgtttgattgcatgttcagcggacttagtattggcgacacataagacagtcatcatgatgtttcctgctgttcttgagagtaccggtctaactgcatttgatttgagcaaaataattgagaactttgtgagacatgaagagaccctcccaagagaattgaaaaggcacctaaattccttagaagaacagcttttggaaagcatggcatgggagaaaggttcatcattgtataactcactgattgttgccaggccatctgttgcttcagaaataaaccgccttggtcttttggctgaaccaatgccatctcttgatgacttagtgtcaaggcagaatgttcgtatcgagggcttgcctgctacaccatctaaaaaacgtgctgctggtccagatgacaacgctgatcctcgatcaccaaagagatcgtgcaatgaatctaggaacacagtagtagagcgcaatttgcagacacctccacccaagcaaagccacatggtgtcaactagtttgaaagcaaaatgccatccactccagtccacatttgcaagtccaactgtctgtaatcctgttggtgggaatgaaaaatgtgctgacgtgacaattcatatattcttttccaagattctgaagttggctgctattagaataagaaacttgtgcgaaagggttcaatgtgtggaacagacagagcgtgtctataatgtcttcaagcagattcttgagcaacagacaacattattttttaatagacacatcgatcaacttatcctttgctgtctttatggtgttgcaaaggtttgtcaattagaactcacattcagggagatactcaacaattacaaaagagaagcacaatgcaagccagaagttttttcaagtatctatattgggagtacgaaccgtaatggggtattagtatcgcgccatgttggtatcattactttttacaatgaggtatttgttccagcagcgaagcctttcctggtgtcactaatatcatctggtactcatccagaagacaagaagaatgctagtggccaaattcctggatcacccaagccatctcctttcccaaatttaccagatatgtccccgaagaaagtttcagcatctcataatgtatatgtgtctcctttgcggcaaaccaagttggatctactgctgtcaccaagttccaggagtttttatgcatgcattggtgaaggcacccatgcttatcagagcccatctaaggatttggctgctataaatagccgcctaaattagtatgaatctcaaaatgacaatttcttttgtccaacatgatttcatgtctacaacactaatttatatcactccatttcgtgttaaatttgcagtaatggcaggaaagtaaacagtcgattaaatttcgacatggtgagtgactcagtggtagccggcagtctgggccagataaatggtggttctacctcggatcctgcagctgcatttagccccctttcaaagaagagagagacagatacttgatcaattataaatggtggcctctctcgtatatagctcacagatccgtgctccgtagcagtctattcttctgaataagtggattaactggagcgatttaactgtacatgtatgtgttagtgagaagcagcagtttttaggcagcaaactgtttcaagttagcttttgagctatcaccatttctctgctgattgaacatatccgctgtgtagagtgctaatgaatctttagttttcattgggctgacataacaaatctttatcctagttggctggttgttgggaggcattcatcagggttatatttggttgtcaaaaagtactgtacttaattcacatctttcacatttttcactagcaatagcagccccaaattgctttcctgactaggaacatattctttacaggtataagcatgccaactctaaactatatgaatcctttttatattctcatttttaagtacttctctgtttctgctacttttgtactgtatatttccagcttctccatcagactgatgatcccatattcagtgtgctgcaagtgatttgacatatgtggcttatccttcagattagtgttgggttgcagtcatgtggtgtttaagtcttggagaaggcgagaagtcattgctgccagcattgtgatcgtcaggcacagaagtactcaaaagtgagagctacttgttgcgagcaaacggagggcgatataggttgatagccaatttcagttctctatatacaagcagcggattttgtttagagttagcttttgagatgcatcatttctttcacatctgattctgtgtgttgtaactcggagtcgcgtagaagttagaatgctaactgaccttaattttcaccgaataatttgctagcgtttttcagtatgaaatccttgtcttaaattttggaatgtacctgtcatgggtatattttgtctttagatacttgtcatgtttttaatcatttattacatatttatagttttgactatcttttttcatctctatcaaatcatattcccttgctttcggaatttgttcc

SEQ ID NO: 27690 - DNA, 4278 bp, Zea Mays
gtcatcgttcgcatcacacggccgtgaggagcaactctgttcctcatctcccgttcaccccgcgggcgcagggcgcgctctctcctcgtggcgatcgccgaccgtagcggccgctgcccgggttttcgtcggccgcttcgccatgtcttcgctggacccttcgccagcgacgagcacccaacagaagcaattggagagtttggtaaatctactgacgcagggaagcaggttctaccgcaaagcatataatgaactgttctcaggtgtaactactgagcaggatccggattcatcgactaatattcctgagtatatgctttttgggtggcatctcttcttaatgctccatttgagatcaccagaattgttcaaggacctggtgtcctgcatccatggattagttgctgtgttggccatacttttgattcacgtgccagctaaatttaggagcttcacgattgaaggctcttctcacttaatcaaacaaactgagaaaggcgtggatcttattgcttcattatgtcataactatcatacctctgaagaacgtttgaaagaaatgttgcacaagtctcacaatgcaatagaagacattttccatatgaaagcactaagtgcttcagagtgcaaaccagaaaatttggataagatagacacagatgacctgatgtatttcaaaggtctgattgatatggaatgtttccagtcaaatttggaaaaaatggagaaactatgtaattctaatagctgtaaaggggagcttgattttaaatcaattttgatcaataatgattatattccctatgatgagaactcgacgggggattccaccaatttaggacattcaaagtgtgcctttgaaacattggcatctcccacaaagacaataaagaacatgctgactgttcctagttctcctttgtcaccagccaccggtggttcagtcaagattgtgcaaatgacaccagtaacttctgccatgacgacagctaagtggcttcgtgaggtgatatcttcattgccagataagccttcatctaagcttcagcagtttctgtcatcatgcgatagggatttgacaaatgctgtcacagaaagggtcagcatagttttggaagcaatttttccaaccaaatcttctgccaatcggggtgtatcgttaggtctcaattgtgcaaatgcctttgacattccgtgggcagaagccagaaaagtggaggcttccaagttgtactatagggtattagaggcaatctgcagagcggagttacaaaacagcaatgtaaataatctaactccattgctgtcaaatgagcgtttccaccgatgtttgattgcatgttcagcggacttagtattggcgacacataagacagtcatcatgatgtttcctgctgttcttgagagtaccggtctaactgcatttgatttgagcaaaataattgagaactttgtgagacatgaagagaccctcccaagagaattgaaaaggcacctaaattccttagaagaacagcttttggaaagcatggcatgggagaaaggttcatcattgtataactcactgattgttgccaggccatctgttgcttcagaaataaaccgccttggtcttttggctgaaccaatgccatctcttgatgacttagtgtcaaggcagaatgttcgtatcgagggcttgcctgctacaccatctaaaaaacgtgctgctggtccagatgacaacgctgatcctcgatcaccaaagagatcgtgcaatgaatctaggaacacagtagtagagcgcaatttgcagacacctccacccaagcaaagccacatggtgtcaactagtttgaaagcaaaatgccatccactccagtccacatttgcaagtccaactgtctgtaatcctgttggtgggaatgaaaaatgtgctgacgtgacaattcatatattcttttccaagattctgaagttggctgctattagaataagaaacttgtgcgaaagggttcaatgtgtggaacagacagagcgtgtctataatgtcttcaagcagattcttgagcaacagacaacattattttttaatagacacatcgatcaacttatcctttgctgtctttatggtgttgcaaaggtttgtcaattagaactcacattcagggagatactcaacaattacaaaagagaagcacaatgcaagccagaagttttttcaagtatctatattgggagtacgaaccgtaatggggtattagtatcgcgccatgttggtatcattactttttacaatgaggtatttgttccagcagcgaagcctttcctggtgtcactaatatcatctggtactcatccagaagacaagaagaatgctagtggccaaattcctggatcacccaagccatctcctttcccaaatttaccagatatgtccccgaagaaagtttcagcatctcataatgtatatgtgtctcctttgcggcaaaccaagttggatctactgctgtcaccaagttccaggagtttttatgcatgcattggtgaaggcacccatgcttatcagagcccatctaaggatttggctgctataaatagccgcctaaattataatggcaggaaagtaaacagtcgattaaatttcgacatggtgagtgactcagtggtagccggcagtctgggccagataaatggtggttctacctcggatcctgcagctgcatttagccccctttcaaagaagagagagacagatacttgatcaattataaatggtggcctctctcgtatatagctcacagatccgtgctccgtagcagtctattcttctgaataagtggattaactggagcgatttaactgtacatgtatgtgttagtgagaagcagcagtttttaggcagcaaactgtttcaagttagcttttgagctatcaccatttctctgctgattgaacatatccgctgtgtagagtgctaatgaatctttagttttcattgggctgacataacaaatctttatcctagttggctggttgttgggaggcattcatcagggttatatttggttgtcaaaaagtactgtacttaattcacatctttcacatttttcactagcaatagcagccccaaattgctttcctgactaggaacatattctttacagcttctccatcagactgatgatcccatattcagtgtgctgcaagtgatttgacatatgtggcttatccttcaggacaagatatttttgtatgctacacttcccaaattgcaattaatccagaagtctaccttgttttattctattagttctcagcaacagtgaatgaatatgaatcagtcatgctgatagatgttcatctggttattccaaacaatctgacatcgcatctctttctgcaagtgagatgaagaaaacctgaaatgctatcaccatttaaaacattggcttctggaagttcaggtgattagcaggagacgttctgacattgccattgacatgtacggtagtgatggcaggagacgttcttaaacagcagctgctccttcagcttgtaatgtctgattgtattgaccaagagcatccaccttgccttatggtactaactgaatgagctggtgacgctgactcatctgcataatggcagatgcttaaccatctttaggagctcatgtcatgattccagctgcaccgtgtgcaaatgtgaaggccctgcaagggctttccaggccgcaccaatcctgcttgcttcttgaagatacatatggtgccacctaaataaaagctgtttctggttatgtctgtccttgacatgtcaacagattagtgttgggttgcagtcatgtggtgtttaagtcttggagaaggcgagaagtcattgctgccagcattgtgatcgtcaggcacagaagtactcaaaagtgagagctacttgttgcgagcaaacggagggcgatataggttgatagccaatttcagttctctatatacaagcagcggattttgtttagagttagcttttgagatgcatcatttctttcacatctgattctgtgtgttgtaactcggagtcgcgtagaagttagaatgctaactgaccttaattttcaccgaataatttgctagcgtttttcagtatgaaatccttgtcttaaattttggaatgtacctgtcatgggtatattttgtctttagatacttgtcatgtttttaatcatttattacatatttatagttttgactatcttttttcatctctatcaaatcatattcccttgctttcggaatttgttcc

SEQ ID NO: 27691 - DNA, 4524 bp, Zea Mays
cgtagatgtagcctgttccaacgtcatcgttcgcatcacacggccgtgaggagcaactctgttcctcatctcccgttcaccccgcgggcgcagggcgcgctctctcctcgtggcgatcgccgaccgtagcggccgctgcccgggttttcgtcggccgcttcgccatgtcttcgctggacccttcgccagcgacgagcacccaacagcagaagcaattggagagtttggtaaatctactgacgcagggaagcaggtgtaactactgagcaggatccggattcatcgactaatattcctgagtatatgctttttgggtggcatctcttcttaatgctccatttgagatcaccagaattgttcaaggacctggtgtcctgcatccatggattagttgctgtgttggccatacttttgattcacgtgccagctaaatttaggagcttcacgattgaaggctcttctcacttaatcaaacaaactgagaaaggcgtggatcttattgcttcattatgtcataactatcatacctctgaagaacgtttgaaagaaatgttgcacaagtctcacaatgcaatagaagacattttccatatgaaagcactaagtgcttcagagtgcaaaccagaaaatttggataagatagacacagatgacctgatgtatttcaaaggtctgattgatatggaatgtttccagtcaaatttggaaaaaatggagaaactatgtaattctaatagctgtaaaggggagcttgattttaaatcaattttgatcaataatgattatattccctatgatgagaactcgacgggggattccaccaatttaggacattcaaagtgtgcctttgaaacattggcatctcccacaaagacaataaagaacatgctgactgttcctagttctcctttgtcaccagccaccggtggttcagtcaagattgtgcaaatgacaccagtaacttctgccatgacgacagctaagtggcttcgtgaggtgatatcttcattgccagataagccttcatctaagcttcagcagtttctgtcatcatgcgatagggatttgacaaatgctgtcacagaaagggtcagcatagttttggaagcaatttttccaaccaaatcttctgccaatcggggtgtatcgttaggtctcaattgtgcaaatgcctttgacattccgtgggcagaagccagaaaagtggaggcttccaagttgtactatagggtattagaggcaatctgcagagcggagttacaaaacagcaatgtaaataatctaactccattgctgtcaaatgagcgtttccaccgatgtttgattgcatgttcagcggacttagtattggcgacacataagacagtcatcatgatgtttcctgctgttcttgagagtaccggtctaactgcatttgatttgagcaaaataattgagaactttgtgagacatgaagagaccctcccaagagaattgaaaaggcacctaaattccttagaagaacagcttttggaaagcatggcatgggagaaaggttcatcattgtataactcactgattgttgccaggccatctgttgcttcagaaataaaccgccttggtcttttggctgaaccaatgccatctcttgatgacttagtgtcaaggcagaatgttcgtatcgagggcttgcctgctacaccatctaaaaaacgtgctgctggtccagatgacaacgctgatcctcgatcaccaaagagatcgtgcaatgaatctaggaacacagtagtagagcgcaatttgcagacacctccacccaagcaaagccacatggtgtcaactagtttgaaagcaaaatgccatccactccagtccacatttgcaagtccaactgtctgtaatcctgttggtgggaatgaaaaatgtgctgacgtgacaattcatatattcttttccaagattctgaagttggctgctattagaataagaaacttgtgcgaaagggttcaatgtgtggaacagacagagcgtgtctataatgtcttcaagcagattcttgagcaacagacaacattattttttaatagacacatcgatcaacttatcctttgctgtctttatggtgttgcaaaggtttgtcaattagaactcacattcagggagatactcaacaattacaaaagagaagcacaatgcaagccagaagttttttcaagtatctatattgggagtacgaaccgtaatggggtattagtatcgcgccatgttggtatcattactttttacaatgaggtatttgttccagcagcgaagcctttcctggtgtcactaatatcatctggtactcatccagaagacaagaagaatgctagtggccaaattcctggatcacccaagccatctcctttcccaaatttaccagatatgtccccgaagaaagtttcagcatctcataatgtatatgtgtctcctttgcggcaaaccaagttggatctactgctgtcaccaagttccaggagtttttatgcatgcattggtgaaggcacccatgcttatcagagcccatctaaggatttggctgctataaatagccgcctaaattataatggcaggaaagtaaacagtcgattaaatttcgacatggtgagtgactcagtggtagccggcagtctgggccagataaatggtggttctacctcggatcctgcagctgcatttagccccctttcaaagaagagagagacagatacttgatcaattataaatggtggcctctctcgtatatagctcacagatccgtgctccgtagcagtctattcttctgaataagtggattaactggagcgatttaactgtacatgtatgtgttagtgagaagcagcagtttttaggcagcaaactgtttcaagttagcttttgagctatcaccatttctctgctgattgaacatatccgctgtgtagagtgctaatgaatctttagttttcattgggctgacataacaaatctttatcctagttggctggttgttgggaggcattcatcagggttatatttggttgtcaaaaagtactgtacttaattcacatctttcacatttttcactagcaatagcagccccaaattgctttcctgactaggaacatattctttacaggtataagcatgccaactctaaactatatgaatcctttttatattctcatttttaagtacttctctgtttctgctacttttgtactgtatatttccagcttctccatcagactgatgatcccatattcagtgtgctgcaagtgatttgacatatgtggcttatccttcaggtatgtctcatgttgtgacttcattgctgattgcttttgtaatggtactgttgagttcatttctggttacaatcagcctttactgctttatattgttctactaattttggcttgcacagccaggacgattggttttctgcatcaatcaatcttttttaggacaagatatttttgtatgctacacttcccaaattgcaattaatccagaagtctaccttgttttattctattagttctcagcaacagtgaatgaatatgaatcagtcatgctgatagatgttcatctggttattccaaacaatctgacatcgcatctctttctgcaagtgagatgaagaaaacctgaaatgctatcaccatttaaaacattggcttctggaagttcaggtgattagcaggagacgttctgacattgccattgacatgtacggtagtgatggcaggagacgttcttaaacagcagctgctccttcagcttgtaatgtctgattgtattgaccaagagcatccaccttgccttatggtactaactgaatgagctggtgacgctgactcatctgcataatggcagatgcttaaccatctttaggagctcatgtcatgattccagctgcaccgtgtgcaaatgtgaaggccctgcaagggctttccaggccgcaccaatcctgcttgcttcttgaagatacatatggtgccacctaaataaaagctgtttctggttatgtctgtccttgacatgtcaacagattagtgttgggttgcagtcatgtggtgtttaagtcttggagaaggcgagaagtcattgctgccagcattgtgatcgtcaggcacagaagtactcaaaagtgagagctacttgttgcgagcaaacggagggcgatataggttgatagccaatttcagttctctatatacaagcagcggattttgtttagagttagcttttgagatgcatcatttctttcacatctgattctgtgtgttgtaactcggagtcgcgtagaagttagaatgctaactgaccttaattttcaccgaataatttgctagcgtttttcagtatgaaatccttgtcttaaattttggaatgtacctgtcatgggtatattttgtctttagatacttgtcatgtttttaatcatttattacatatttatagttttgactatcttttttcatctctatcaaatcatattcccttgctttcggaatttgttcc

SEQ ID NO: 27692 - DNA, 281 bp, Zea Mays
tccaaatcgcctcagatccaaatcgcgcagatgctgacgtccctgcacatggcggtttttagattgtgttccgttttcgagcttcgagggatcgaagatcaagcgttggcgaccaagtgatatagctcttcgagttctatgaggcagaagatcctgagcatctgtttggtgaaggcaagtgtcctttgacccattatgtccctttcacttataatacactgtcccgcattacttaattgaaacctaaggattgactagctttgtatttaccttacacttga

SEQ ID NO: 27693 - DNA, 287 bp, Zea Mays
tccagatccaaatcgcctcagatccaaatcgcgcagatgctgacgtccctgcacatggcggtttttagattgcgttccgttttcgagcttcgagggatcgaagatcaagcgttggcgaccaagtgatatagctcttcgagttctatgaggcagaagatcctgagcatctgtttggtgaaggcaagtgtcctctgacccattatgtccctttcacttataatacactgtcccgcattacttaattgaaacctaaggattgactagctttgtatttaccttacacttga

SEQ ID NO: 27694 - DNA, 3502 bp, Zea Mays
gcggactacacccgatctgtgtagccctgtcgtgacctcgtcaaaaccaggtgaggacccgtttctccttgtgttcattcctcgccagtattaatacccaaaatcaagttattagatgctaatgttatctatatatgtgtgtgtaatgtgcgagatgtgaggaattccatatttgtgtggcgaggcaagccgtgcgacaagtgccagatgtacgatgaaatgattgaatcggagagcgtcaccgtttgtgtggattatcaagtcaggcaaataacggagtactatgtctgatcgctaaatcggctgtggtgcatatgtgttgctctatagcgacgttagggaagggttcctctctttttcctttgtatgatagtatgttgctcatgatgtagtgtgaaaagatatatcctatttgtgtggtggaacaaataatgcgtagaatactgattggaatgccttgctataaggtgctttatttgtcagaatcccaatttaattatgatggtatagttatgctagagagtataaattaggtacattctagttgtattgacatgataaagcttagattgaagtgtagtgtatgtatcaggtgttctagtggatgtataagtctagcgttagtaaattggtttgtgttatgtgaatgaaactattttcatgagtgtcttagaatctacatatgttggggttagttctacgctttagtggtcatagtacttatatatgcgtagtgtcattagagtagttcttcatttgcaatatgaaccttaggacgaagatgcaactcatacgaagtaattgtgtgcatggttatgaagtatactaatctatctatgtgattaactaggtggttttagctctaatttaggatgatgtgtcagaatagttgaagtaccaagcacatggtgattgtagaagccaaataggagctaaattgaatatattgctgtttagagctgtaggtacagttttaattgtgcagctaatttaacaaagtaaaccatgttttctgtggacatgttatatatgaaagttgtagctcacttctttatcttgcttgtgtaaaaatttcatgaccataggcttagcagtttagaagttatgattttcccaagtccagtttcagaatctgtccagattctgttctgatttcgaaaattgttttgtttgactaaattaaacttataataagcccttagtaattatagaagaattgtagtacttttcttaaggtttccaacaaattttggatcaccctttttggtgatctataagttaagttacagctgtttgaagtgcgatatctgaatctgtccaaatttggacagcagagcctttctcatattttctgaccttgatatatattgaattaacctgggatgtttataaattaattgtagacaattttattagctttctaaagagtctaggatcacctgatttggatgcctgaaactctaattatggatttttgaagtaagtagtcgaattctgtccaaatctgggcagaatttatgtttagttctgtttgacctttctaaaggtcgaatcatgttgtggtgataatataaaagttatagaggactttataagctttccaaaaagtcttggtttactatttttggatgaatatcatgtgagttatgaataaaacaactgattgctgtactgctgtccaaaatcggcaaggattaagatgattgcttggagtttcttttctgtgagtatggtgaccttagtaatacaaaggagttttagtagacatgtttacctagcattaaaaagttgattcagtaatattatgtttataaaggtaatgtaaatgtcttatgattaagaacagtgtgatgttccatttgatggcatgctatgcataataacctggcatgcaaatgttgaagcatgttgaaatgcttctattcattgttctaagttggggtccatattgatggtagtccctctttcttcgtatgttcataagatgggtcggcatctttagtgtctcacacgcagtggccacgggatttttcaggtcacttggtcgtggaagggcttcttattgcagtcatagtgttccagctctccaggaagagttacaaaccaccaaagaagccactcactgaaaagtgccgctggaccacatacgattgttgatggtaaagaagttgtgaactttgcatcagcaaactacctcagtttaattggcaacgaaaagattattgattcttgcatcagttcattggagaaatatggtgttggttcttgtggtccatgtggcttttatggaacaactgatgtccatcttgactgtgagtcaaagatagctaaatttttggggactccagactccattctttattcatatgggatttctacaatattcaatgtgatacctgccttctgtaagaaaggagatatcatagtcgctgatgagggtgttcactgggcagtgaaaatggtctccatctatcaagaagcactgtggtgtacttcaagcacaatgatatggcttcacttgcaagcactttggaaaaacttactcgtggaaataaacgtgctgaaaagattagacgctacattgttgtagaatccatttaccagaattctggccaaattgcccccttggatgagattgtcaggttgaaggagaaatatcgattccgtgttattctggaggagagtcattcttttggggtgcttggcaagtctgggcgtggccttgctgaacattatggagttcctgtgagtgtttggcctcagcttttcttaatgtttcaccataatgccccacctgtggtgtctgaccggggtgcgttgttacctagctcccaaacgaggcctaactgtttggtgaaatgcttgggacaaagtggccatcaagaatggagtcatggaacatcagcaggacactacaagaaactgataaatgttcgtgggttttgttaagaacgtgggtaccgacgttcttatggtagttaagttcgtgggtttttttaagaatgtgggtacccacgttcttaaattaagttcgtgggccctggccaaaaccgtcgaatttaacgtattaggaacatgggtacccacgttcttatattaggttcgtcggccaactcgacaccgtcgaacttaaccagaaagacctaattccctatcccgcggcgccgcgagtctccctctcagctcactcgtgcatctaatcgaatctgccacaggagcctttcctagcgggcgatatctccccctctcgtctcagcacctcacgccgccggtgatcgccggtgaccacgggagcattacagcatcgccgagctcctccccggcgccacgttcagacgtccgtcgagcggtcggtgccgccgcgccgaggccgagtgttggatcctgggcggcgagcttctgggcgcggtcaccatggtggagcgagcgccgccagagaaaaaccccaggtacgagaaggtcaaatccatttcaattcctgaactttctgaactagatggct

SEQ ID NO: 27695 - DNA, 2492 bp, Zea Mays
gcggactacacccgatctgtgtagccctgtcgtgacctcgtcaaaaccaggtgaggacccgtttctccttgtgttcattcctcgccagtattaatacccaaaatcaagttattagatgctaatgttatctatatatgtgtgtgtaatgtgcgagatgtgaggaattccatatttgtgtggcgaggcaagccgtgcgacaagtgccagatgtacgatgaaatgattgaatcggagagcgtcaccgtttgtgtggattatcaagtcaggcaaataacggtcacttggtcgtggaagggcttcttattgcagtcatagtgttccagctctccaggaagagttacaaaccaccaaagaagccactcactgaaaaggagattgatgagctatgtgatgagtgggagccattgtggttgttgttgcatgagtaatcctacatatcatttcatatatggattaaccggatggtctcactcttgaaactgtgggagtgttggtgcaattcttatactagtttcacttaacttaatagtgccatgtgtggggacctattaatcttgaacatttactcgctagattatatgacatttaaaccatgtactcgtgaataagcagcaagggacaccttgaaccacatagaatatcatttacccttgctacccaaatgcttacatggctacatgcttcttggattgtattctctcttctctgatatcagtatgatcatcaaagcacctaaaatgtgctgctgtatgtatatagctagtgtaatgttgtttcttaggatgcattgcactaacaaaacaacaatttcatcaatggtatgctctcctagtctgtagttataggaatagctcttgaacttcccttgtgatagcagtgctctatttgaagacactactatatatgtaatattctttttgttgaatatcccctgaaatctgcttcagttatatgtgtatattatttaattcaccagaatttttcttcacgcatttctggttgtgttacaaatattcatgcagtatggattacaattgtttaccatgttaagtagttatgattgcatcatatatgatcttctgaggatcagaattaacccttctatttttcttttatacagtgccgctggaccacatacgattgttgatggtaaagaagttgtgaactttgcatcagcaaactacctcagtttaattggcaacgaaaagattattgattcttgcatcagttcattggagaaatatggtgttggttcttgtggtccatgtggcttttatggaacaactgatgtccatcttgactgtgagtcaaagatagctaaatttttggggactccagactccattctttattcatatgggatttctacaatattcaatgtgatacctgccttctgtaagaaaggagatatcatagtcgctgatgagggtgttcactgggcagtgaaaatggtctccatctatcaagaagcactgtggtgtacttcaagcacaatgatatggcttcacttgcaagcactttggaaaaacttactcgtggaaataaacgtgctgaaaagattagacgctacattgttgtagaatccatttaccagaattctggccaaattgcccccttggatgagattgtcaggttgaaggagaaatatcgattccgtgttattctggaggagagtcattcttttggggtgcttggcaagtctgggcgtggccttgctgaacattatggagttcctgtgagtgtttggcctcagcttttcttaatgtttcaccataatgccccacctgtggtgtctgaccggggtgcgttgttacctagctcccaaacgaggcctaactgtttggtgaaatgcttgggacaaagtggccatcaagaatggagtcatggaacatcagcaggacactacaagaaactgataaatgttcgtgggttttgttaagaacgtgggtaccgacgttcttatggtagttaagttcgtgggtttttttaagaatgtgggtacccacgttcttaaattaagttcgtgggccctggccaaaaccgtcgaatttaacgtattaggaacatgggtacccacgttcttatattaggttcgtcggccaactcgacaccgtcgaacttaaccagaaagacctaattccctatcccgcggcgccgcgagtctccctctcagctcactcgtgcatctaatcgaatctgccacaggagcctttcctagcgggcgatatctccccctctcgtctcagcacctcacgccgccggtgatcgccggtgaccacgggagcattacagcatcgccgagctcctccccggcgccacgttcagacgtccgtcgagcggtcggtgccgccgcgccgaggccgagtgttggatcctgggcggcgagcttctgggcgcggtcaccatggtggagcgagcgccgccagagaaaaaccccaggtacgagaaggtcaaatccatttcaattcctgaactttctgaactagatggct

SEQ ID NO: 27696 - DNA, 2011 bp, Zea Mays
gcggactacacccgatctgtgtagccctgtcgtgacctcgtcaaaaccaggtgaggacccgtttctccttgtgttcattcctcgccagtattaatacccaaaatcaagttattagatgctaatgttatctatatatgtgtgtgtaatgtgcgagatgtgaggaattccatatttgtgtggcgaggcaagccgtgcgacaagtgccagatgtacgatgaaatgattgaatcggagagcgtcaccgtttgtgtggattatcaagtcaggcaaataacggagtactatgtctgatcgctaaatcggctgtggtgcatatgtgttgctctatagcgacgttagggaagggttcctctctttttcctttgtatgatagtatgttgctcatgatgtagtgtgaaaagatatatcctatttgtgtggtggaacaaataatgcgtagaatactgattggaatgccttgctataaggtgctttatttgtcagaatcccaatttaattatgatggtatagttatgctagagagtataaattaggtacattctagttgtattgacatgataaagcttagattgaagtgtagtgtatgtatcaggtgttctagtggatgtataagtctagcgttagtaaattggtttgtgttatgtgaatgaaactattttcatgagtgtcttagaatctacatatgttggggttagttctacgctttagtggtcatagtacttatatatgcgtagtgtcattagagtagttcttcatttgcaatatgaaccttaggacgaagatgcaactcatacgaagtaattgtgtgcatggttatgaagtatactaatctatctatgtgattaactaggtggttttagctctaatttaggatgatgtgtcagaatagttgaagtaccaagcacatggtgattgtagaagccaaataggagctaaattgaatatattgctgtttagagctgtcacttggtcgtggaagggcttcttattgcagtcatagtgttccagctctccaggaagagttacaaaccaccaaagaagccactcactgaaaaggagattgatgagctatgtgatgagtgggagccattgtggttgttgttgcatgatgccgctggaccacatacgattgttgatggtaaagaagttgtgaactttgcatcagcaaactacctcagtttaattggcaacgaaaagattattgattcttgcatcagttcattggagaaatatggtgttggttcttgtggtccatgtggcttttatggaacaactgatgtccatcttgactgtgagtcaaagatagctaaatttttggggactccagactccattctttattcatatgggatttctacaatattcaatgtgatacctgccttctgtaagaaaggagatatcatagtcgctgatgagggtgttcactgggcagtgaaaatggtctccatctatcaagaagcactgtggtgtacttcaagcacaatgatatggcttcacttgcaagcactttggaaaaacttactcgtggaaataaacgtgctgaaaagattagacgctacattgttgtagaatccatttaccagaattctggccaaattgcccccttggatgagattgtcaggttgaaggagaaatatcgattccgtgttattctggaggagagtcattcttttggggtgcttggcaagtctgggcgtggccttgctgaacattatggagttcctgagcctttcctagcgggcgatatctccccctctcgtctcagcacctcacgccgccggtgatcgccggtgaccacgggagcattacagcatcgccgagctcctccccggcgccacgttcagacgtccgtcgagcggtcggtgccgccgcgccgaggccgagtgttggatcctgggcggcgagcttctgggcgcggtcaccatggtggagcgagcgccgccagagaaaaaccccaggtacgagaaggtcaaatccatttcaattcctgaactttctgaactagatggct

SEQ ID NO: 27697 - DNA, 1713 bp, Zea Mays
gcggactacacccgatctgtgtagccctgtcgtgacctcgtcaaaaccaggtgaggacccgtttctccttgtgttcattcctcgccagtattaatacccaaaatcaagttattagatgctaatgttatctatatatgtgtgtgtaatgtgcgagatgtgaggaattccatatttgtgtggcgaggcaagccgtgcgacaagtgccagatgtacgatgaaatgattgaatcggagagcgtcaccgtttgtgtggattatcaagtcaggcaaataacggtcacttggtcgtggaagggcttcttattgcagtcatagtgttccagctctccaggaagagttacaaaccaccaaagaagccactcactgaaaaggagattgatgagctatgtgatgagtgggagccattgtggttgttgttgcatgatgccgctggaccacatacgattgttgatggtaaagaagttgtgaactttgcatcagcaaactacctcagtttaattggcaacgaaaagattattgattcttgcatcagttcattggagaaatatggtgttggttcttgtggtccatgtggcttttatggaacaactgatgtccatcttgactgtgagtcaaagatagctaaatttttggggactccagactccattctttattcatatgggatttctacaatattcaatgtgatacctgccttctgtaagaaaggagatatcatagtcgctgatgagggtgttcactgggcagtgaaaatggtctccatctatcaagaagcactgtggtgtacttcaagcacaatgatatggcttcacttgcaagcactttggaaaaacttactcgtggaaataaacgtgctgaaaagattagacgctacattgttgtagaatccatttaccagaattctggccaaattgcccccttggatgagattgtcaggttgaaggagaaatatcgattccgtgttattctggaggagagtcattcttttggggtgcttggcaagtctgggcgtggccttgctgaacattatggagttcctctcccaaacgaggcctaactgtttggtgaaatgcttgggacaaagtggccatcaagaatggagtcatggaacatcagcaggacactacaagaaactgataaatgttcgtgggttttgttaagaacgtgggtaccgacgttcttatggtagttaagttcgtgggtttttttaagaatgtgggtacccacgttcttaaattaagttcgtgggccctggccaaaaccgtcgaatttaacgtattaggaacatgggtacccacgttcttatattaggttcgtcggccaactcgacaccgtcgaacttaaccagaaagacctaattccctatcccgcggcgccgcgagtctccctctcagctcactcgtgcatctaatcgaatctgccacaggagcctttcctagcgggcgatatctccccctctcgtctcagcacctcacgccgccggtgatcgccggtgaccacgggagcattacagcatcgccgagctcctccccggcgccacgttcagacgtccgtcgagcggtcggtgccgccgcgccgaggccgagtgttggatcctgggcggcgagcttctgggcgcggtcaccatggtggagcgagcgccgccagagaaaaaccccaggtacgagaaggtcaaatccatttcaattcctgaactttctgaactagatggct

SEQ ID NO: 27698 - DNA, 1169 bp, Zea Mays
gcggactacacccgatctgtgtagccctgtcgtgacctcgtcaaaaccagatgtgaggaattccatatttgtgtggcgaggcaagccgtgcgacaagtgccagatgtacgatgaaatgattgaatcggagagcgtcaccgtttgtgtggattatcaagtcaggcaaataacggtcacttggtcgtggaagggcttcttattgcagtcatagtgttccagctctccaggaagagttacaaaccaccaaagaagccactcactgaaaagtgccgctggaccacatacgattgttgatggtaaagaagttgtgaactttgcatcagcaaactacctcagtttaattggcaacgaaaagattattgattcttgcatcagttcattggagaaatatggtgttggttcttgtggtccatgtggcttttatggaacaactgatgtccatcttgactgtgagtcaaagatagctaaatttttggggactccagactccattctttattcatatgggatttctacaatattcaatgtgatacctgccttctgtaagaaaggagatatcatagtcgctgatgagggtgttcactgggcagtgaaaatggtctccatctatcaagaagcactgtggtgtacttcaagcacaatgatatggcttcacttgcaagcactttggaaaaacttactcgtggaaataaacgtgctgaaaagattagacgctacattgttgtagaatccatttaccagaattctggccaaattgcccccttggatgagattgtcaggttgaaggagaaatatcgattccgtgttattctggaggagagtcattcttttggggtgcttggcaagtctgggcgtggccttgctgaacattatggagttcctgagcctttcctagcgggcgatatctccccctctcgtctcagcacctcacgccgccggtgatcgccggtgaccacgggagcattacagcatcgccgagctcctccccggcgccacgttcagacgtccgtcgagcggtcggtgccgccgcgccgaggccgagtgttggatcctgggcggcgagcttctgggcgcggtcaccatggtggagcgagcgccgccagagaaaaaccccaggtacgagaaggtcaaatccatttcaattcctgaactttctgaactagatggct

SEQ ID NO: 27699 - DNA, 1662 bp, Zea Mays
cagcggactacacccgatctgtgtagccctgtcgtgacctcgtcaaaaccaggtgaggacccgtttctccttgtgttcattcctcgccagtattaatacccaaaatcaagttattagatgctaatgttatctatatatgtgtgtgtaatgtgcgagatgtgaggaattccatatttgtgtggcgaggcaagccgtgcgacaagtgccagatgtacgatgaaatgattgaatcggagagcgtcaccgtttgtgtggattatcaagtcaggcaaataacggtcacttggtcgtggaagggcttcttattgcagtcatagtgttccagctctccaggaagagttacaaaccaccaaagaagccactcactgaaaagtgccgctggaccacatacgattgttgatggtaaagaagttgtgaactttgcatcagcaaactacctcagtttaattggcaacgaaaagattattgattcttgcatcagttcattggagaaatatggtgttggttcttgtggtccatgtggcttttatggaacaactgatgtccatcttgactgtgagtcaaagatagctaaatttttggggactccagactccattctttattcatatgggatttctacaatattcaatgtgatacctgccttctgtaagaaaggagatatcatagtcgctgatgagggtgttcactgggcagtgaaaatggtctccatctatcaagaagcactgtggtgtacttcaagcacaatgatatggcttcacttgcaagcactttggaaaaacttactcgtggaaataaacgtgctgaaaagattagacgctacattgttgtagaatccatttaccagaattctggccaaattgcccccttggatgagattgtcaggttgaaggagaaatatcgattccgtgttattctggaggagagtcattcttttggggtgcttggcaagtctgggcgtggccttgctgaacattatggagttcctctcccaaacgaggcctaactgtttggtgaaatgcttgggacaaagtggccatcaagaatggagtcatggaacatcagcaggacactacaagaaactgataaatgttcgtgggttttgttaagaacgtgggtaccgacgttcttatggtagttaagttcgtgggtttttttaagaatgtgggtacccacgttcttaaattaagttcgtgggccctggccaaaaccgtcgaatttaacgtattaggaacatgggtacccacgttcttatattaggttcgtcggccaactcgacaccgtcgaacttaaccagaaagacctaattccctatcccgcggcgccgcgagtctccctctcagctcactcgtgcatctaatcgaatctgccacaggagcctttcctagcgggcgatatctccccctctcgtctcagcacctcacgccgccggtgatcgccggtgaccacgggagcattacagcatcgccgagctcctccccggcgccacgttcagacgtccgtcgagcggtcggtgccgccgcgccgaggccgagtgttggatcctgggcggcgagcttctgggcgcggtcaccatggtggagcgagcgccgccagagaaaaaccccaggtacgagaaggtcaaatccatttcaattcctgaactttctgaactagatggct

SEQ ID NO: 27700 - DNA, 2950 bp, Zea Mays
gcggactacacccgatctgtgtagccctgtcgtgacctcgtcaaaaccaggtgaggacccgtttctccttgtgttcattcctcgccagtattaatacccaaaatcaagttattagatgctaatgttatctatatatgtgtgtgtaatgtgcgagatgtgaggaattccatatttgtgtggcgaggcaagccgtgcgacaagtgccagatgtacgatgaaatgattgaatcggagagcgtcaccgtttgtgtggattatcaagtcaggcaaataacggagtactatgtctgatcgctaaatcggctgtggtgcatatgtgttgctctatagcgacgttagggaagggttcctctctttttcctttgtatgatagtatgttgctcatgatgtagtgtgaaaagatatatcctatttgtgtggtggaacaaataatgcgtagaatactgattggaatgccttgctataaggtgctttatttgtcagaatcccaatttaattatgatggtatagttatgctagagagtataaattaggtacattctagttgtattgacatgataaagcttagattgaagtgtagtgtatgtatcaggtgttctagtggatgtataagtctagcgttagtaaattggtttgtgttatgtgaatgaaactattttcatgagtgtcttagaatctacatatgttggggttagttctacgctttagtggtcatagtacttatatatgcgtagtgtcattagagtagttcttcatttgcaatatgaaccttaggacgaagatgcaactcatacgaagtaattgtgtgcatggttatgaagtatactaatctatctatgtgattaactaggtggttttagctctaatttaggatgatgtgtcagaatagttgaagtaccaagcacatggtgattgtagaagccaaataggagctaaattgaatatattgctgtttagagctgtaggtacagttttaattgtgcagctaatttaacaaagtaaaccatgttttctgtggacatgttatatatgaaagttgtagctcacttctttatcttgcttgtgtaaaaatttcatgaccataggcttagcagtttagaagttatgattttcccaagtccagtttcagaatctgtccagattctgttctgatttcgaaaattgttttgtttgactaaattaaacttataataagcccttagtaattatagaagaattgtagtacttttcttaaggtttccaacaaattttggatcaccctttttggtgatctataagttaagttacagctgtttgaagtgcgatatctgaatctgtccaaatttggacagcagagcctttctcatattttctgaccttgatatatattgaattaacctgggatgtttataaattaattgtagacaattttattagctttctaaagagtctaggatcacctgatttggatgcctgaaactctaattatggatttttgaagtaagtagtcgaattctgtccaaatctgggcagaatttatgtttagttctgtttgacctttctaaaggtcgaatcatgttgtggtgataatataaaagttatagaggactttataagctttccaaaaagtcttggtttactatttttggatgaatatcatgtgagttatgaataaaacaactgattgctgtactgctgtccaaaatcggcaaggattaagatgattgcttggagtttcttttctgtgagtatggtgaccttagtaatacaaaggagttttagtagacatgtttacctagcattaaaaagttgattcagtaatattatgtttataaaggtaatgtaaatgtcttatgattaagaacagtgtgatgttccatttgatggcatgctatgcataataacctggcatgcaaatgttgaagcatgttgaaatgcttctattcattgttctaagttggggtccatattgatggtagtccctctttcttcgtatgttcataagatgggtcggcatctttagtgtctcacacgcagtggccacgggatttttcaggtcacttggtcgtggaagggcttcttattgcagtcatagtgttccagctctccaggaagagttacaaaccaccaaagaagccactcactgaaaaggagattgatgagctatgtgatgagtgggagccattgtggttgttgttgcatgatgccgctggaccacatacgattgttgatggtaaagaagttgtgaactttgcatcagcaaactacctcagtttaattggcaacgaaaagattattgattcttgcatcagttcattggagaaatatggtgttggttcttgtggtccatgtggcttttatggaacaactgatgtccatcttgactgtgagtcaaagatagctaaatttttggggactccagactccattctttattcatatgggatttctacaatattcaatgtgatacctgccttctgtaagaaaggagatatcatagtcgctgatgagggtgttcactgggcagtgaaaatggtctccatctatcaagaagcactgtggtgtacttcaagcacaatgatatggcttcacttgcaagcactttggaaaaacttactcgtggaaataaacgtgctgaaaagattagacgctacattgttgtagaatccatttaccagaattctggccaaattgcccccttggatgagattgtcaggttgaaggagaaatatcgattccgtgttattctggaggagagtcattcttttggggtgcttggcaagtctgggcgtggccttgctgaacattatggagttcctctcccaaacgaggcctaactgtttggtgaaatgcttgggacaaagtggccatcaagaatggagtcatggaacatcagcaggacactacaagaaactgataaatgttcgtgggttttgttaagaacgtgggtaccgacgttcttatggtagtt

SEQ ID NO: 27701 - DNA, 884 bp, Zea Mays
gcagtttccactaattagcagtaggcatttccgaagaaagatactgctgtagttccgcttgttatatttgatgatgcaactggtgatcctttatctactcttgatcagttttgataattcgtttttggatctggaacacactagaggcgccggaaggaagttgaacttagactaatagaggaggacacagctaaaagagttgagcaagctattaggaagaaggttgaggagagtctgaattgtgatgaaattaagcgtgaaatacaacgtcggattgaggaaggacgaaaaaggatacatgaggaggtagcaatccagatggagaaagaaaaggagtcagccttaaatgaagccaagctgaaagtggaacgagaaaaaaaggagcggaatgagctagagaaaaagcttgaagaagaacgaaagaaggctgaagaggcgttgaggaaagaggcgatggaacagcagcagaaagagctagagcggtatcaggagctggagaggcttcagaaggaaagagaggaggccatgaagcggaaaaaaatggaggaagagcagcagaggcaaaaccagatgaaactgctgggcaagaacaagtcgcggccgaagctgtcatttgcttttgggatgaagtagcgttcgagtcaccgaacgaaattagtgttttagtttcctgtaaccctgtatttcctgaaaccaccattgtctaactttggcagacaaattgggacgtcttaaatcctcctgatctgctttgtaagttgccgtctctcggtgatgtggttttctctgctcctttgctgttcactgttgagttgacgttgcgagaagactgccaaagaagaatccggttggtccatagggatggatagtcgaatgccaacacg

SEQ ID NO: 27702 - DNA, 1015 bp, Zea Mays
caaagattttactctgtgctgtattgctgtggaatgctctacccctgtaacagtgtctaagaaggaggagccctttcccatccccgagaaggcgtgagagctgttctccatctcctaggaggcgcaatagtccacctccatcacggaagcgttacagaagaaagagcagtccgagtgtcattagctctccagttactgcatctcaaagttcccaccttgggttggaagagaataagaatgctattgatacgcaaaggctacaagaagaaaagaaaaggcgccggaaggaagttgaacttagactaatagaggaggacacagctaaaagagttgagcaagctattaggaagaaggttgaggagagtctgaattgtgatgaaattaagcgtgaaatacaacgtcggattgaggaaggacgaaaaaggatacatgaggaggtagcaatccagatggagaaagaaaaggagtcagccttaaatgaagccaagctgaaagtggaacgagaaaaaaaggagcggaatgagctagagaaaaagcttgaagaagaacgaaagaaggctgaagaggcgttgaggaaagaggcgatggaacagcagcagaaagagctagagcggtatcaggagctggagaggcttcagaaggaaagagaggaggccatgaagcggaaaaaaatggaggaagagcagcagaggcaaaaccagatgaaactgctgggcaagaacaagtcgcggccgaagctgtcatttgcttttgggatgaagtagcgttcgagtcaccgaacgaaattagtgttttagtttcctgtaaccctgtatttcctgaaaccaccattgtctaactttggcagacaaattgggacgtcttaaatcctcctgatctgctttgtaagttgccgtctctcggtgatgtggttttctctgctcctttgctgttcactgttgagttgacgttgcgagaagactgccaaagaagaatccggttggtccatagggatggatagtcgaatgccaacacg

SEQ ID NO: 27703 - DNA, 1634 bp, Zea Mays
ttttctttttttgattgattcgatttctccacacgtgctacacctacacgacgcagaattgcagccgaatccatcggagcccacggccgcacgcccgcagcccggccagcggccaccgcatcgcctcgtatgctccgcgcttgcacacgcgtcggcggcgcgggcgcgggcggctgcggccgacgagaacgcctcatggcctccctcatccccttcctccctccctcaccttactccactcacctcccgcgccagccccagtcccagccgccgacagccgctacccagcccgccgcagcggcgcgcccatcccggttccgcctcctgttcgcgcgcgccgcggcgcagcggcagcgcgactccgagccggcgccggcggccgaggagaggcggtcgctggccgtcagaacgggggagctgttcctggggctggcggcgctgctgctgcgcgggaccggggccgagcgtagcggtggggccgcggtggaggagatggaggcgagggacggggtagtgtgggagcagcgcccccaggacgtggacgcggagcggcggcgacgggagctcactagcccaggtttcagcttctccgccgcggggctgctcttcccctaccacctcggcgccgcgcagtgcctcatggaccgcggatacatcaccgagacaactccgttagctggctcatcagctggtgccataatctgtgcagtgatcgcatctgggaacacaatgcaagatgctctgcaggtgaccaaagttctagctgacaactgccgaagtaaaggcacggcgtttcgccttggggctgtactcaaggatgtccttgttgagtttctcccagatgatcttcacattagatgcaatggaagaattcgtgctatcctggaggcctagggccttgctggtggaccaatttgactccaaagaagatgtcattaatgcagtaattacatcctcctttattcctggatacttagcacccaggccagctaccttcttccgtaataggctcggcattgatgggggccttacattgtttatgccgcccacttctgctgcagaaacagtccgaatatgtgcttttccagccagccgtttgggattgcaagatattgggatcagtcccgattgcaatccagagaacagggctagcccaagacagctgtttaactgggctctggaacctgctgctgatgaaactctagacaaattatacgagcttgggtacctggacgcagctgtatgggctgagcagaattatgctgagcttatcgccaagaatgatcaatcccttgtcgctgattgaattgagttcagtttgcccagaagtaattttggtatccaaagctgagttcatgagaatccatgcctgtaatatattgtaaagatagcaccgtcattgtcgaaggtggcattgttctgcattggatttgggtgtttatgccagcattttcgtagctgtgacaatagtgtagaacaggttgctagcatggccataaaaactgatcagcataatcaaatgtatagattatagatgatgaggtttgacctgagcctaaaacagggggataatggtcctatttgtttcagttttttttttagtttctggccgttagaagttgctgcacactgtc

SEQ ID NO: 27704 - DNA, 1504 bp, Zea Mays
ttttctttttttgattgattcgatttctccacacgtgctacacctacacgacgcagaattgcagccgaatccatcggagcccacggccgcacgcccgcagcccggccagcggccaccgcatcgcctcgtatgctccgcgcttgcacacgcgtcggcggcgcgggcgcgggcggctgcggccgacgagaacgcctcatggcctccctcatccccttcctccctccctcaccttactccactcacctcccgcgccagccccagtcccagccgccgacagccgctacccagcccgccgcagcggcgcgcccatcccggttccgcctcctgttcgcgcgcgccgcggcgcagcggcagcgcgactccgagccggcgccggcggccgaggagaggcggtcgctggccgtcagaacgggggagctgttcctggggctggcggcgctgctgctgcgcgggaccggggccgagcgtagcggtggggccgcggtggaggagatggaggcgagggacggggtagtgtgggagcagcgcccccaggacgtggacgcggagcggcggcgacgggagctcactagcccaggtttcagcttctccgccgcggggctgctcttcccctaccacctcggcgccgcgcagtgcctcatggaccgcggatacatcaccgctgtactcaaggatgtccttgttgagtttctcccagatgatcttcacattagatgcaatggaagaattcgtgttgctattactcagctatcctggaggcctagggccttgctggtggaccaatttgactccaaagaagatgtcattaatgcagtaattacatcctcctttattcctggatacttagcacccaggccagctaccttcttccgtaataggctcggcattgatgggggccttacattgtttatgccgcccacttctgctgcagaaacagtccgaatatgtgcttttccagccagccgtttgggattgcaagatattgggatcagtcccgattgcaatccagagaacagggctagcccaagacagctgtttaactgggctctggaacctgctgctgatgaaactctagacaaattatacgagcttgggtacctggacgcagctgtatgggctgagcagaattatgctgagcttatcgccaagaatgatcaatcccttgtcgctgattgaattgagttcagtttgcccagaagtaattttggtatccaaagctgagttcatgagaatccatgcctgtaatatattgtaaagatagcaccgtcattgtcgaaggtggcattgttctgcattggatttgggtgtttatgccagcattttcgtagctgtgacaatagtgtagaacaggttgctagcatggccataaaaactgatcagcataatcaaatgtatagattatagatgatgaggtttgacctgagcctaaaacagggggataatggtcctatttgtttcagttttttttttagtttctggccgttagaagttgctgcacactgtc

SEQ ID NO: 27705 - DNA, 1585 bp, Zea Mays
ttttctttttttgattgattcgatttctccacacgtgctacacctacacgacgcagaattgcagccgaatccatcggagcccacggccgcacgcccgcagcccggccagcggccaccgcatcgcctcgtatgctccgcgcttgcacacgcgtcggcggcgcgggcgcgggcggctgcggccgacgagaacgcctcatggcctccctcatccccttcctccctccctcaccttactccactcacctcccgcgccagccccagtcccagccgccgacagccgctacccagcccgccgcagcggcgcgcccatcccggttccgcctcctgttcgcgcgcgccgcggcgcagcggcagcgcgactccgagccggcgccggcggccgaggagaggcggtcgctggccgtcagaacgggggagctgttcctggggctggcggcgctgctgctgcgcgggaccggggccgagcgtagcggtggggccgcggtggaggagatggaggcgagggacggggtagtgtgggagcagcgcccccaggacgtggacgcggagcggcggcgacgggagctcactagcccaggtttcagcttctccgccgcggggctgctcttcccctaccacctcggcgccgcgcagtgcctcatggaccgcggatacatcacctgatcgcatctgggaacacaatgcaagatgctctgcaggtgaccaaagttctagctgacaactgccgaagtaaaggcacggcgtttcgccttggggctgtactcaaggatgtccttgttgagtttctcccagatgatcttcacattagatgcaatggaagaattcgtgctatcctggaggcctagggccttgctggtggaccaatttgactccaaagaagatgtcattaatgcagtaattacatcctcctttattcctggatacttagcacccaggccagctaccttcttccgtaataggctcggcattgatgggggccttacattgtttatgccgcccacttctgctgcagaaacagtccgaatatgtgcttttccagccagccgtttgggattgcaagatattgggatcagtcccgattgcaatccagagaacagggctagcccaagacagctgtttaactgggctctggaacctgctgctgatgaaactctagacaaattatacgagcttgggtacctggacgcagctgtatgggctgagcagaattatgctgagcttatcgccaagaatgatcaatcccttgtcgctgattgaattgagttcagtttgcccagaagtaattttggtatccaaagctgagttcatgagaatccatgcctgtaatatattgtaaagatagcaccgtcattgtcgaaggtggcattgttctgcattggatttgggtgtttatgccagcattttcgtagctgtgacaatagtgtagaacaggttgctagcatggccataaaaactgatcagcataatcaaatgtatagattatagatgatgaggtttgacctgagcctaaaacagggggataatggtcctatttgtttcagttttttttttagtttctggccgttagaagttgctgcacactgtc

SEQ ID NO: 27706 - DNA, 1599 bp, Zea Mays
ttttctttttttgattgattcgatttctccacacgtgctacacctacacgacgcagaattgcagccgaatccatcggagcccacggccgcacgcccgcagcccggccagcggccaccgcatcgcctcgtatgctccgcgcttgcacacgcgtcggcggcgcgggcgcgggcggctgcggccgacgagaacgcctcatggcctccctcatccccttcctccctccctcaccttactccactcacctcccgcgccagccccagtcccagccgccgacagccgctacccagcccgccgcagcggcgcgcccatcccggttccgcctcctgttcgcgcgcgccgcggcgcagcggcagcgcgactccgagccggcgccggcggccgaggagaggcggtcgctggccgtcagaacgggggagctgttcctggggctggcggcgctgctgctgcgcgggaccggggccgagcgtagcggtggggccgcggtggaggagatggaggcgagggacggggtagtgtgggagcagcgcccccaggacgtggacgcggagcggcggcgacgggagctcactagcccaggtttcagcttctccgccgcggggctgctcttcccctaccacctcggcgccgcgcagtgcctcatggaccgcggatacatcacctgatcgcatctgggaacacaatgcaagatgctctgcaggtgaccaaagttctagctgacaactgccgaagtaaaggcacggcgtttcgccttggggctgtactcaaggatgtccttgttgagtttctcccagatgatcttcacattagatgcaatggaagaattcgtgttgctattactcagctatcctggaggcctagggccttgctggtggaccaatttgactccaaagaagatgtcattaatgcagtaattacatcctcctttattcctggatacttagcacccaggccagctaccttcttccgtaataggctcggcattgatgggggccttacattgtttatgccgcccacttctgctgcagaaacagtccgaatatgtgcttttccagccagccgtttgggattgcaagatattgggatcagtcccgattgcaatccagagaacagggctagcccaagacagctgtttaactgggctctggaacctgctgctgatgaaactctagacaaattatacgagcttgggtacctggacgcagctgtatgggctgagcagaattatgctgagcttatcgccaagaatgatcaatcccttgtcgctgattgaattgagttcagtttgcccagaagtaattttggtatccaaagctgagttcatgagaatccatgcctgtaatatattgtaaagatagcaccgtcattgtcgaaggtggcattgttctgcattggatttgggtgtttatgccagcattttcgtagctgtgacaatagtgtagaacaggttgctagcatggccataaaaactgatcagcataatcaaatgtatagattatagatgatgaggtttgacctgagcctaaaacagggggataatggtcctatttgtttcagttttttttttagtttctggccgttagaagttgctgcacactgtc

SEQ ID NO: 27707 - DNA, 4103 bp, Zea Mays
cccttttctccggcttgttccgcgccaataaaagccaggcgcacaaatatctccccgccctcctacttgcagaatctccatttccccccgcaccaaaccagccaaaccactggcgcacgccgaggagagagaaagggggtgtgcggggcggcgaccggcctccgacgacgcggggcgtcgcggcgtcgtggcggtgaagcggatgaggctgtgggaggaggaggacgatgacgaggacgaggaggggatggaagtggacggggaggcggaagatgagccggggtggccgtgtggggcgccggaggcggggcccggcgaaacgaggccggcagcgatcctcgtggcggacgcggcggaggtcgacttccccgtcatctacgtcaacgccgccttcgaggccgccacggggtaccgcgcgcacgaggtgctcgggcggaactggtcagtgacctcggcctccgctctgtttttctgtgcttggggattggcaatccgggatgctgtggaatgccgctcgctcggcgcctcgttcgggagcgggagctggaacctcgagtcgccgctgctcgttgcggcaggatttttagcgttttctttccttttatttaaaccgtggtacggtgtccgttccgtgcagtcatctctagatttcaggatccgcatagtaaagctacatcccatcgcacgttcgcattaggttctcaatcttctgaccaaatggcgtgcgtgttcacgatgcttgcgggcaaaagccagaaataagcagagcgggtgcttgctttcttgctacggattctagtatgcggtcgtggcttttgattggacggttctgtgagccacggattttgtgatgctttagtcaaagcatggcctcccgtaccataatatttttagactgcgggtatcaatttgagtgattcttaggtgtcgatctggtgcgcagcctgcctttgagcagcggtcaatggtgccagtagtgaaatcattcgacggaccactgcccatgctgttataagagtaatcgcacgggcgacatgatttggtaaagttaacaaaaatatttattgtgcatatgcacaaaaaaaaacgcatagacagggtctcctgagataagatttagttttggtttgttcatgttgtaggtaaatttattgaatgagaattgtaagtaataggtttggatcacgagtagcattgccagcgaaagtgcctctagtctaatggttaagccttatgagtagcatcttcaggtcctagtttcgatctccctcgagacgaattttgggcttggttaaaaaattccctccatgtgacccgctctctcttagagatcgatatcctgcgcgccaccttctgtctaggccattgtagagtggacaatttatcagctcgttagtgatggggccatccctgtcaccttgtgcctcgctctctctcggagatcgatatcctgcgcgtcaccctctggctaggccgttatagagtggacggttgatcggcccgttagtgatgaggccaaggttcgaggtttttctcggctgggactatgttttggtctcttaatataataccggtagaacggtctctcctcacccccaattttttacgcagtagcattgcttggcatgttgatgattacctatgagatattttgcttgatacttaatgatgcacttctatagatattttgcttgatacttaggttgcacttctaaagttgtccacttgcacatagagaaaggaattattcaagaataatacctagaatttatgggtgtaccaaaaaatatttgctggccatgacaaactgggtgagcacccgagctggtggttgactagaactcgaagactggtggtaaaattctgttctctgaaattggatgttagtgaaagattaggaaatcatcggcagtttacttcatatcattatgctgagtagaagctaggtgatcattggatccagtatatgaagtttgtaggcattagagcaagtataatagcaggctacgagaagtctaaatgctgagttggaggagagagaagaggataatctggctgtaaacttacagccagctgaaacataagagaaccaaaaagcttgtgagagagataagtaggccaaacattttaataatgaagagccaactattatacaaacgggctaaaaggtcagtccttgcagcagccagcaaccggctacattattagccttgttcttagatgtatctaagaatttcagtaacagttgtgccagagtagcagcatggtcaggctagtcgatccaaataattctatactataacgtctcgtagcagttattttctgaaggctttcttgcttggtatgctttcttgcttgtgccaactttaagattgcttaacactgacagatatgacagagggcctatgcctatcgaagcatctcacaaactgcgtccactcaaacttgtctttcagccgattcctacaattccgggatccacatgcccaaaggcgacaccccctcgttgatcccatggtcgtttcagagattcggcgatgtctcagcgaggggatcgaattccaaggcgagctgctgaatttccggaaggacggtgctccacttcacaacagattaaggctcgttcctatgcacggcgatgatggctatgtgacgcatgttatcggaatccagctattctctgaggcgaacatcgatctcagcagcgtatcttatccggtgtacaagcaaaagtccagcagcaggcccagcattcaagatctgaactcatctccccacgagcacgctccgaaaatccagagcgcagaccactgcggcatgcttcagttgtcagacgaagttctcgcacacaacatcctatcccgcctgtccccaagagacgttgcgtccatcggatcggtgtgcaccagaatgcatgagctgaccaagaacgatcacctgaggaagatggtctgccagaacgcgtggggaagggacgtcaccgtgaggctggagatgagcaccaagatggtaggatggggccgtcttgcgagagagctaacaactctcgaggccgcctcatggcggaagttcacggtcggagggcgtgtcgagccttcccggtgcaacttcagtgcctgcgctgttggcaaccggcttgtcctgttcggaggggaaggcgtgaacatgcagcctatggacgacacgttcgtgctcaacctggaggccgcaacgccggagtggcggcgcgtcaaggtttctgcctccccgcccggccggtgggggcacactctgtcgtggctgaacgggtcgtggctggtagtgttcggaggctgcgggcagcaaggtctgctcaacgacgtcttcgtcctcgacctcgacgcccagcagccgacgtggagggaggtcgcgagcgagggccctccgctgccgcggtcctggcacagctcatgtaccctggacggctcgaagctcgtggtctcaggtggctgcgccgagtctggtgtcctcctcagcgacaccttcctcctcgacctcaccaaggagaagcctgcgtggagggagatccctacgtcctggtcgcccccgtcccgcctcggccacaccacgtccgtctacggcgcgaccaagctgttcatgttcggtgggctggcgaagagcggctcgctccggctgcgctccagcgacgcctacacggtggacgtcagcgaggacagcccgcagtggaggcagttggccacgacgaccgggttcccaaacgtcagtccgccgccgaggctcgaccacgtcgcggtgagcctgccctgtggacggatcatcatattcgggggctccatcgcggggctccactcccccgcgcagctgttcctgatcgatcccgcggaggagaagccgatctggaggatcctgaacgtgcctgggcagccccccaagttcgcatgggggcacagcacctgcgtggtcggcggtaccagggtcctggttctcggaggccacactggcgaggaatggatactgaacgagctgcatgagctctgcctggcaagcaggcccgacgaggacggctgatgacttcttttcgttgcacttgcacacatatgcttcatcgcatacaccggcgcgac

SEQ ID NO: 27708 - DNA, 496 bp, Zea Mays
atgtgctagagatggattcgtcttctatataagtgagatcgaagacggagattagaacaaacagagcatatattccctcttcactagctcgtggtaataagggaagcttgatcatctttccttatggcggtgatgaagagcagcacaatcgtcgcgcttctattggctgttgccattctgtcctcactgtctccatgctacgaagccggcggctgcatcgggaaacccaagaagtcaccgccgccgccgagaaggccatacttctcgtcctattccgaggaccaccagaactgccgcttgatctgtagctcgaagggtttcaaggacggtggctggtgtgacgaaagcgtggagcacaaagtgtgctgctgctcccattagaaatataatagcgtatgttatgttgatgcatatatatatgcatcatccatctacctgtgtggtgcaaaattctgaataaaacctgaataaaacctgattgagcacaaagtttcta

SEQ ID NO: 27709 - DNA, 2321 bp, Zea Mays
cttgatttttcttctgctggctagatctcttccatctcccactcatgaattgcttgatctggaaggggacggcttcgtctgtcaatttgagagcactgaccagagaggaaggggaagcagaggggcggagggaagagcagaccagcacatccggagagggaagcagagcagcgcacctggagaggagcggagggaagcagagcaggcacttgggtggaggcggaatagcagtggagaacgcgtgagagaagaagcggcgacactgaagggggtcgggatttggagtttaacaaagccacaccaggcagtccacgttgcatctcagtatggccaaacagcattcttgcatcacatcatctcaaagtacggtgcagattttgatgctttggacattgatgggaggagcgctttgcactgggctgcctacaaaggaaatgcagatacaatcagattactgctatttatggatgctaatcaagttgtacccctttacattgggctgccataagaggaaatttggaggtttgcacagttcttgtacatactggtactaaggaagagctcacactaaaggatagtggtgggttaactcctgtgcaactggcagcagaaaaaggtcatcgacatctttccaatgtcctttctaatgctacaaaagtaagctttgaagataagtttttccctggaaaatcaaggaaaattggatatgcccctttcttgtttgcttatcttgtcatctgcctcatcctgttcctaaactcaattgtatttgcacctaatttttctaggatcactgctactgctggtctttggtcttgggctgctgtatcacttttctttgcatcacaagtaatgttctacagagttagcagaaaaaatcctggctacatcaaggcaaattccaagcgaattgacccaaaggagccacttatggaaattgatcttaccaattcctctacttggacaggcaattggtctcagctatgccctacttgcaagataattcgacctatgcgctccaaacattgtccaacttgtaagcattgtgttgagcagttcgaccatcactgcccatggatatcaaactgtgttggaaagcgaaataagtgggacttttttgtgtttctttggatggggatagctacatcctttcttggtgctgctgttggattccacagacttcagacagagcctgttatactctcatcttcagaatcgtggatacattttatggtgacaaagcatcctggtgctgtactgttcatgtttcttgatgtctttttgttaactggagctcttattctgactggagcacaagcagtacagatagcacggaacatcacaactaatgaggcagcaaatcgatctcgttacacatatcttcgagggcctgatgggcgtttcagaaatccttacagtcgaggttgccagaggaactgcactgattttcttatcagtggatacagcaatgacgaggaggtcgcatggccaacacttcaacaaacagtacagtgaagatagatgcactggttcatgaaacaaaagtgttattgacagatttaatgcccaagatccctggaaagcttatgctttagcgctccgaatatttcagtttgttcagacactggattgacaatggtgtgaagagcgacctggggtcacattctgagtggcacccttttattataagggtctttagtaagtgctgtcggtcatggaattgtttgatactgtagattgttcgcatgcgtgggtgtgcagcagtatgttttcttttctccggctacatgttttgctaggacaagtcatctattcatgttatcgagatgagtgctgatagtgatagatggtgaatgctggttttctgatctccggtgtagtaagttgaattcacaatcttactccattcacgaaatatacacgggacaactgagcaagtataactgtagagcaaccccagcagaaacacttgaatcagggtccctgctactattagtttgagggtctgatacttttttttgctctcttccaacagtagctcttaaatcagagccctcaaattctagtttctgagaatgaagtcattctattctgcatctgctaaacagaacagagccactctatttgttgtttagtttgaatagtagaataaagtggagttgctctgttttttgtttggttaaagagccatataagtgcagagggaggagagtgcccgtgttcgggagagagcttgtatttcgtcgtttttgtggagtggtagcatcccaactatttatggtaaatttttatacggagatttttgaggtgtttgttttgag

SEQ ID NO: 27710 - DNA, 2575 bp, Zea Mays
cttgatttttcttctgctggctagatctcttccatctcccactcatgaattgcttgatctggaaggggacggcttcgtctgtcaatttgagagcactgaccagagaggaaggggaagcagaggggcggagggaagagcagaccagcacatccggagagggaagcagagcagcgcacctggagaggagcggagggaagcagagcaggcacttgggtggaggcggaatagcagtggagaacgcgtgagagaagaagcggcgacactgaagggggtcgggatttggagtttaacaaagccacaccaggcagtccacgttgcatctcagtatggccaaacagcattcttgcatcacatcatctcaaagtacggtgcagattttgatgctttggacattgatgggaggagcgctttgcactgggctgcctacaaaggaaatgcagatacaatcagattactgctatttatggatgctaatcaagtaaggcaagacaaaaatggttgtacccctttacattgggctgccataagaggaaatttggaggtttgcacagttcttgtacatactggtactaaggaagagctcacactaaaggatagtggtgggttaactcctgtgcaactggcagcagaaaaaggtcatcgacatctttccaatgtccttgtacgttttctttggcatttttatttacctattaataattgtcctttttctcctcctgagatgagaaattacagtgcatgccaccattaagtctgctcatacacctattcatctaggtgtgtgctattgtaaatgattgcaatggcatgtattcaatgatgtattcttcccctcttctatcaattttctatcctcccttgttctgaagttggttctttagtgtgtattttaggtactgatcttttcaacaccactaacagaagaaatttctctgcttgtagtctaatgctacaaaagtaagctttgaagataagtttttccctggaaaatcaaggaaaattggatatgcccctttcttgtttgcttatcttgtcatctgcctcatcctgttcctaaactcaattgtatttgcacctaatttttctaggatcactgctactgctggtctttggtcttgggctgctgtatcacttttctttgcatcacaagtaatgttctacagagttagcagaaaaaatcctggctacatcaaggcaaattccaagcgaattgacccaaaggcaattggtctcagctatgccctacttgcaagataattcgacctatgcgctccaaacattgtccaacttgtaagcattgtgttgagcagttcgaccatcactgcccatggatatcaaactgtgttggaaagcgaaataagtgggacttttttgtgtttctttggatggggatagctacatcctttcttggtgctgctgttggattccacagacttcagacagagcctgttatactctcatcttcagaatcgtggatacattttatggtgacaaagcatcctggtgctgtactgttcatgtttcttgatgtctttttgttaactggagctcttattctgactggagcacaagcagtacagatagcacggaacatcacaactaatgaggcagcaaatcgatctcgttacacatatcttcgagggcctgatgggcgtttcagaaatccttacagtcgaggttgccagaggaactgcactgattttcttatcagtggatacagcaatgacgaggaggtcgcatggccaacacttcaacaaacagtacagtgaagatagatgcactggttcatgaaacaaaagtgttattgacagatttaatgcccaagatccctggaaagcttatgctttagcgctccgaatatttcagtttgttcagacactggattgacaatggtgtgaagagcgacctggggtcacattctgagtggcacccttttattataagggtctttagtaagtgctgtcggtcatggaattgtttgatactgtagattgttcgcatgcgtgggtgtgcagcagtatgttttcttttctccggctacatgttttgctaggacaagtcatctattcatgttatcgagatgagtgctgatagtgatagatggtgaatgctggttttctgatctccggtgtagtaagttgaattcacaatcttactccattcacgaaatatacacgggacaactgagcaagtataactgtagagcaaccccagcagaaacacttgaatcagggtccctgctactattagtttgagggtctgatacttttttttgctctcttccaacagtagctcttaaatcagagccctcaaattctagtttctgagaatgaagtcattctattctgcatctgctaaacagaacagagccactctatttgttgtttagtttgaatagtagaataaagtggagttgctctgttttttgtttggttaaagagccatataagtgcagagggaggagagtgcccgtgttcgggagagagcttgtatttcgtcgtttttgtggagtggtagcatcccaactatttatggtaaatttttatacggagatttttgaggtgtttgttttgag

SEQ ID NO: 27711 - DNA, 2340 bp, Zea Mays
cttgatttttcttctgctggctagatctcttccatctcccactcatgaattgcttgatctggaaggggacggcttcgtctgtcaatttgagagcactgaccagagaggaaggggaagcagaggggcggagggaagagcagaccagcacatccggagagggaagcagagcagcgcacctggagaggagcggagggaagcagagcaggcacttgggtggaggcggaatagcagtggagaacgcgtgagagaagaagcggcgacactgaagggggtcgggatttggagtttaacaaagccacaccaggcagtccacgttgcatctcagtatggccaaacagcattcttgcatcacatcatctcaaagtacggtgcagattttgatgctttggacattgatgggaggagcgctttgcactgggctgcctacaaaggaaatgcagatacaatcagattactgctatttatggatgctaatcaagtaaggcaagacaaaaatggttgtacccctttacattgggctgccataagaggaaatttggaggtttgcacagttcttgtacatactggtactaaggaagagctcacactaaaggatagtggtgggttaactcctgtgcaactggcagcagaaaaaggtcatcgacatctttccaatgtcctttctaatgctacaaaagtaagctttgaagataagtttttccctggaaaatcaaggaaaattggatatgcccctttcttgtttgcttatcttgtcatctgcctcatcctgttcctaaactcaattgtatttgcacctaatttttctaggatcactgctactgctggtctttggtcttgggctgctgtatcacttttctttgcatcacaagtaatgttctacagagttagcagaaaaaatcctggctacatcaaggcaaattccaagcgaattgacccaaaggagccacttatggaaattgatcttaccaattcctctacttggacaggcaattggtctcagctatgccctacttgcaagataattcgacctatgcgctccaaacattgtccaacttgtaagcattgtgttgagcagttcgaccatcactgcccatggatatcaaactgtgttggaaagcgaaataagtgggacttttttgtgtttctttggatggggatagctacatcctttcttggtgctgctgttggattccacagacttcagacagagcctgttatactctcatcttcagaatcgtggatacattttatggtgacaaagcatcctggtgctgtactgttcatgtttcttgatgtctttttgttaactggagctcttattctgactggagcacaagcagtacagatagcacggaacatcacaactaatgaggcagcaaatcgatctcgttacacatatcttcgagggcctgatgggcgtttcagaaatccttacagtcgaggttgccagaggaactgcactgattttcttatcagtggatacagcaatgacgaggaggtcgcatggccaacacttcaacaaacagtacagtgaagatagatgcactggttcatgaaacaaaagtgttattgacagatttaatgcccaagatccctggaaagcttatgctttagcgctccgaatatttcagtttgttcagacactggattgacaatggtgtgaagagcgacctggggtcacattctgagtggcacccttttattataagggtctttagtaagtgctgtcggtcatggaattgtttgatactgtagattgttcgcatgcgtgggtgtgcagcagtatgttttcttttctccggctacatgttttgctaggacaagtcatctattcatgttatcgagatgagtgctgatagtgatagatggtgaatgctggttttctgatctccggtgtagtaagttgaattcacaatcttactccattcacgaaatatacacgggacaactgagcaagtataactgtagagcaaccccagcagaaacacttgaatcagggtccctgctactattagtttgagggtctgatacttttttttgctctcttccaacagtagctcttaaatcagagccctcaaattctagtttctgagaatgaagtcattctattctgcatctgctaaacagaacagagccactctatttgttgtttagtttgaatagtagaataaagtggagttgctctgttttttgtttggttaaagagccatataagtgcagagggaggagagtgcccgtgttcgggagagagcttgtatttcgtcgtttttgtggagtggtagcatcccaactatttatggtaaatttttatacggagatttttgaggtgtttgttttgag

SEQ ID NO: 27712 - DNA, 2335 bp, Zea Mays
atcgattctgctggtggcctgcttgatttttcttctgctggctagatctcttccatctcccactcatgaattgcttgatctggaaggggacggcttcgtctgtcaatttgagagcactgaccagagaggaaggggaagcagaggggcggagggaagagcagaccagcacatccggagagggaagcagagcagcgcacctggagaggagcggagggaagcagagcaggcacttgggtggaggcggaatagcagtggagaacgcgtgagagaagaagcggcgacactgaagggggtcgggatttggagtttaacaaagccacaccaggcagtccacgttgcatctcagtatggccaaacagcattcttgcatcacatcatctcaaagtacggtgcagattttgatgctttggacattgatgggaggagcgctttgcactgggctgcctacaaaggaaatgcagatacaatcagattactgctatttatggatgctaatcaagtaaggcaagacaaaaatggttgtacccctttacattgggctgccataagaggaaatttggaggtttgcacagttcttgtacatactggtactaaggaagagctcacactaaaggatagtggtgggttaactcctgtgcaactggcagcagaaaaagtctaatgctacaaaagtaagctttgaagataagtttttccctggaaaatcaaggaaaattggatatgcccctttcttgtttgcttatcttgtcatctgcctcatcctgttcctaaactcaattgtatttgcacctaatttttctaggatcactgctactgctggtctttggtcttgggctgctgtatcacttttctttgcatcacaagtaatgttctacagagttagcagaaaaaatcctggctacatcaaggcaaattccaagcgaattgacccaaaggagccacttatggaaattgatcttaccaattcctctacttggacaggcaattggtctcagctatgccctacttgcaagataattcgacctatgcgctccaaacattgtccaacttgtaagcattgtgttgagcagttcgaccatcactgcccatggatatcaaactgtgttggaaagcgaaataagtgggacttttttgtgtttctttggatggggatagctacatcctttcttggtgctgctgttggattccacagacttcagacagagcctgttatactctcatcttcagaatcgtggatacattttatggtgacaaagcatcctggtgctgtactgttcatgtttcttgatgtctttttgttaactggagctcttattctgactggagcacaagcagtacagatagcacggaacatcacaactaatgaggcagcaaatcgatctcgttacacatatcttcgagggcctgatgggcgtttcagaaatccttacagtcgaggttgccagaggaactgcactgattttcttatcagtggatacagcaatgacgaggaggtcgcatggccaacacttcaacaaacagtacagtgaagatagatgcactggttcatgaaacaaaagtgttattgacagatttaatgcccaagatccctggaaagcttatgctttagcgctccgaatatttcagtttgttcagacactggattgacaatggtgtgaagagcgacctggggtcacattctgagtggcacccttttattataagggtctttagtaagtgctgtcggtcatggaattgtttgatactgtagattgttcgcatgcgtgggtgtgcagcagtatgttttcttttctccggctacatgttttgctaggacaagtcatctattcatgttatcgagatgagtgctgatagtgatagatggtgaatgctggttttctgatctccggtgtagtaagttgaattcacaatcttactccattcacgaaatatacacgggacaactgagcaagtataactgtagagcaaccccagcagaaacacttgaatcagggtccctgctactattagtttgagggtctgatacttttttttgctctcttccaacagtagctcttaaatcagagccctcaaattctagtttctgagaatgaagtcattctattctgcatctgctaaacagaacagagccactctatttgttgtttagtttgaatagtagaataaagtggagttgctctgttttttgtttggttaaagagccatataagtgcagagggaggagagtgcccgtgttcgggagagagcttgtatttcgtcgtttttgtggagtggtagcatcccaactatttatggtaaatttttatacggagatttttgaggtgtttgttttgag

SEQ ID NO: 27713 - DNA, 2064 bp, Zea Mays
agcggtcgaaggtcacctcaggggttaggcagtccacgttgcatctcagtatggccaaacagcattcttgcatcacatcatctcaaagtacggtgcagattttgatgctttggacattgatgggaggagcgctttgcactgggctgcctacaaaggaaatgcagatacaatcagattactgctatttatggatgctaatcaagtaaggcaagacaaaaatggttgtacccctttacattgggctgccataagaggaaatttggaggtttgcacagttcttgtacatactggtactaaggaagagctcacactaaaggatagtggtgggttaactcctgtgcaactggcagcagaaaaaggtcatcgacatctttccaatgtcctttctaatgctacaaaagtaagctttgaagataagtttttccctggaaaatcaaggaaaattggatatgcccctttcttgtttgcttatcttgtcatctgcctcatcctgttcctaaactcaattgtatttgcacctaatttttctaggatcactgctactgctggtctttggtcttgggctgctgtatcacttttctttgcatcacaagtaatgttctacagagttagcagaaaaaatcctggctacatcaaggcaaattccaagcgaattgacccaaaggagccacttatggaaattgatcttaccaattcctctacttggacaggcaattggtctcagctatgccctacttgcaagataattcgacctatgcgctccaaacattgtccaacttgtaagcattgtgttgagcagttcgaccatcactgcccatggatatcaaactgtgttggaaagcgaaataagtgggacttttttgtgtttctttggatggggatagctacatcctttcttggtgctgctgttggattccacagacttcagacagagcctgttatactctcatcttcagaatcgtggatacattttatggtgacaaagcatcctggtgctgtactgttcatgtttcttgatgtctttttgttaactggagctcttattctgactggagcacaagcagtacagatagcacggaacatcacaactaatgaggcagcaaatcgatctcgttacacatatcttcgagggcctgatgggcgtttcagaaatccttacagtcgaggttgccagaggaactgcactgattttcttatcagtggatacagcaatgacgaggaggtcgcatggccaacacttcaacaaacagtacagtgaagatagatgcactggttcatgaaacaaaagtgttattgacagatttaatgcccaagatccctggaaagcttatgctttagcgctccgaatatttcagtttgttcagacactggattgacaatggtgtgaagagcgacctggggtcacattctgagtggcacccttttattataagggtctttagtaagtgctgtcggtcatggaattgtttgatactgtagattgttcgcatgcgtgggtgtgcagcagtatgttttcttttctccggctacatgttttgctaggacaagtcatctattcatgttatcgagatgagtgctgatagtgatagatggtgaatgctggttttctgatctccggtgtagtaagttgaattcacaatcttactccattcacgaaatatacacgggacaactgagcaagtataactgtagagcaaccccagcagaaacacttgaatcagggtccctgctactattagtttgagggtctgatacttttttttgctctcttccaacagtagctcttaaatcagagccctcaaattctagtttctgagaatgaagtcattctattctgcatctgctaaacagaacagagccactctatttgttgtttagtttgaatagtagaataaagtggagttgctctgttttttgtttggttaaagagccatataagtgcagagggaggagagtgcccgtgttcgggagagagcttgtatttcgtcgtttttgtggagtggtagcatcccaactatttatggtaaatttttatacggagatttttgaggtgtttgttttgag

SEQ ID NO: 27714 - DNA, 2073 bp, Zea Mays
attaaggcatcacttaagcggtgcttaagcgccagagcggtcgaaggtcacctcaggggttaggcagtccacgttgcatctcagtatggccaaacagcattcttgcatcacatcatctcaaagtacggtgcagattttgatgctttggacattgatgggaggagcgctttgcactgggctgcctacaaaggaaatgcagatacaatcagattactgctatttatggatgctaatcaagtaaggcaagacaaaaatggttgtacccctttacattgggctgccataagaggaaatttggaggtttgcacagttcttgtacatactggtactaaggaagagctcacactaaaggatagtggtgggttaactcctgtgcaactggcagcagaaaaagtctaatgctacaaaagtaagctttgaagataagtttttccctggaaaatcaaggaaaattggatatgcccctttcttgtttgcttatcttgtcatctgcctcatcctgttcctaaactcaattgtatttgcacctaatttttctaggatcactgctactgctggtctttggtcttgggctgctgtatcacttttctttgcatcacaagtaatgttctacagagttagcagaaaaaatcctggctacatcaaggcaaattccaagcgaattgacccaaaggagccacttatggaaattgatcttaccaattcctctacttggacaggcaattggtctcagctatgccctacttgcaagataattcgacctatgcgctccaaacattgtccaacttgtaagcattgtgttgagcagttcgaccatcactgcccatggatatcaaactgtgttggaaagcgaaataagtgggacttttttgtgtttctttggatggggatagctacatcctttcttggtgctgctgttggattccacagacttcagacagagcctgttatactctcatcttcagaatcgtggatacattttatggtgacaaagcatcctggtgctgtactgttcatgtttcttgatgtctttttgttaactggagctcttattctgactggagcacaagcagtacagatagcacggaacatcacaactaatgaggcagcaaatcgatctcgttacacatatcttcgagggcctgatgggcgtttcagaaatccttacagtcgaggttgccagaggaactgcactgattttcttatcagtggatacagcaatgacgaggaggtcgcatggccaacacttcaacaaacagtacagtgaagatagatgcactggttcatgaaacaaaagtgttattgacagatttaatgcccaagatccctggaaagcttatgctttagcgctccgaatatttcagtttgttcagacactggattgacaatggtgtgaagagcgacctggggtcacattctgagtggcacccttttattataagggtctttagtaagtgctgtcggtcatggaattgtttgatactgtagattgttcgcatgcgtgggtgtgcagcagtatgttttcttttctccggctacatgttttgctaggacaagtcatctattcatgttatcgagatgagtgctgatagtgatagatggtgaatgctggttttctgatctccggtgtagtaagttgaattcacaatcttactccattcacgaaatatacacgggacaactgagcaagtataactgtagagcaaccccagcagaaacacttgaatcagggtccctgctactattagtttgagggtctgatacttttttttgctctcttccaacagtagctcttaaatcagagccctcaaattctagtttctgagaatgaagtcattctattctgcatctgctaaacagaacagagccactctatttgttgtttagtttgaatagtagaataaagtggagttgctctgttttttgtttggttaaagagccatataagtgcagagggaggagagtgcccgtgttcgggagagagcttgtatttcgtcgtttttgtggagtggtagcatcccaactatttatggtaaatttttatacggagatttttgaggtgtttgttttgag

SEQ ID NO: 27715 - DNA, 2541 bp, Zea Mays
gtcagccccttgaccaccgttccaaccctctcccatcgcgtcgcctcgaaggaagcgcggctgatcctgctccaagcctccaaccctagcttccccgctccccaccttcctccgtccggggctcatggcggagatcgaggtggtatccgaaggcggcaggcgggacgaggacgaggagcggcggcggcagcagcagcaaggcgcgggggagccggaccccgtggtggacgtgtactctgcggcggcgtatggggacctggagcggctccgcggtttcgtggagcaggggggagccgccaccgcgctcagggagcccgacggcaacggctaccacgcgctccagtgggccgcgctcaacaactacccccacgtcgcgctctacatcgtcgagcacggtggcgacgttaatgcgacggaccacgcgcggcagacggcgctgcactgggcggccgtgcgtgggtccacttccgtggctgacgtgctgatggagcacggagcgagggtcgaggccgccgacgtcaatggcttccggtccacgttgcatctcagtatggccaaacagcattcttgcatcacatcatctcaaagtacggtgcagattttgatgctttggacattgatgggaggagcgctttgcactgggctgcctacaaaggaaatgcagatacaatcagattactgctatttatggatgctaatcaagtaaggcaagacaaaaatggttgtacccctttacattgggctgccataagaggaaatttggaggtttgcacagttcttgtacatactggtactaaggaagagctcacactaaaggatagtggtgggttaactcctgtgcaactggcagcagaaaaaggtcatcgacatctttccaatgtcctttctaatgctacaaaagtaagctttgaagataagtttttccctggaaaatcaaggaaaattggatatgcccctttcttgtttgcttatcttgtcatctgcctcatcctgttcctaaactcaattgtatttgcacctaatttttctaggatcactgctactgctggtctttggtcttgggctgctgtatcacttttctttgcatcacaaaaaaaatcctggctacatcaaggcaaattccaagcgaattgacccaaaggagccacttatggaaattgatcttaccaattcctctacttggacaggcaattggtctcagctatgccctacttgcaagataattcgacctatgcgctccaaacattgtccaacttgtaagcattgtgttgagcagttcgaccatcactgcccatggatatcaaactgtgttggaaagcgaaataagtgggacttttttgtgtttctttggatggggatagctacatcctttcttggtgctgctgttggattccacagacttcagacagagcctgttatactctcatcttcagaatcgtggatacattttatggtgacaaagcatcctggtgctgtactgttcatgtttcttgatgtctttttgttaactggagctcttattctgactggagcacaagcagtacagatagcacggaacatcacaactaatgaggcagcaaatcgatctcgttacacatatcttcgagggcctgatgggcgtttcagaaatccttacagtcgaggttgccagaggaactgcactgattttcttatcagtggatacagcaatgacgaggaggtcgcatggccaacacttcaacaaacagtacagtgaagatagatgcactggttcatgaaacaaaagtgttattgacagatttaatgcccaagatccctggaaagcttatgctttagcgctccgaatatttcagtttgttcagacactggattgacaatggtgtgaagagcgacctggggtcacattctgagtggcacccttttattataagggtctttagtaagtgctgtcggtcatggaattgtttgatactgtagattgttcgcatgcgtgggtgtgcagcagtatgttttcttttctccggctacatgttttgctaggacaagtcatctattcatgttatcgagatgagtgctgatagtgatagatggtgaatgctggttttctgatctccggtgtagtaagttgaattcacaatcttactccattcacgaaatatacacgggacaactgagcaagtataactgtagagcaaccccagcagaaacacttgaatcagggtccctgctactattagtttgagggtctgatacttttttttgctctcttccaacagtagctcttaaatcagagccctcaaattctagtttctgagaatgaagtcattctattctgcatctgctaaacagaacagagccactctatttgttgtttagtttgaatagtagaataaagtggagttgctctgttttttgtttggttaaagagccatataagtgcagagggaggagagtgcccgtgttcgggagagagcttgtatttcgtcgtttttgtggagtggtagcatcccaactatttatggtaaatttttatacggagatttttgaggtgtttgttttgag

SEQ ID NO: 27716 - DNA, 3978 bp, Zea Mays
ctagaaacagttcccagaatctgaacattaccataacgcactgatacattaactgaacacattgatacattaactgaaaacaactaactacatagatagtcttgaatacatagatagtcttacataaacacaaccacatcacagagagatgttacaagtacatagtcttgacatcacaaaagtcttcatatctggttagaagttcatctcatgacacaaactggttacaagttcatctcatgaccacaaaagatagaaccacagaagaaacatactagtagtcttggcaacttaaacagtacgatcataaatctggtcgtagtcgtagcccataatacgacaatgctcgaacaaagagacaaccactttgttctcctcccacttcatgtcttaaaaaaccatttcccacagctccggatcttctgacacatatccatccacttggtcctcaacatgagaagggttagagtggtcttcaacatctgaaggggatgatcaaggtcccaaccaggacatttgttgtccagatcttcttcacacacatttgaagtcttctcgagactctttcacacttccttcaaatggccagcaagttttacaaccttacccccttcaactcctgggatgctacaacacagcctattaatggtatgtaaaagtgaagattgcctcctcatctcttgaatgacatatcggagtaagttcttgatgctaacgtgatacttcaaatcaacatgttcctgtacatattaaactagttgttggtcaagtggatgactaagttaccatgcttgtgaagaactaaccctaatttgaatgaacagcagccctaaaccctatgcagcaaaataagagagaaagaaaatcagtcaccaatgattccaccatggagtcatcttcaacaaatcttctatacttcacagcagagacgacaagttgaaccttatcggctgcaatagtggcagattcaacagccgcacgtgcctccttctcagcaaccaacgccgcacatctggcctccgcagctgcaacaaccgcagcacgagtagcatcaacagcttctgcaacagcgacgaccggagcagttcaatccatctctgggatttgagtgaggcacctagggtgccgcggttagggttgcgcagcaagaggaaagaacggcggcggctagggtgcgtgtctggtagcgagaatagggagaagggtaatagatgtagagacgacgtgagtatcattagtttaatcctcgatgttacctgataatagagtagtcatgtctattttagagtgtgagttgtcctatagttttttataacggagaatctctctcctaatcctccaattcgtcgaagccggacttgcaaatttctcccggttcgtcgggtgctgtccgtccctttgtcggtggtcgttgttcccaaccaaaatttccaccccttcgtcagccccttgaccaccgttccaaccctctcccatcgcgtcgcctcgaaggaagcgcggctgatcctgctccaagcctccaaccctagcttccccgctccccaccttcctccgtccggggctcatggcggagatcgaggtggtatccgaaggcggcaggcgggacgaggacgaggagcggcggcggcagcagcagcaaggcgcgggggagccggaccccgtggtggacgtgtactctgcggcggcgtatggggacctggagcggctccgcggtttcgtggagcaggggggagccgccaccgcgctcagggagcccgacggcaacggctaccacgcgctccagtgggccgcgctcaacaactacccccacgtcgcgctctacatcgtcgagcacggtggcgacgttaatgcgacggaccacgcgcggcagacggcgctgcactgggcggccgtgcgtgggtccacttccgtggctgacgtgctgatggagcacggagcgagggtcgaggccgccgacgtcaatggcttccggtccacgttgcatctcagtatggccaaacagcattcttgcatcacatcatctcaaagtacggtgcagattttgatgctttggacattgatgggaggagcgctttgcactgggctgcctacaaaggaaatgcagatacaatcagattactgctatttatggatgctaatcaagtaaggcaagacaaaaatggttgtacccctttacattgggctgccataagaggaaatttggaggtttgcacagttcttgtacatactggtactaaggaagagctcacactaaaggatagtggtgggttaactcctgtgcaactggcagcagaaaaagtctaatgctacaaaagtaagctttgaagataagtttttccctggaaaatcaaggaaaattggatatgcccctttcttgtttgcttatcttgtcatctgcctcatcctgttcctaaactcaattgtatttgcacctaatttttctaggatcactgctactgctggtctttggtcttgggctgctgtatcacttttctttgcatcacaagtaatgttctacagagttagcagaaaaaatcctggctacatcaaggcaaattccaagcgaattgacccaaaggagccacttatggaaattgatcttaccaattcctctacttggacaggcaattggtctcagctatgccctacttgcaagataattcgacctatgcgctccaaacattgtccaacttgtaagcattgtgttgagcagttcgaccatcactgcccatggatatcaaactgtgttggaaagcgaaataagtgggacttttttgtgtttctttggatggggatagctacatcctttcttggtgctgctgttggattccacagacttcagacagagcctgttatactctcatcttcagaatcgtggatacattttatggtgacaaagcatcctggtgctgtactgttcatgtttcttgatgtctttttgttaactggagctcttattctgactggagcacaagcagtacagatagcacggaacatcacaactaatgaggcagcaaatcgatctcgttacacatatcttcgagggcctgatgggcgtttcagaaatccttacagtcgaggttgccagaggaactgcactgattttcttatcagtggatacagcaatgacgaggaggtcgcatggccaacacttcaacaaacagtacagtgaagatagatgcactggttcatgaaacaaaagtgttattgacagatttaatgcccaagatccctggaaagcttatgctttagcgctccgaatatttcagtttgttcagacactggattgacaatggtgtgaagagcgacctggggtcacattctgagtggcacccttttattataagggtctttagtaagtgctgtcggtcatggaattgtttgatactgtagattgttcgcatgcgtgggtgtgcagcagtatgttttcttttctccggctacatgttttgctaggacaagtcatctattcatgttatcgagatgagtgctgatagtgatagatggtgaatgctggttttctgatctccggtgtagtaagttgaattcacaatcttactccattcacgaaatatacacgggacaactgagcaagtataactgtagagcaaccccagcagaaacacttgaatcagggtccctgctactattagtttgagggtctgatacttttttttgctctcttccaacagtagctcttaaatcagagccctcaaattctagtttctgagaatgaagtcattctattctgcatctgctaaacagaacagagccactctatttgttgtttagtttgaatagtagaataaagtggagttgctctgttttttgtttggttaaagagccatataagtgcagagggaggagagtgcccgtgttcgggagagagcttgtatttcgtcgtttttgtggagtggtagcatcccaactatttatggtaaatttttatacggagatttttgaggtgtttgttttgag

SEQ ID NO: 27717 - DNA, 4008 bp, Zea Mays
ctagaaacagttcccagaatctgaacattaccataacgcactgatacattaactgaacacattgatacattaactgaaaacaactaactacatagatagtcttgaatacatagatagtcttacataaacacaaccacatcacagagagatgttacaagtacatagtcttgacatcacaaaagtcttcatatctggttagaagttcatctcatgacacaaactggttacaagttcatctcatgaccacaaaagatagaaccacagaagaaacatactagtagtcttggcaacttaaacagtacgatcataaatctggtcgtagtcgtagcccataatacgacaatgctcgaacaaagagacaaccactttgttctcctcccacttcatgtcttaaaaaaccatttcccacagctccggatcttctgacacatatccatccacttggtcctcaacatgagaagggttagagtggtcttcaacatctgaaggggatgatcaaggtcccaaccaggacatttgttgtccagatcttcttcacacacatttgaagtcttctcgagactctttcacacttccttcaaatggccagcaagttttacaaccttacccccttcaactcctgggatgctacaacacagcctattaatggtatgtaaaagtgaagattgcctcctcatctcttgaatgacatatcggagtaagttcttgatgctaacgtgatacttcaaatcaacatgttcctgtacatattaaactagttgttggtcaagtggatgactaagttaccatgcttgtgaagaactaaccctaatttgaatgaacagcagccctaaaccctatgcagcaaaataagagagaaagaaaatcagtcaccaatgattccaccatggagtcatcttcaacaaatcttctatacttcacagcagagacgacaagttgaaccttatcggctgcaatagtggcagattcaacagccgcacgtgcctccttctcagcaaccaacgccgcacatctggcctccgcagctgcaacaaccgcagcacgagtagcatcaacagcttctgcaacagcgacgaccggagcagttcaatccatctctgggatttgagtgaggcacctagggtgccgcggttagggttgcgcagcaagaggaaagaacggcggcggctagggtgcgtgtctggtagcgagaatagggagaagggtaatagatgtagagacgacgtgagtatcattagtttaatcctcgatgttacctgataatagagtagtcatgtctattttagagtgtgagttgtcctatagttttttataacggagaatctctctcctaatcctccaattcgtcgaagccggacttgcaaatttctcccggttcgtcgggtgctgtccgtccctttgtcggtggtcgttgttcccaaccaaaatttccaccccttcgtcagccccttgaccaccgttccaaccctctcccatcgcgtcgcctcgaaggaagcgcggctgatcctgctccaagcctccaaccctagcttccccgctccccaccttcctccgtccggggctcatggcggagatcgaggtggtatccgaaggcggcaggcgggacgaggacgaggagcggcggcggcagcagcagcaaggcgcgggggagccggaccccgtggtggacgtgtactctgcggcggcgtatggggacctggagcggctccgcggtttcgtggagcaggggggagccgccaccgcgctcagggagcccgacggcaacggctaccacgcgctccagtgggccgcgctcaacaactacccccacgtcgcgctctacatcgtcgagcacggtggcgacgttaatgcgacggaccacgcgcggcagacggcgctgcactgggcggccgtgcgtgggtccacttccgtggctgacgtgctgatggagcacggagcgagggtcgaggccgccgacgtcaatggcttccgggcagtccacgttgcatctcagtatggccaaacagcattcttgcatcacatcatctcaaagtacggtgcagattttgatgctttggacattgatgggaggagcgctttgcactgggctgcctacaaaggaaatgcagatacaatcagattactgctatttatggatgctaatcaagtaaggcaagacaaaaatggttgtacccctttacattgggctgccataagaggaaatttggaggtttgcacagttcttgtacatactggtactaaggaagagctcacactaaaggatagtggtgggttaactcctgtgcaactggcagcagaaaaaggtcatcgacatctttccaatgtcctttctaatgctacaaaagtaagctttgaagataagtttttccctggaaaatcaaggaaaattggatatgcccctttcttgtttgcttatcttgtcatctgcctcatcctgttcctaaactcaattgtatttgcacctaatttttctaggatcactgctactgctggtctttggtcttgggctgctgtatcacttttctttgcatcacaagtaatgttctacagagttagcagaaaaaatcctggctacatcaaggcaaattccaagcgaattgacccaaaggagccacttatggaaattgatcttaccaattcctctacttggacaggcaattggtctcagctatgccctacttgcaagataattcgacctatgcgctccaaacattgtccaacttgtaagcattgtgttgagcagttcgaccatcactgcccatggatatcaaactgtgttggaaagcgaaataagtgggacttttttgtgtttctttggatggggatagctacatcctttcttggtgctgctgttggattccacagacttcagacagagcctgttatactctcatcttcagaatcgtggatacattttatggtgacaaagcatcctggtgctgtactgttcatgtttcttgatgtctttttgttaactggagctcttattctgactggagcacaagcagtacagatagcacggaacatcacaactaatgaggcagcaaatcgatctcgttacacatatcttcgagggcctgatgggcgtttcagaaatccttacagtcgaggttgccagaggaactgcactgattttcttatcagtggatacagcaatgacgaggaggtcgcatggccaacacttcaacaaacagtacagtgaagatagatgcactggttcatgaaacaaaagtgttattgacagatttaatgcccaagatccctggaaagcttatgctttagcgctccgaatatttcagtttgttcagacactggattgacaatggtgtgaagagcgacctggggtcacattctgagtggcacccttttattataagggtctttagtaagtgctgtcggtcatggaattgtttgatactgtagattgttcgcatgcgtgggtgtgcagcagtatgttttcttttctccggctacatgttttgctaggacaagtcatctattcatgttatcgagatgagtgctgatagtgatagatggtgaatgctggttttctgatctccggtgtagtaagttgaattcacaatcttactccattcacgaaatatacacgggacaactgagcaagtataactgtagagcaaccccagcagaaacacttgaatcagggtccctgctactattagtttgagggtctgatacttttttttgctctcttccaacagtagctcttaaatcagagccctcaaattctagtttctgagaatgaagtcattctattctgcatctgctaaacagaacagagccactctatttgttgtttagtttgaatagtagaataaagtggagttgctctgttttttgtttggttaaagagccatataagtgcagagggaggagagtgcccgtgttcgggagagagcttgtatttcgtcgtttttgtggagtggtagcatcccaactatttatggtaaatttttatacggagatttttgaggtgtttgttttgag

SEQ ID NO: 27718 - DNA, 1061 bp, Zea Mays
cgaaggtcacctcaggggttaggcagtccacgttgcatctcagtatggccaaacagcattcttgcatcacatcatctcaaagtacggtgcagattttgatgctttggacattgatgggaggagcgctttgcactgggctgcctacaaaggaaatgcagatacaatcagattactgctatttatggatgctaatcaagtaaggcaagacaaaaatggttgtacccctttacattgggctgccataagaggaaatttggaggtttgcacagttcttgtacatactggtactaaggaagagctcacactaaaggatagtggtgggttaactcctgtgcaactggcagcagaaaaaggtcatcgacatctttccaatgtcctttctaatgctacaaaagtaagctttgaagataagtttttccctggaaaatcaaggaaaattggatatgcccctttcttgtttgcttatcttgtcatctgcctcatcctgttcctaaactcaattgtatttgcacctaatttttctaggatcactgctactgctggtctttggtcttgggctgctgtatcacttttctttgcatcacaagtaatgttctacagagttagcagaaaaaatcctggctacatcaaggcaaattccaagcgaattgacccaaaggagccacttatggaaattgatcttaccaattcctctacttggacaggcaattggtctcagctatgccctacttgcaaggaagttggcaataggctattttctttgttgtccatctatctatctttgctactgtagcagtatggcaataggccacccagtaatggcttgcatcagccatgaccgacatgtagaatacttggggctgagatcagcccatgtactagtgtacttctgtagttggtgaacattcacccctacttgtatatacaccagggaataaaaaggagatagtagttcagttgctgcactagtttgtgtgtgcggtttctgtgctcaacacttttttatacctccagcctaaggtgttgtgtgcgcgtgagcgcgtgcgtgcaagggagaccag

SEQ ID NO: 27719 - DNA, 1545 bp, Zea Mays
gtcagccccttgaccaccgttccaaccctctcccatcgcgtcgcctcgaaggaagcgcggctgatcctgctccaagcctccaaccctagcttccccgctccccaccttcctccgtccggggctcatggcggagatcgaggtggtatccgaaggcggcaggcgggacgaggacgaggagcggcggcggcagcagcagcaaggcgcgggggagccggaccccgtggtggacgtgtactctgcggcggcgtatggggacctggagcggctccgcggtttcgtggagcaggggggagccgccaccgcgctcagggagcccgacggcaacggctaccacgcgctccagtgggccgcgctcaacaactacccccacgtcgcgctctacatcgtcgagcacggtggcgacgttaatgcgacggaccacgcgcggcagacggcgctgcactgggcggccgtgcgtgggtccacttccgtggctgacgtgctgatggagcacggagcgagggtcgaggccgccgacgtcaatggcttccgggcagtccacgttgcatctcagtatggccaaacagcattcttgcatcacatcatctcaaagtacggtgcagattttgatgctttggacattgatgggaggagcgctttgcactgggctgcctacaaaggaaatgcagatacaatcagattactgctatttatggatgctaatcaagtaaggcaagacaaaaatggttgtacccctttacattgggctgccataagaggaaatttggaggtttgcacagttcttgtacatactggtactaaggaagagctcacactaaaggatagtggtgggttaactcctgtgcaactggcagcagaaaaagtctaatgctacaaaagtaagctttgaagataagtttttccctggaaaatcaaggaaaattggatatgcccctttcttgtttgcttatcttgtcatctgcctcatcctgttcctaaactcaattgtatttgcacctaatttttctaggatcactgctactgctggtctttggtcttgggctgctgtatcacttttctttgcatcacaagtaatgttctacagagttagcagaaaaaatcctggctacatcaaggcaaattccaagcgaattgacccaaaggagccacttatggaaattgatcttaccaattcctctacttggacaggcaattggtctcagctatgccctacttgcaaggaagttggcaataggctattttctttgttgtccatctatctatctttgctactgtagcagtatggcaataggccacccagtaatggcttgcatcagccatgaccgacatgtagaatacttggggctgagatcagcccatgtactagtgtacttctgtagttggtgaacattcacccctacttgtatatacaccagggaataaaaaggagatagtagttcagttgctgcactagtttgtgtgtgcggtttctgtgctcaacacttttttatacctccagcctaaggtgttgtgtgcgcgtgagcgcgtgcgtgcaagggagaccag

SEQ ID NO: 27720 - DNA, 2381 bp, Zea Mays
cttttctccttttcctctccttttcattttcctttcagtttttccgtggcgaagatactgttgcatttgtgggggcagtgctctgtgcctctgtctgagctgatcccagctgtgattgattgcttgctcatgggtcacggccatgaccatggcatcccctcctctgcaaaagcccgtgcctttggtgtcttgtcacgggcaaaagtggcgcatgttcattattatcccccctgcctttttgctttcgcaagccctgtatgtgtcctggccataaagatgcaatctttatcctctatgcacatacttcacccgaaaaaaagctaaaggggtcactgattggtgctgcttccttaaatcttgcatgtgtgggaactaggaggccattggtcacggggttgggtctgtgctcaggtgccagcaagatgcagggtgtgttgtcgagggtgaggaggcccttcactccgacgcagtggatggagctggagcaccaggccctgatctacaagcacttcgctgtgaatgcccctgtgccgtccagcttgctcctccctatcaaaagaagcctcaatccatggagcagccttggctccagctcattgggatgggcaccatttcgttccggctctgctgatgcagaaccaggaagatgccgccgcacagatggcaagaagtggcggtgctctagagatgctgtcggggaccaaaaatactgtgagcgacacataaaacgtggttgccaccgttcaagaaagcatgtggaaggccgaaaggcaacaccgaccactgcagatccaaccatggctgtttctggtggttcattgttgcacagccatgctgttgcttggcagcagcagggcaaaagctcagctgctaatgtgactgatccattctcactagggtccaacaggagaactgtgcatcatatattaaaagaagtaaaaaagtctaaagaagaccaaaatctgccataagaggcagaaagagataggaagtgggaggggcaccagcacactatattttctcaacataaatgacaatctatggttgatacatgtgccagtctagcagtcagggttcaggacgtaccaaaacattgaaaatgttatatcctttagacattgaaattttgtccatagccattcatagttgaaaattttgttcttgatttctttcaactggtcagtgatttcttcatgtaacctgtcattgatgcattccatcttttgccccgtgcccattcctatatataagattttattattatgtttgtttgttcaaacaattatggtaagcatgtgcaaagaaaggcagtaggaagcactataaataactgaaatgatatggtacttatgtcagtacaaactttagagataggtgaattctgttcatgatgaccctttcaaattttgacgacttactatagtcagcagtgaaagaaaaacaggacagtgtttccttttccttccatgaacttgaaatgttgactctggtttgcaggaatttgctggataagcagaatctaggtgaccagttctctgtatccacttccatggactcctttgacttctcatcatcacattcttccccaaaccaagccaaagttgcattttcaccggtggccatgcagcacgaacatgatcagctgtatcttgtgcatggagccggcagctcagcagaaaacgttaacaagtctcaggatggtcagctgctagtctcgagggaaacaattgacgacggacctctgggcgaggtgttcaagggcaagagttgccagtcagcatccgcagacatcttaactgaccattggacttcgactcgtgacttgcgtcctccaaccggagtcctacaaatgtctagcagcaacacagtgccagcagagaatcacacgagtaacagtagctatctcatggcgaggatggcgaattctcagaccgtcccaacactccactgagtgttcatcaggctggtctttgttgggaccacaaaataactgaagccatgttgatgtcctgagtttgctgatactaggttttcagtcgagtcttgtaactcctgttttagagctgttatatgttcacgtcatgtcgcctttcattttcggttcattcagatgggtgttctaataatttctttccttcttacctgtgaaggatttgagttccaatctgagacgtgggtttgttctaacttggaggtatttatgaatattaggcacttctgatttccattgaagcgagatttctttaaattgtcgaggctgtatttttttcaggcttttcaagtgctatactcttgaatgcttgatactgcctccgttctcgaatatttgtcgcctgttagttcatttttgaactaaaccgcaatagataaataaaaaagaa

SEQ ID NO: 27721 - DNA, 1190 bp, Zea Mays
gggatgagagctatgaggaacctttcatccaatgtctatctacccttgtcagcctcaaatccatggaaataaaaggtaccatggtgagcagcctatgttccgaatgtgacaaattgtaccctggtcctcaacatctttgctccattgatattgagtcgactgcagtgccaagatggatgtcatcgcttcgcttcttgtctagcataaacattgaactattagctctgggagcacaggattttcatgtccttgggagcataccatctctacgttgtctcagtatacatgtgaaggaaaccagagatgaaagattggtcattggcaagtgttatccattccggtgcctaactgagatgcaaatcgattatgaatccatggcggtggtgttcgcaccaggaagtatgcaaaacctcaaagaacttcatttagtgttcggggtgaaagaggtaatgcataagtatggtgattgtaactttggtttggagcacctcatgtcactggagcatgtctctgttaaaacaatgtacagtatcatgcccgaggaggtggaggccgtaaaagatgaatttcagaaatccctggacatgaatcctggcaagcccacgttgatagtagattataagtatccgataaaagccgcatccctgctactgaaggattataaacattctctatcgccttgctaataaactgcatattcccttctctaattggcactgcattctcaaggtcgcatgggtactagtggcaaataagctctctgaagtcatgaattttctgcagataatgtaactgcagtaaatgtctacgcgcgtgtttgtaaaaaagagctcaatatctaccttgtaaattcgccatgttcatactcatacagtagtcttaagcttgtagccgacaaaatatttccctttcttgaccgagaaggcgtgattgaatacttttccgtgatgtttgtgatacactggtggcactggtggtctgggtttcaccaaaaatgcagattgcagaggccagaggagaggattcgaaagttcagtacctggcgtctagtgaagcacgctcccggcgccccgtggtgcgcagcgcaaagtcggcgggacactcgctcttcggcggcggcggcggcggcggcacaaaggaggtgcgaacgattttttttttttttttgataggaggtgcgaattgcgatt

SEQ ID NO: 27722 - DNA, 668 bp, Zea Mays
ctttattttgcactcattgcctcatcaaatcgggcatacgataaaacttcgggtaaataaaaacacgcaaatctaaaaaaaatgtgcaacttcaacatccttgctccagtcttctagatatgctaatgtaaagtaaaactgtatttagataaacctttcttgattaacgaaatactttacagctagtcttgctggtgtatatagataaagtccaactgatgtgacattcgaagctttccacgagagaccactatccctggtcggattctgtctccatccattatagaattttatcgctagccacctgctcatatcatcatgaatcaacagtaaaagctttgagccaaccaaacaaagaataatgtatagataaacctttcttcattaacaaaatactttacaactagtggtgctggtcggtaagagctctgactgagcaaccatggcggagatagtcaccggggcgatgggcactctcttgcccaagctggccaacctgatcaaggaggagtataacctggcgtctagtgaagcacgctcccggcgccccgtggtgcgcagcgcaaagtcggcgggacactcgctcttcggcggcggcggcggcggcggcacaaaggaggtgcgaacgattttttttttttttttgataggaggtgcgaattgcgatt

SEQ ID NO: 27723 - DNA, 2759 bp, Zea Mays
gtcaaagtcgtttgctttattttgcactcattgcctcatcaaatcgggcatacgataaaacttcgggtaaataaaaacacgcaaatctaaaaaaaatgtgcaacttcaacatccttgctccagtcttctagatatgctaatgtaaagtaaaactgtatttagataaacctttcttgattaacgaaatactttacagctagtcttgctggtgtatatagataaagtccaactgatgtgacattcgaagctttccacgagagaccactatccctggtcggattctgtctccatccattatagaattttatcgctagccacaactagtggtgctggtcggtaagagctctgactgagcaaccatggcggagatagtcaccggggcgatgggcactctcttgcccaagctggccaacctgatcaaggaggagtataacctgcagaagaaggtgaggggtgagatcatgttcctggaggctgagctcaagagcatggaggctgctctcatcaaggtctccgaggcacccatcgaccacccacctgacatccaagtcaagctctggacaagggaggtgagagagctgtcctacgacctcgaggacagcatcgacagattcatggtgcgagttggcgatggcaagccacatagtttcaagggattcattgatagaagcctccacctgctgacaaggggcaggattcaacacagcatcggcatagacatcaaggagatcaggagccgcataaaggatgtgagtgaacggcgtgacagaaaggcgacagaacttgttggcgccgaagagaagagcagtgaccttgtgagaaggctcatggagggcgacaaggaggcatccaagcagccagttgtactgtctattgctggctttggagggttaggcaagactactcttgctaatcttgtgtatgagaagattaaagggcaatttggctgtggggcatttgtttatgtgtctcataatcctgatgtcgtcaaggttttcaaaaacatgctctaccagcttgatggagacaaatacagggacatcaatcaaggaacatggagtgaagaacaactaatctgggaactgaggaagttccttctgcacaagaggtacttcattgtcattgatgacatatggaatacttctgtgtgggaaacaatccaatgttctttgatgcacaatgaatgtggaagtataataattatcacaactcgtaatattgatgttgcaaaacaagctggaagtgtttatcaaatggaacctctttctctcagtgactcaacaaagttattctgccaaagaatttttggcagtgaagacaaatgtcctccacataatttagctgaagtggctggtaaaatcttacagaaatgtggtggtgtaccattagctatcattaccatggcaagtatgctagccgataaaactggaaaggaaataaatacacataactattggtcacatgtgtaccaatccatgggttctggtctaaatggcagtactaatgtgaagaatatgagaaggatactatcagttagttattatgacctaccttcacatctaaagacttgcttgctatacctaagtttgtttccagaagactacagaattaaaacaagaggtctcatatggaaatggattggtgaaggttttgtccatgaagaacaggggaagaccttatatgaagtaggtgaggattacatcgaagagttaattaacagaagtatgttggaacctgtagatattggccgtgatggtaagactgtttcttgtcggatacatgatatggtccttgatcttatcagtttcttgtcaaatgaggagcattttctaacaaaagtaggtgagcaacagcccatatctcttgatctgcctaaaaagatccaccggttatccctccaaattagccaggaagaggaagtcaagcagctggctacaatgagtttctcccacgtaagatcacttactgtgtccactaaagtgttccagttgatgccaaaactttcggcctttctggtcttacgtgtattgaatttaaagaaatgtaagggagtgaggaatcaccactttaaagatatttgcaatatgtttcacctgagatatttgagtctcaatgcggaatttattactgagatgccacgggagattcagaatctacaatttttgcaagtacttgacataagtaatcttgggcacaaagtaaagatgccaaccattattcacttgcgacagctactgcgtctttgttttaggccgatgtggggcataagactgccagatggattcggaaaactaacctctctacaagaagttaaagggatcataactatcaagttaccaagcatgctgcataatctggggtgtctgaccaatctccggaccttggccatcgacttttgtgattgggatgagagctatgaggaacctttcatccaatgtctatctaaccttgtcagcctcaaatccatggaaataaaaggtaccatggtgagcagcctatgttccgaatgtgacaaattgtaccctggtcctcaacatctttgctccattgatattgagtcgactgcagtgccaagatggatgtcatcgctctgcttcttgtctagcataaacattgaactattagctctgggagcacaggattttcatgtccttgggagcataccatctctacgttgtctcagtatacatgtgaaggaaaccagagatgaaatattggtcattggcaattgttatccattccggtgcctaactgtttga

SEQ ID NO: 27724 - DNA, 1782 bp, Zea Mays
atggataagatcaagtacgaaattcgtgagggtgaacaagaatgggtgaatgaagggcggagtaggcttggactaaaggacaaagacactaagaatggaccgtgggtggctcatattaggctcatgaagagcaatcatacatggcattcagcaccagtgaacaaccaagaactcctgtctgaaatgggtgttttcgatggtgtcaataggaacaaaaaggggttcaagtacaaaggttcttgcctgtaagaaattggctaagaggagaagatccaaggaactgtgcaatctaaatagttcattggatgtgactaggactgaccagcagagaggaagaaaggaagcggcagagccaatgaaagatcaccccttagcattggagtgttcgaaatctgatgctcaagggcagcttgacagaactttggaggatgcacagaacataactgaattatcaaatcaggagaacctgttacccacggtgtctcctggctttatatcaacgtctaatgggaaaggtactaacatacatgatactcaatttgaggaagagccgacagctaccctacctattgatgggagttcacagtgcatcattgacatttctccattgaggagctgctctgctttggagagatctttgccttcaccaccgcaggcttcgttcgtcaagaggtcacctgtgtggcgtgtagttgacgcaaaacatgtgtttaaggagttacctcaacaaccacatttccttccactccaaaaataccccccaacactgcgtgaaggaatagcattaggtatgatggtgtcattctcggaattggtgaagtttacaatggaagcaagcatagacgacagcatggaatggttcgaggacaaggtcaggacagtctcccttctggaggcaaatggattcagtgtgcaatctatacagagcgtcttgaccgaactgatcgagatcaaatctgagcgcgcccgtatccatggagagatcggcaagctgagttcaaagctagcggagaacacggcttcctcctcccgagtcggtgcactgctcgatgaaaaagatggagccgcagctcagctcgagcaagaactcgggcgcatccgccaggaaagccagaagatggcacaggagaaggagaaaatagatgcagagggcgtgagtatcaagacagcatgcagcgggtacgaggatttgtgcagcgacgcggaacgcaagttcaaagaagtcttggctcagctgcggcggaagggcgccaggtgatgcacaagctttgggtatcgtttcgctgcttctaactctgacacctgtttatgctgtagggctgtagttttatctatgtatcgcagtgggctcagatcgatgtgctgtggttacttttgtgcaagccgttcggtatcgtttatgtatctgtaggtatccatctatggcttaggaagcctgatgaagtctcgactctttataattgctactcctatattaattgccagctagttggaccgtacttagttgcttgtagcatatttagggtgcgtttggacacttgaatcagttctgtttatcatctaaatcagctcaggccttgttcgtttgtgtcggattggtgggtcggaacgattcctaactgaattgcttctctaatttatataaactttgattagctagaacgattccgggtgcaatccgacagaaacgaacaagccctcagctgaatcggtgccaaacggacggatgtgggaatcggagccgaaactgctacaccatggcaagacagtgaaagaagacgc

SEQ ID NO: 27725 - DNA, 1994 bp, Zea Mays
atggataagatcaagtacgaaattcgtgagggtgaacaagaatgggtgaatgaagggcggagtaggcttggactaaaggacaaagacactaagaatggaccgtgggtggctcatattaggctcatgaagagcaatcatacatggcattcagcaccagtgaacaaccaagaactcctgtctgaaatgggtgttttcgatgttcgcagaaatagtgctgtccgacacacagaggaacaacttgttaaatcactcggagtgaagaaatgtatatcgaacagtaaagaggggaaaacaagccctattcaagaacttcagggaaaattgaagggaaacaacaatttctctaggaatattgttttagctttgagtgtctctagggatggccagactaatttatctccagatagactggtgtcaataggaacaaaaaggggttcaagtacaaaggttcttgcctgtaagaaattggctaagaggagaagatccaaggaactgtgcaatctaaatagttcattggatgtgactaggactgaccagcagagaggaagaaaggaagcggcagagccaatgaaagatcaccccttagcattggagtgttcgaaatctgatgctcaagggcagcttgacagaactttggaggatgcacagaacataactgaattatcaaatcaggagaacctgttacccacggtgtctcctggctttatatcaacgtctaatgggaaaggtactaacatacatgatactcaatttgaggaagagccgacagctaccctacctattgatgggagttcacagtgcatcattgacatttctccattgaggagctgctctgctttggagagatctttgccttcaccaccgcaggcttcgttcgtcaagaggtcacctgtgtggcgtgtagttgacgcaaaacatgtgtttaaggagttacctcaacaaccacatttccttccactccaaaaataccccccaacactgcgtgaaggaatagcattaggtatgatggtgtcattctcggaattggtgaagtttacaatggaagcaagcatagacgacagcatggaatggttcgaggacaaggtcaggacagtctcccttctggaggcaaatggattcagtgtgcaatctatacagagcgtcttgaccgaactgatcgagatcaaatctgagcgcgcccgtatccatggagagatcggcaagctgagttcaaagctagcggagaacacggcttcctcctcccgagtcggtgcactgctcgatgaaaaagatggagccgcagctcagctcgagcaagaactcgggcgcatccgccaggaaagccagaagatggcacaggagaaggagaaaatagatgcagagggcgtgagtatcaagacagcatgcagcgggtacgaggatttgtgcagcgacgcggaacgcaagttcaaagaagtcttggctcagctgcggcggaagggcgccaggtgatgcacaagctttgggtatcgtttcgctgcttctaactctgacacctgtttatgctgtagggctgtagttttatctatgtatcgcagtgggctcagatcgatgtgctgtggttacttttgtgcaagccgttcggtatcgtttatgtatctgtaggtatccatctatggcttaggaagcctgatgaagtctcgactctttataattgctactcctatattaattgccagctagttggaccgtacttagttgcttgtagcatatttagggtgcgtttggacacttgaatcagttctgtttatcatctaaatcagctcaggccttgttcgtttgtgtcggattggtgggtcggaacgattcctaactgaattgcttctctaatttatataaactttgattagctagaacgattccgggtgcaatccgacagaaacgaacaagccctcagctgaatcggtgccaaacggacggatgtgggaatcggagccgaaactgctacaccatggcaagacagtgaaagaagacgc

SEQ ID NO: 27726 - DNA, 2039 bp, Zea Mays
atggataagatcaagtacgaaattcgtgagggtgaacaagaatgggtgaatgaagggcggagtaggcttggactaaaggacaaagacactaagaatggaccgtgggtggctcatattaggctcatgaagagcaatcatacatggcattcagcaccagtgaacaaccaagaactcctgtctgaaatgggtgttttcgatggtgagcttcaaggatctgtatctggaagaagtgttgatgcccatgatatgctctgcattgctgaactaagaaagaaaacggcttcagttcgcagaaatagtgctgtccgacacacagaggaacaacttgttaaatcactcggagtgaagaaatgtatatcgaacagtaaagaggggaaaacaagccctattcaagaacttcagggaaaattgaagggaaacaacaatttctctaggaatattgttttagctttgagtgtctctagggatggccagactaatttatctccagatagactggtgtcaataggaacaaaaaggggttcaagtacaaaggttcttgcctgtaagaaattggctaagaggagaagatccaaggaactgtgcaatctaaatagttcattggatgtgactaggactgaccagcagagaggaagaaaggaagcggcagagccaatgaaagatcaccccttagcattggagtgttcgaaatctgatgctcaagggcagcttgacagaactttggaggatgcacagaacataactgaattatcaaatcaggagaacctgttacccacggtgtctcctggctttatatcaacgtctaatgggaaagctaccctacctattgatgggagttcacagtgcatcattgacatttctccattgaggagctgctctgctttggagagatctttgccttcaccaccgcaggcttcgttcgtcaagaggtcacctgtgtggcgtgtagttgacgcaaaacatgtgtttaaggagttacctcaacaaccacatttccttccactccaaaaataccccccaacactgcgtgaaggaatagcattaggtatgatggtgtcattctcggaattggtgaagtttacaatggaagcaagcatagacgacagcatggaatggttcgaggacaaggtcaggacagtctcccttctggaggcaaatggattcagtgtgcaatctatacagagcgtcttgaccgaactgatcgagatcaaatctgagcgcgcccgtatccatggagagatcggcaagctgagttcaaagctagcggagaacacggcttcctcctcccgagtcggtgcactgctcgatgaaaaagatggagccgcagctcagctcgagcaagaactcgggcgcatccgccaggaaagccagaagatggcacaggagaaggagaaaatagatgcagagggcgtgagtatcaagacagcatgcagcgggtacgaggatttgtgcagcgacgcggaacgcaagttcaaagaagtcttggctcagctgcggcggaagggcgccaggtgatgcacaagctttgggtatcgtttcgctgcttctaactctgacacctgtttatgctgtagggctgtagttttatctatgtatcgcagtgggctcagatcgatgtgctgtggttacttttgtgcaagccgttcggtatcgtttatgtatctgtaggtatccatctatggcttaggaagcctgatgaagtctcgactctttataattgctactcctatattaattgccagctagttggaccgtacttagttgcttgtagcatatttagggtgcgtttggacacttgaatcagttctgtttatcatctaaatcagctcaggccttgttcgtttgtgtcggattggtgggtcggaacgattcctaactgaattgcttctctaatttatataaactttgattagctagaacgattccgggtgcaatccgacagaaacgaacaagccctcagctgaatcggtgccaaacggacggatgtgggaatcggagccgaaactgctacaccatggcaagacagtgaaagaagacgc

SEQ ID NO: 27727 - DNA, 1871 bp, Zea Mays
atggataagatcaagtacgaaattcgtgagggtgaacaagaatgggtgaatgaagggcggagtaggcttggactaaaggacaaagacactaagaatggaccgtgggtggctcatattaggctcatgaagagcaatcatacatggcattcagcaccagtgaacaaccaagaactcctgtctgaaatgggtgttttcgatgttcgcagaaatagtgctgtccgacacacagaggaacaacttgttaaatcactcggagtgaagaaatgtatatcgaacagtaaagaggggaaaacaagccctattcaagaacttcagggaaaagtgtcaataggaacaaaaaggggttcaagtacaaaggttcttgcctgtaagaaattggctaagaggagaagatccaaggaactgtgcaatctaaatagttcattggatgtgactaggactgaccagcagagaggaagaaaggaagcggcagagccaatgaaagatcaccccttagcacttgacagaactttggaggatgcacagaacataactgaattatcaaatcaggagaacctgttacccacggtgtctcctggctttatatcaacgtctaatgggaaaggtactaacatacatgatactcaatttgaggaagagccgacagctaccctacctattgatgggagttcacagtgcatcattgacatttctccattgaggagctgctctgctttggagagatctttgccttcaccaccgcaggcttcgttcgtcaagaggtcacctgtgtggcgtgtagttgacgcaaaacatgtgtttaaggagttacctcaacaaccacatttccttccactccaaaaataccccccaacactgcgtgaaggaatagcattaggtatgatggtgtcattctcggaattggtgaagtttacaatggaagcaagcatagacgacagcatggaatggttcgaggacaaggtcaggacagtctcccttctggaggcaaatggattcagtgtgcaatctatacagagcgtcttgaccgaactgatcgagatcaaatctgagcgcgcccgtatccatggagagatcggcaagctgagttcaaagctagcggagaacacggcttcctcctcccgagtcggtgcactgctcgatgaaaaagatggagccgcagctcagctcgagcaagaactcgggcgcatccgccaggaaagccagaagatggcacaggagaaggagaaaatagatgcagagggcgtgagtatcaagacagcatgcagcgggtacgaggatttgtgcagcgacgcggaacgcaagttcaaagaagtcttggctcagctgcggcggaagggcgccaggtgatgcacaagctttgggtatcgtttcgctgcttctaactctgacacctgtttatgctgtagggctgtagttttatctatgtatcgcagtgggctcagatcgatgtgctgtggttacttttgtgcaagccgttcggtatcgtttatgtatctgtaggtatccatctatggcttaggaagcctgatgaagtctcgactctttataattgctactcctatattaattgccagctagttggaccgtacttagttgcttgtagcatatttagggtgcgtttggacacttgaatcagttctgtttatcatctaaatcagctcaggccttgttcgtttgtgtcggattggtgggtcggaacgattcctaactgaattgcttctctaatttatataaactttgattagctagaacgattccgggtgcaatccgacagaaacgaacaagccctcagctgaatcggtgccaaacggacggatgtgggaatcggagccgaaactgctacaccatggcaagacagtgaaagaagacgc

SEQ ID NO: 27728 - DNA, 2048 bp, Zea Mays
atggataagatcaagtacgaaattcgtgagggtgaacaagaatgggtgaatgaagggcggagtaggcttggactaaaggacaaagacactaagaatggaccgtgggtggctcatattaggctcatgaagagcaatcatacatggcattcagcaccagtgaacaaccaagaactcctgtctgaaatgggtgttttcgatggtgagcttcaaggatctgtatctggaagaagtgttgatgcccatgatatgctctgcattgctgaactaagaaagaaaacggcttcagttcgcagaaatagtgctgtccgacacacagaggaacaacttgttaaatcactcggagtgaagaaatgtatatcgaacagtaaagaggggaaaacaagccctattcaagaacttcagggaaaattgaagggaaacaacaatttctctaggaatattgttttagctttgagtgtctctagggatggccagactaatttatctccagatagactggtgtcaataggaacaaaaaggggttcaagtacaaaggttcttgcctgtaagaaattggctaagaggagaagatccaaggaactgtgcaatctaaatagttcattggatgtgactaggactgaccagcagagaggaagaaaggaagcggcagagccaatgaaagatcaccccttagcacttgacagaactttggaggatgcacagaacataactgaattatcaaatcaggagaacctgttacccacggtgtctcctggctttatatcaacgtctaatgggaaaggtactaacatacatgatactcaatttgaggaagagccgacagctaccctacctattgatgggagttcacagtgcatcattgacatttctccattgaggagctgctctgctttggagagatctttgccttcaccaccgcaggcttcgttcgtcaagaggtcacctgtgtggcgtgtagttgacgcaaaacatgtgtttaaggagttacctcaacaaccacatttccttccactccaaaaataccccccaacactgcgtgaaggaatagcattaggtatgatggtgtcattctcggaattggtgaagtttacaatggaagcaagcatagacgacagcatggaatggttcgaggacaaggtcaggacagtctcccttctggaggcaaatggattcagtgtgcaatctatacagagcgtcttgaccgaactgatcgagatcaaatctgagcgcgcccgtatccatggagagatcggcaagctgagttcaaagctagcggagaacacggcttcctcctcccgagtcggtgcactgctcgatgaaaaagatggagccgcagctcagctcgagcaagaactcgggcgcatccgccaggaaagccagaagatggcacaggagaaggagaaaatagatgcagagggcgtgagtatcaagacagcatgcagcgggtacgaggatttgtgcagcgacgcggaacgcaagttcaaagaagtcttggctcagctgcggcggaagggcgccaggtgatgcacaagctttgggtatcgtttcgctgcttctaactctgacacctgtttatgctgtagggctgtagttttatctatgtatcgcagtgggctcagatcgatgtgctgtggttacttttgtgcaagccgttcggtatcgtttatgtatctgtaggtatccatctatggcttaggaagcctgatgaagtctcgactctttataattgctactcctatattaattgccagctagttggaccgtacttagttgcttgtagcatatttagggtgcgtttggacacttgaatcagttctgtttatcatctaaatcagctcaggccttgttcgtttgtgtcggattggtgggtcggaacgattcctaactgaattgcttctctaatttatataaactttgattagctagaacgattccgggtgcaatccgacagaaacgaacaagccctcagctgaatcggtgccaaacggacggatgtgggaatcggagccgaaactgctacaccatggcaagacagtgaaagaagacgc

SEQ ID NO: 27729 - DNA, 1904 bp, Zea Mays
atggataagatcaagtacgaaattcgtgagggtgaacaagaatgggtgaatgaagggcggagtaggcttggactaaaggacaaagacactaagaatggaccgtgggtggctcatattaggctcatgaagagcaatcatacatggcattcagcaccagtgaacaaccaagaactcctgtctgaaatgggtgttttcgatgttcgcagaaatagtgctgtccgacacacagaggaacaacttgttaaatcactcggagtgaagaaatgtatatcgaacagtaaagaggggaaaacaagccctattcaagaacttcagggaaaagtgtcaataggaacaaaaaggggttcaagtacaaaggttcttgcctgtaagaaattggctaagaggagaagatccaaggaactgtgcaatctaaatagttcattggatgtgactaggactgaccagcagagaggaagaaaggaagcggcagagccaatgaaagatcaccccttagcattggagtgttcgaaatctgatgctcaagggcagcttgacagaactttggaggatgcacagaacataactgaattatcaaatcaggagaacctgttacccacggtgtctcctggctttatatcaacgtctaatgggaaaggtactaacatacatgatactcaatttgaggaagagccgacagctaccctacctattgatgggagttcacagtgcatcattgacatttctccattgaggagctgctctgctttggagagatctttgccttcaccaccgcaggcttcgttcgtcaagaggtcacctgtgtggcgtgtagttgacgcaaaacatgtgtttaaggagttacctcaacaaccacatttccttccactccaaaaataccccccaacactgcgtgaaggaatagcattaggtatgatggtgtcattctcggaattggtgaagtttacaatggaagcaagcatagacgacagcatggaatggttcgaggacaaggtcaggacagtctcccttctggaggcaaatggattcagtgtgcaatctatacagagcgtcttgaccgaactgatcgagatcaaatctgagcgcgcccgtatccatggagagatcggcaagctgagttcaaagctagcggagaacacggcttcctcctcccgagtcggtgcactgctcgatgaaaaagatggagccgcagctcagctcgagcaagaactcgggcgcatccgccaggaaagccagaagatggcacaggagaaggagaaaatagatgcagagggcgtgagtatcaagacagcatgcagcgggtacgaggatttgtgcagcgacgcggaacgcaagttcaaagaagtcttggctcagctgcggcggaagggcgccaggtgatgcacaagctttgggtatcgtttcgctgcttctaactctgacacctgtttatgctgtagggctgtagttttatctatgtatcgcagtgggctcagatcgatgtgctgtggttacttttgtgcaagccgttcggtatcgtttatgtatctgtaggtatccatctatggcttaggaagcctgatgaagtctcgactctttataattgctactcctatattaattgccagctagttggaccgtacttagttgcttgtagcatatttagggtgcgtttggacacttgaatcagttctgtttatcatctaaatcagctcaggccttgttcgtttgtgtcggattggtgggtcggaacgattcctaactgaattgcttctctaatttatataaactttgattagctagaacgattccgggtgcaatccgacagaaacgaacaagccctcagctgaatcggtgccaaacggacggatgtgggaatcggagccgaaactgctacaccatggcaagacagtgaaagaagacgc

SEQ ID NO: 27730 - DNA, 2714 bp, Zea Mays
ccccggttgccccaaacccccaatcccttaccgatccccaccccaatggccaccgccaccgaatccggcagtgcgccgccggtcgacggcgaagtgagacagcgcggccgtccccgcgggagcgggcgtgggcgtgggcgtgggcgtgggcgtgggcgcgagcgctcgcagagcgcgaggcggagcaaacgcccgcggaagccccggccgtggcggtccgcgtcgccccccgcgctggagccgctagtgcccttgcctccaggcaccgaagtcgaggtccgcattgatgacgacggtttccacgggacctggttcgaggccaccgtcctcgacttcgcgcccgcgcgcggctaccgcaaccccgcgcgctacacagtcaagtacgtgcacctcctcgccgacgacgagggcgcgctctcggagcccttcgcgccgtcccaaatccgcccgcggccgccgcctctgtcgtccccgccgcgcttccaactccacgacatcgtcgaggctttccacaacgaggggtggtggtcgggcatcgtcgtgtccgcccccgacgccaccggcgccggggtcaccgtctcgttccccatcacccgcgaggtcatcgagttcccgtccagcctcgtccgcccccgccgcgactacgtcgccggtgactggattccctcccgggccgcgatggttctccgccccaaccgcgcggtcaaggtctatgaggtcggagagaaggtcgaggtgctgaggaaccgggacgtgtacggcaactcctggttccccgccacggtgagggttgtcatcgacgatctcagctacgtcgtcgagtacttcgatctggaggaggggaagggcggatcggagaaggccaccgagtacctgcattggtggttcatcaggccagctgttgagcattcgccaagcaagcgtgagttccagctccggcctggtgctgccgtggaggcctactgtgatggggcatggtcacttggagtggtgacgagggtcgtcggagaggatgaatatgaggtcggtattattggcaagaagacgagactgctggtgaccaaggttgtggaattgctcaagccacagtatatttggaatggcaaccaatggaggattacaacagctaaggtgtcaataggaacaaaaaggggttcaagtacaaaggttcttgcctgtaagaaattggctaagaggagaagatccaaggaactgtgcaatctaaatagttcattggatgtgactaggactgaccagcagagaggaagaaaggaagcggcagagccaatgaaagatcaccccttagcattggagtgttcgaaatctgatgctcaagggcagcttgacagaactttggaggatgcacagaacataactgaattatcaaatcaggagaacctgttacccacggtgtctcctggctttatatcaacgtctaatgggaaaggtactaacatacatgatactcaatttgaggaagagccgacagctaccctacctattgatgggagttcacagtgcatcattgacatttctccattgaggagctgctctgctttggagagatctttgccttcaccaccgcaggcttcgttcgtcaagaggtcacctgtgtggcgtgtagttgacgcaaaacatgtgtttaaggagttacctcaacaaccacatttccttccactccaaaaataccccccaacactgcgtgaaggaatagcattaggtatgatggtgtcattctcggaattggtgaagtttacaatggaagcaagcatagacgacagcatggaatggttcgaggacaaggtcaggacagtctcccttctggaggcaaatggattcagtgtgcaatctatacagagcgtcttgaccgaactgatcgagatcaaatctgagcgcgcccgtatccatggagagatcggcaagctgagttcaaagctagcggagaacacggcttcctcctcccgagtcggtgcactgctcgatgaaaaagatggagccgcagctcagctcgagcaagaactcgggcgcatccgccaggaaagccagaagatggcacaggagaaggagaaaatagatgcagagggcgtgagtatcaagacagcatgcagcgggtacgaggatttgtgcagcgacgcggaacgcaagttcaaagaagtcttggctcagctgcggcggaagggcgccaggtgatgcacaagctttgggtatcgtttcgctgcttctaactctgacacctgtttatgctgtagggctgtagttttatctatgtatcgcagtgggctcagatcgatgtgctgtggttacttttgtgcaagccgttcggtatcgtttatgtatctgtaggtatccatctatggcttaggaagcctgatgaagtctcgactctttataattgctactcctatattaattgccagctagttggaccgtacttagttgcttgtagcatatttagggtgcgtttggacacttgaatcagttctgtttatcatctaaatcagctcaggccttgttcgtttgtgtcggattggtgggtcggaacgattcctaactgaattgcttctctaatttatataaactttgattagctagaacgattccgggtgcaatccgacagaaacgaacaagccctcagctgaatcggtgccaaacggacggatgtgggaatcggagccgaaactgctacaccatggcaagacagtgaaagaagacgc

SEQ ID NO: 27731 - DNA, 755 bp, Zea Mays
gctggcaagcaatatagaccatcatcagttgagcatcccaaccccacgcatcccccgcggaggctcggcgacgggcggctgcgacggtgccggtgcaccttgcaccgcctccacatccaaaagacactgcttggtgcacacgcagatggcgcctccgattatagcaggctcggcgccggcgtctccctcgctcatctgctcctgctggcagaaaccgccggtgtagtgcagtccaaggcagaggggaacgcagacccaggtcttgccgaagcagggagcccaggcgatcggcgtttcgcatgtgttcaacggcgctactcctcccgcttctgctccagctgcgactgcgactgcgactgcgactgcaaccacctgaggagcagggcgacggagatggcggccaccgcggcgttctgcttgctggacgacgccatggtcgtatgaacaggagtgctagctaagtatctgatggctgatgaagtgatgatgatcgaagaatgtgtgtgtctgtgttcggtacttattgaagggtggtggcctgcattagacagttctgtatcctagatacatttgggaatattagtatttgagttttctagatggatatggatatccaaatattagaggctactcttacattgtctatggtgtgtctttgtgcaatggcgtcattttattcaacataatcaactgataggtttggaaatactaatatttgaattttctagatggatatggattatatccaaatatca

SEQ ID NO: 27732 - DNA, 745 bp, Zea Mays
gctggcaagcaatatagaccatcatcagttgagcatcccaaccccacgcatcccccgcggaggctcggcgacgggcggctgcgacggtgccggtgcaccttgcaccgcctccacatccaaaagacactgcttggtgcacacgcagatggcgcctccgattatagcaggctcggcgccggcgtctccctcgctcatctgctcctgctggcagaaaccgccggtgtagtgcagtccaaggcagaggggaacgcagacccaggtcttgccgaagcagggagcccaggcgatcggcgtttcgcatgtgttcaacggcgctactcctcccgcttctgctccagctgcgactgcgactgcgactgcgactgcaaccaccggcgacggagatggcggccaccgcggcgttctgcttgctggacgacgccatggtcgtatgaacaggagtgctagctaagtatctgatggctgatgaagtgatgatgatcgaagaatgtgtgtgtctgtgttcggtacttattgaagggtggtggcctgcattagacagttctgtatcctagatacatttgggaatattagtatttgagttttctagatggatatggatatccaaatattagaggctactcttacattgtctatggtgtgtctttgtgcaatggcgtcattttattcaacataatcaactgataggtttggaaatactaatatttgaattttctagatggatatggattatatccaaatatca

SEQ ID NO: 27733 - DNA, 934 bp, Zea Mays
ctagacgcagactcccatcccaattcccagtcggccagtcgtccacgctccacggccagaccctgagagctgagaccgtgagacgccacaaacggcaaaccctagctggctagctccctggaggactggaggtgacggctgctggctgcaagactgaaggctccgacgctgtcgctctcgctccgaggtcagcactcagcactcggcagtcggcaccaggcaaggcaaggcagcaagccagcagcccagcacgacggtcgccggcgacaggcgaccagccatcaccgcgtcaggtggccagcgaccagcgtccagcggtacaggcgtacagccattaggcggccagccggccagcgccctcggccagcggcagcgcgcaccgcccagctggccagcttgacagcatcaggcggccagcgccctcgcccctcggccagcgcctaacgctccagcagccaagtcgtcgtcggcaagccactgcgccagttcatggcttggcttcatgctgataatctggtactagtatggagacatggagattggagagtggtcctgtgcggtgcttactgcttagtgcttagtgttgtctgaattggtgttgtgcggtgcttagacatggagatagtgcctgtgccacactgccagtctgccactgcgcaatgcgcatgccgcatgatgccgttcaggcgttcagctatggactgaagcggtgaagcctgagctagtgcggacgtgcggtgaagcctaagctagtgcagacgcctgatggctgatgtctgaagcctgatgccgttcagctgttgtgcactatttcactgttttaatttttaaataatctgtgactggaatattgtttcactgttttaatttttaaataatgtgtactgtgtctgtgtactctatagtctatattctctctattattgtttcactg

SEQ ID NO: 27734 - DNA, 1728 bp, Zea Mays
ttggataagatcgtgaagcctttacttatcaagtgtaagtgatacaaatatggtggatcaattcaaatccaacacctcattcatgtcatctaagattctggaagctagggacaagttgtcgcaggaggtgcggtaccggacggagttacaaggcagccacggcgacaccgtacctgtggctctcggcgatgaaggtggcgtttcaggttctcttgtagagggtttgggcgtattgaagggccaagacgactccgccatgctcacgtctttcagcaacacggactacggcaagccacaaccgatcgaacaggacaaggatattgtatcggttcatacgatcggcgagactggagctgtttcttcggataataccggtagcagcggtgtacctgtacagctagtgcccgtgtcgagagacaccaccaccgtggcgccactatctaggacggaagaaagtacgcacgatctctctacggaagacgaagcagcagcagaagaagaagaggagcagggtctgcagatgtctgagatacctttgacggacagctctccccctaaagatggtcaacagaaacaaccactggctgccatcagtgagcgatcaggagctgactatcagaaaagtgataatgttgaggatggcggcgacggcgtcgaagatgacgacggggatgaatggttggaagaggaagcatgggacccgggaaacacgcaaattccgatagcagatgatgaagacgtgtctttcagtgatctggaggaggaagacgatggtgcggcctgacatcgcctgtaggcttggcttgaccgtactgcttacgtagtctgtgcttcctgttccgttatacgattggtacaattgtcttggttgatgtctaatacacgctctcatagtctcattgcttcctgttccgttatacgattggtacggcatgcatgctttgctagctgcccccagctagcagacaactaccagctcactagtcgatcgataagaaactaaacagcgaagcccgcagctagcaaagttcgctcaccagctgcactgcaagctcgtacacatacacaattaataataatcaaccgaaaccagctagtagagttcaaagaaaagctcacataataatacacacacgcacaaaacacgtacgacgacagaaccacacgcaatgcagacgacgaagccggccgacgactggggcgtggggcatgcatcgatcgatctgaggaggtgcgctagccggcctagctgtggcctcctccctggccctgggtgtagatgtagtcggtgtgcgccgccagcgtcctcctcatgaggcactcctcgtcctctcctcctcctcctaccccttcgctgccgcaccgctcgtcgtcgcccgccgcgaagctcatgctcatcgacgacctctcctcggcgcctaccttactcacatctctttgctgctcctcttggcttctcgtcgagctcgccgccgccacagctctcgtcgcgtggccggcgacgacggagaggaggaggaggaggaggaggacagcagacaccagcaccagcagcagcggcagggcggtccgccgtggtgccgatgttggtggcgccgccatgtctgcaagactgcaaccaacctgcactgcaggcttgttgctgttcctttggcgtcagcggcgtggcggatatctgacgacccggccggccggggctcttgctggatttatgtgaagcgttgttgg

SEQ ID NO: 27735 - DNA, 2349 bp, Zea Mays
cacgaaataaggcacccaaccaccttcccctccgccccaatcgcttgctcccgcacggccgcaccgccgccgacctcgccgccggcaatggcgtggctcgcgcgctccatcgccaactccctcatcgctactgaggaagaacccgaagcaaccgaccggggcccctcggcctccccgggctcgtcctctcccccgcgcggcgtccgcgaggacctctccgagctaaccggcgcgctcgcgaaccgcttccagggcatcgcctccttcctcgcgcccgcggcgcctgggggcggaggcgccctgcgccggccggacccggccgagatcgcgggccggttccgcgccggcctcgcgcggctcccgggccgccaggccgtagcggatctcgccaggatcgcgtcctcgctcctgccccctgagggcgatgcagactgggcggaggaggcagcgggggtcaccgaagaggtggtcgcgttcgcgcgggacgcggcatcgcggcccgagctatggctcgacttccccctcctccccgacgacgcggactcggatgcaagatcacgccctggccgtggaaagcttggcgcccgagctggctgatctgaggatcgagctctgccccagccacatgagcgaggactgcttctggaagatatacttcgtactgctgcatcctaagctcaggaaggatgatgccgacattttatccactccacagattctggaagctagggacaagttgtcgcaggaggtgcggtaccggacggagttacaaggcagccacggcgacaccgtacctgtggctctcggcgatgaaggtggcgtttcaggttctcttgtagagggtttgggcgtattgaagggccaagacgactccgccatgctcacgtctttcagcaacacggactacggcaagccacaaccgatcgaacaggacaaggatattgtatcggttcatacgatcggcgagactggagctgtttcttcggataataccggtagcagcggtgtacctgtacagctagtgcccgtgtcgagagacaccaccaccgtggcgccactatctaggacggaagaaagtacgcacgatctctctacggaagacgaagcagcagcagaagaagaagaggagcagggtctgcagatgtctgagatacctttgacggacagctctccccctaaagatggtcaacagaaacaaccactggctgccatcagtgagcgatcaggagctgactatcagaaaagtgataatgttgaggatggcggcgacggcgtcgaagatgacgacggggatgaatggttggaagaggaagcatgggacccgggaaacacgcaaattccgatagcagatgatgaagacgtgtctttcagtgatctggaggaggaagacgatggtgcggcctgacatcgcctgtaggcttggcttgaccgtactgcttacgtagtctgtgcttcctgttccgttatacgattggtacaattgtcttggttgatgtctaatacacgctctcatagtctcattgcttcctgttccgttatacgattggtacggcatgcatgctttgctagctgcccccagctagcagacaactaccagctcactagtcgatcgataagaaactaaacagcgaagcccgcagctagcaaagttcgctcaccagctgcactgcaagctcgtacacatacacaattaataataatcaaccgaaaccagctagtagagttcaaagaaaagctcacataataatacacacacgcacaaaacacgtacgacgacagaaccacacgcaatgcagacgacgaagccggccgacgactggggcgtggggcatgcatcgatcgatctgaggaggtgcgctagccggcctagctgtggcctcctccctggccctgggtgtagatgtagtcggtgtgcgccgccagcgtcctcctcatgaggcactcctcgtcctctcctcctcctcctaccccttcgctgccgcaccgctcgtcgtcgcccgccgcgaagctcatgctcatcgacgacctctcctcggcgcctaccttactcacatctctttgctgctcctcttggcttctcgtcgagctcgccgccgccacagctctcgtcgcgtggccggcgacgacggagaggaggaggaggaggaggaggacagcagacaccagcaccagcagcagcggcagggcggtccgccgtggtgccgatgttggtggcgccgccatgtctgcaagactgcaaccaacctgcactgcaggcttgttgctgttcctttggcgtcagcggcgtggcggatatctgacgacccggccggccggggctcttgctggatttatgtgaagcgttgttgg

SEQ ID NO: 27736 - DNA, 8201 bp, Zea Mays
ataacatggtttacaatgttgcgtccaaacaatgtttctcaaaaccatagtatttttggagttgaacaaaaccacagtattgtcaatgacaattgcaaaatatagtattgtaaaatcgtggttttaaaaaatactgttgccaaacaggtcctagagttaggccgagcaccttggcatctggtgtacagcggatgccatctacgagatacgaacaatagtagcctgacaaagtgcacacgaagttcaaatgcagacttgtctaacgtggcatcgtacactgcaccagacatgtgttccaaaaaaaaaaaagttgttttcggggatgttgggctcttatactcttgacagtagtagaaaactgatgtatactcttcacacgaagttcgattgccctcatcagagaacaatagtagcccatcaggttgcacagccacagactagtcagtcgttgtatatatcttgactaagcgtagaaaactgagatgtggggatcactttcagagtcgccataaaaatcccggtagtagcaagtttttcttcattcttgagtattggccatagagacgaccaactcattgtctttcccaccatgcatcctgctgtaaagctcctcatcctccacatcttggccgccgcgttcctgacatccaattctctgcagcttcggcggccaaccggagatggagatgcagcttctgcaagctgcataccgcacgaacgggacgccttgctggcctttaagcatggcataagcagtgaccctatgggcctccttgcctcttggcatcaaaagggctacggagactgctgccggtggagaggtgtccgctgcagcaaccggaccggccatgttctcaagcttcgacttcgtaatgtccatgtaacgtcttcaatttcgtactctcttttcagagacacagcgttgatcggccacataagtcattccttactcgccctggatcaacttgtccaccttgatctcagcatgaacaacgttactggctcaagcggccaaataccagatttcttgggctctttggtgaacttgaggtatctcaacatatccggcatacccttctctggtacagtgccaccccaccttggtaacctctcaaaattgatgtatctcgatctctcctcctgggtttttcaaggtcaaccgtactcaacagacatttcatggttagctggcctatctttgttggagtatcttgacatgagtaaggtaaacctcagcacagttgctgattgggctcatgtggtcaacatgattccttccctgaaggtcctccatcttagttcttgttcacttctaagtgcaaaccaaacactcccacgtattaaccttacagaccttgaaacacttgatctgtctggtaatatttttgaccacccaatgtcatccagctggctttggaatttgacaagcctccaatatctcaatcttgaggctaatcatttttacggtcaagttcctgatgcgctaggggatatggcatctctccaagtcctcgatttgtctggtaatcggcacatgggtactatgacaacaagcttgaagaaactctgcaacctgaccgtcctagacctctgcttttgtaattccaatggagatattaaggaactgatagagcagatgccacaatgccgcaagaacaaactgcagcaattgcatctgggatataacaatattactggaatgatgccaagtcaaatagcacatttgaccagcttagttgttcttgacatctctagtaacaatttaaatgggatcataccatcagtgatggggcagcttgctagtttaagcacccttgacctctctagcaactacctttctggacatgtaccatctgagattggtatgcttgctaatttaactgtactagacctcgaaggtaatgaactgaatggtagtatcacagaaaaacactttgcgaaactagcaaaattgaagcacctatacttatctgggaattccttgagctttgcagtttcctctgaatggttccctacgttcagtttagaagatgcaaaactggaacaatgccaaataggccctcggtttcctagttggcttcagtttcaagtgaatatcctttgggtagatatctcaagcacaggtctagtcgataagcttcctgactggttcagtactacattctcaaaggccacccatttggacatctcccataatcagatccatggaagattgccaaagaacatggaatttatgtcattggagtggttctatctcagttcaaataatttgactggtgaaatcccattgttaccaaaaaatattagcatgttggacctctctctaaactctttatctggaaacctaccaacaaagttcagaactcggcaactactatctctagatttgttctccaatcgcctcactggtggtcttcctgaatctatttgtgaagcgcaagggttaactgaactgaatttaggtaacaatctttttgaggccgagcttcctggatgctttcatactacagccctcaggtttctattaataggtaacaatagtttctcaggtgatttcccagagttcatttaagcgagaacatgttcgctggaaatatcccaatcagcatcaaaaaccttacccaccttcatcatctgaacctagccaacaacaggttatcaggtgctataccctggggtctgtcaagtcttacagctatgacacgaaaatatgtgaagaaagctgatattgatggatatccttatggaggctatgaatacttctcccgtgaaatcggtcagtacttctctgtggtcaccaaggggcaacaactgtactacggcatcaaaatttttgaaatggtgagcattgacttatcaaacaacaacttatctggtcgaattccagaagaaatagcttctcttgatgcactgctcaatttgaacctctcaagaaactatttaagtggagaaattccagataagattggggccatgaagtcactcttctccctcgacctctcagacaacgtgctttctggggaaatcccttccagcttatcagatctagcacaattgagctatttggacttatctaataacaatttgacagggccggtaccatctggacagcaacttgacaccctctacgcagagtacccgtctatgtacagtggcaatagtggtctatgtgggcatactattgggaagatctgttcaggaagcaattcatcaaggcaacatgtccatgaacatggttttgagctagtgtcattttattttggacttagtttgggatttattttgggtctttggcttgtgttttgtgtcttgttgttcaagaaagcatggagggttgcttattgctgcctcatcgacaagatatacgatcagatgtatcatgcacatgcttggtaaggaagggattctacgttgcggtgatatggatacatgacacgtcgataccctgatatagcaatttctcaaaaaaaataggatgcatgaatatatttaatatgtatactttttatatttatatttgtatatgcaaatatccaaaatacagaaaataacaaagttataaatcggatattgctagtttgttacttgataagtgatgcactgtccatatccattgtccatgtccattctccattctcaaaaaaaaaaaatgaacactacatagtattacaaacaagatattagtaatagagtaacagacaatagacattttgaatcgtttaaaatatcgcctaattgaccaaaagcacaaaataggattgacatcacttacaagtgcttcttgtgggtaagttggtcaagccctggtatcattgctgttgagaccaggataggtccagtgagccgattatcaaccaggtccagccagaagagatttgagagtaaaccaagtgaagaggatattgtgcctgtaaacctgtttgaattcagcgccgaagagaatgtgctacaaaaccagttaactctgtatgccaaatcattgagaccgaggttgaaggaaacatcattgcaagtatatattgtgaggaatcagccacgcggtccatgtcgcccccgcgttgggcgactcggacgcccccagcaaccctagccgccgtcgccacctcgccgggggcctcctcctgtcgcgccgctgcctgagtgggccgcccgaagtccgcgcggctcgcggggaaggcggcggcggggcctctccgactcccaccggtggatctgggcgggcgcggccgccaaggtcgccatggtacggctcgtcagcgtggcgacgctccacggcgcaggtcctgggacgtgcgtgcagcggggcttggggtcctcacctggacccagcctgtgtcggcgctggcactggcccgtcagcgggcagatctgagcaggggacgtcgcacggcggcatggacgactcggcggggctctggcggccccttggaatggtggagctggccggcacgcgggctgcggcgaggaagaccactgggtggtgactgcgtaggagttctggcgatgcggtcacagcgttgttgctgcctgctagggctacagagtggtccggcggtggtggcgggctacccagctgtgggcctgtggctgttgtgctgcgtgcttccgatggtggtcaggggtgaagctttggacgaaagccttggttggcttctgccagagccgacaatggcggcacttttagtgtcgttgtcttccttagaagcgttgtcgttggcgcttcctcctcaccgtggggattctccgagggaaacctcgactgagctagctcgggcaggcgatggcgacatgcaatgtcgttgtcctccatggaagcgtcgccttggagccccactacgctgccttcttagtgctgctaaggtcacccttctcggcactgctgcctgtcttgcggacatcatcctctctagtttgagcttcagggatggccagcacctgatcaaaagggaatggacgctctccccgtcctcgcggcggctagcaccgcacctgccgccgctgccgctccccccgcctgctcgccggaaaaccaaccccaacccctccatcaccccattgatcaggcctccatcctccagagccaccctgcctcggtggagattccagcattcgacgcggacgcccgcattcccagatctgactccgggacttcttcttcgacgcggtcctgcctcaagcctgccgccggttcgtcgacagctaaggccgcctgcaccaggagagttaggttcgccgaatcagctctgtccgccgaccaatctcatcgttcctgctttgacgcgtctgctgctccaacgaaaatcactccgcacggccgggatgggactgctacccaccgacttcaatacccaggcctgcgtcccatcactcctcaacgcagcaaatccgcggaatccggcgctgaagatttgcctggctggacaacggtccatcggcgactccgcaagagattcaattcgcctgcgacttcattgaagccaacaaccgagcattcaaggttccgccatctggacaacaaaaatcttaaggtaagcctgagaggtaaatgcttccgatgtctggccagagggcactacgccattgattgcagggatccgttgaaatgcttcaactgcggcggccctggacacagagcctggcaatgtcccaagaagattagtgctgctgcttctaccccctctgccttcccaccacctccctgcttcgacaacgtcaacttccctcctctgcgccaagtcaacatggtgaagcctggcaaccccatggagcgcccgcaggagactttcgctgttgccgcgtcctctcgggacatggacagcgagctggcgcggttgagcacccacgcggcatgggcctggctcggcggcgttcgaccggcgacaagcaccaacacagtaagaagggctttctgctctaggttcaggatgcgcgaagaagacatcaaggtggtgagacactatccagaggacttcctcgtcacctttgaacaccagcatcaccgggacacggctgtggcgcagcgcgacttcacctacaacaacatcgacatccgcgtcaggccgtggcagctccccgtccacggcgaccacagcgtcttcggctcccacgtgcgcctgtgcctggaaggcatccctctgcacgcatggaacgatggcatcgccaagcgtgcggtggctaagtcctgtgtgctggactacgttgaagcccagtcgctgcgaatggaggatgctacgacgctcaatctgtgggcgtgggcgcgaaacccgtctgacatacctaaggtaacgtggctgaccattgttgacaggagcagcactgcccacgacgcgacaccggcggggcgtagcggcttaaccttcagggtcatcgtccaccttgatatggtggaagacccccctaccagggatggccatgggcattcacgtgcgtatgattggaggcttggtgttgttgacggcgagtgcgaaccacgtgaccgtcacgaccctccaccacctcgcagcaaccgtcgcagggatgaggatggtgatagtgaccgtcgtggtcgccgcccaggacgcgacgacagttggagctcccggctctttcgtagcatctcgcgggctcccagggaccgcgagcgggagcgctcggggtcgcgccatggccagcgccatgactcacccaggcggcgtcaccacctcgacggcgatcagcaacttcgtcaccaccttcatggcgatcagcagcctcgtcatgccggaggcacgtcgttggttacgccacatgttggccgtgacccggcgattggtcgtgacccggcgatacgtggacgcagccgtgtgcgccgttccacccgtgttgctgtccggcgtggccgttcagcgacccccccacggcatcctgctcgccccagatttccaccaagcgcctgcagtcccggcatccgcagctcacgcggtggtggcaacgacggttctccgcgccctgctgtgaaggctgcagctcttcctaaaggtcgttaccgcgttggctgcgtgtaccgaaggcgaccgcgcttggtgcctaagggccaagtcgatccggtccctggggctgctgctggcgacagcaaccttgctgtctgggatggcagcaggatgaagttcgcagacaacgtaagtctcatcccagtgcagcgagcattcacaactattcttgattcccttccaacatgccctgctatgcagctactgcctttggtgcagtctgaggaggaccatgtgctgttaggctctccctgcagcacggttgctgcgggctacaacgccgaagctgtaaaggactccaatgtcgacgcttcctctcggatgatagctgcggtgcatgaaccttcaacagatgttgctgcggtgtcaaccaccgcgcaaagccatctactcaacaccatattcaccaagccctcgcctgccatactcgagcgaccagtgctacatccttcggagggggtaacaacaccagcgaccactctgtctactattcctgcagcacctgctagaagaatcaagcagcgacacggcttcaacctttcgacggtacgtcgtagcgccagacttgccaacggccctcgaacgaatgtcatgcaacgggcccagcgcgtcctctgccgcaagcttggtctcttggcaaaagatgacgctgctgattttaatactgctttgcaggaatttcaggattggttcaagaagccactgactgtggagatggggacggccctagatgctctgttcaatctggatacgccagacacagttcgcctcgacaaggccttgctgggaattgctggagatgctatagctgagatccaagaggaggtggacgccatgcatgcagaggccagagcagttactgcggcttgattgatggctgttttagctccatgttagatgatgagggtctgcttttgttatgtcaatgagtctcagctcagtttctactacttttgtgagcaccctggactgtattgggttgctgttttgcttcagacctataacagccatgcttgtgttggccctggtggcccctttatgtttcactgtcattattgtgcagtgctgcaatttcatccagctgtcggcaattaatcggggtgcttttctcctccatgtctgactttagcatcctgtgctggaatgttaggggtttaaatttgcaagcgcgccgagatgcagtgcgcgcgatga

SEQ ID NO: 27737 - DNA, 2416 bp, Zea Mays
gggcgggacggctggctgcggggcggctggctgcggggcggggagcgatggcagaacgcgatgtgtgcacgccttagtaaagaaataaaaaagatttaattcactttagtcctattcaatccatgtactgccgtgtacatgtccttaaaactaatcgatttgttttctcgttagagagtgggttgaaaggacaaagggtcaatatagcggtaacgcgtcatgtcagctttcgtctgaagccgccgtgcgggcgggcatatgcagagcaccagccgctcagcctgccgcgccgccgtaggaccctccagccagcctccacctgccaaccgtatattgtccacgccgacgctgtaggaaccttccgccgcctgcgcagcgcagccaacagaaacaacactttgtatgcagtaatgattgagcttaaggctaagtaagcgaagcctttgcgtccagcgtccgtataaaacgcaccacacctcaacgcaaaaactccgtgactgtgagcacaagaccccccaccggccaccggccaccgccgcgagaagaaccgaccgacaaccgagcatgaaggccgggcctccgcacgtggccatgctggccacgccggggatgggccacctgatcccgctagcggagctggccaagcgcctggcggcgcggcgcggtgccacggccacgctcatcaccttcgcgtccgccgcgtcggccacgcagcgcgcgttcctggcgtctctcccgccctccgtcgccgcgcgcgcgctcccgcccgtcgacctctccgacctgccccgcgacgccgccatcgagacgctgatgaccgcggagtgcgcgcgctcgctccccgcgatcgcggccgtgctcgcggagctcggcgagaccgcccgcctcgtcgcgttcgtcgtcgaccagttcgggatggaggccttcaacgccgccggcgtcagggcggcgcggtgcctcttcatgcccatgaacctccacgcgctctcgctcgtcctccacctccccgagctggccgcctccgtgcccggcgagttccgggacctggccgaaccggtgcggctgcccggctgcgtgcccatcccggggcccgacatcatctcgccgctccaggaccggtccaacccgtcgtacgcggtgatggtgaacctcgccgtacgctgccgcgaagccgccgccgccatcctcgtcaactccttcgacgccgtcgagcctgaggccgccgaggcgctgcgccacccagcagagcccggctggccgcccgtgtaccctgtcggcccgctgatccttcagtccgagtccggcggcaccggcgccgatgtcgacggcacgcctccacgtgcggcgtgcctcgagtggctcgaccggcagccagccaggtcggtcgtctacgtctcgttcggctccggcggcgcgctgccgaaggagcagatgcacgagctggcgctcgggctggagcgcagcgggcagcggttcctgtgggtggtgcgcagccccagcgacgacgaaggcacgctcaacggcaactactacgacgcggagagcaagaaggacccgttcgcgtacctcccggagggtttcgtcgggaggaccaaggaggtgggtctgctggtgccctcgtgggcgccgcagacgcaggtgctggcccacggcgccaccggcgggttcctcacgcactgcgggtggaactccacgctcgagagcctggtgcacggcgtgcccatggtggcctggcccttgttcgccgagcagcggctcaacgcggtgatgctgtcggagggggcaggggctgcgatacggctgcccgagaccaaggacaaggagagcatcgcggcggtggtgagggagctggtggaaggggaagggaagggcgccatggtgcgggccaaggtggcccagctgcagaaggctgcggcagagggcctccgtgagggtggtgccgcaacgacggcacttgacgaggtgatggacaagtgggaggcggaagccaactagaaggtgcattcgcatgcatgcccgacaacacaatcctctccgccaaactctttaaatcatgagttgtcagtgtccatgttcttcaaactctttaattcgttaattatatgtatgcgtggcgtgcataaaggttcgagggattcgtgatgtttatttgggtcactggaatatgcctgtaaaatatgcgtcgtcgtagattactttgccggcagaataaaagtactgttcttcaccagaaaagaaaaacaatgatgacactaaaacattgcagaaataaacagtaaaaagaaaccaagggtgacgtatccacttgtacacacacatatttttttacacatgttcagtttcagctgatttctacgtggacactcttttggtcgaaatacccattttttcaaagaagccgttcggctgtttgttt

SEQ ID NO: 27738 - DNA, 3644 bp, Zea Mays
atgatcgagttcgagtttatagtagacttagggtccttcaccaagttgtggatttgtaatcttgagaagcaatcagatgttctggatatcggtagtcaacaagtggaggttggcgatgatggaggcctcatggatcgttgctgcctcaatgttagagaaggagatggcagggggttaggccagcttgagagcggcatggtcgtatactctagggtggtgattattgatcaatctatcaaccgagacctttgtgagatcgatctatctattatagccataaagagaaggtctatttacgcggagaacacgtttgatgcagctagagaaatactctatcaagtggagtatggatataagcatgcaaatgtgttctactttgatggctgggatggaattggtgcatctgctgctctcaaggaagcagcaaaacgcctaaaatcttcagcatcaaagtttgacagcgttctccatttggattgctcattatggaaaagtaggagggccctacagaaggctatcgccgaggagataaagctcccccattcagtgatggccatcttgagccagcatgacaaggaggatgatttcaacggtgtagaagaaggcgctagaaatgaggtacgggaaatcattaagcatacctacacaaagctagccaccgtcaaaagattagttgtggtcttccataatggaagtggtagcttcattgacctgagcgagtttggtatcccactgaaccgaaacttcaaaggtgatgtgttgttgtggacaatgcaagggaggtttagaccctatgttagctacactataaaagaaaaggatcctaatatggtgtacctttatgtggatcctgatacggtgcaattagatgacacttcattatggggcattgtgaatgaggaagctaaggaggttgctcagtacacaggtaccattgaccacatggcagtggtggcgtgcatcctgtacacgtggaagctaaaagacatgggtaacatagattgggatactcatgcttcaaactactgggtttgtgatggcattatacaaggcagtagtagctcggaagcatgggattggaaggttggtgatgcactacagagaaacatgcatttgggctggattagtaggtcttatatggattatttcttttcatcctcagctattgagatgcagatgcagcattatttaccacgacctccagcgatttgctgcacttccgagattattagtgtgcctgctgaagcaacatccttttttctacaaccaaaatatggagatgaagaatctcaattacttgcttctatgttcaaacattcagccagtaatctgcgtgtgctgcatctctctggatgcacctttagatttgcatctccaccattcctctgttgcagcaacctaaggttcctcctccttcaccgttgcaaggacgatggcacaagtatcacaccaacagagggcaaggaacttgacgaccagagtggagcatggagggcttgcttcgggaagctgcaagtaatggatttgagctacaccaaatggtggtggttgctgtcacaaaggatgaacataatggccaacctcagagagttgaatgcaaagggaatcaagaatttgagcacaagtcatctacgtggttgtggcaggcttgtcaagcttcgagtagaagacggcagcgttgacggacaaagattaatacttgagaactctgttgcactggaactagccgtcctcgttaaccatgctaaagatgaaggcgctacatacatctcctttcgtggttgtgctcagttgaggagtatattgctgggaggattattttgttgcctccatgagttggacctctcttgcacatctgtggaaaccgtcgacttgcgagaggtagaagcccagagattgaagcggctcatcctacttgggtgccagaagctccgtgcaatactatggccaccgagatcctcgtctattcttgagaccttggatgtgttttgtgtgagcaccaccccatccacagcatcaggacaggaatggccacatctatgtaaatgggaagaaaagaggaaggaggctacctctgcttctactgcagaatcatcatccttggatagaaactggtacatttgtgtaagggatgcgaggctcctacggtcgctagatgtcttttatacctatgaaaacaatcgttgttccattggctggcctgcacgtgtggagttcactacaccaccagcatcaggtgatcttgttgctgctcaaggagtcaatatcttgcagcagtctatacatgttgtagatgtatatgcaagagatatgatcacccataaccaacttattcatgatgaggatgcaactgcgggtgatgaggacggtgaaggagcgatccactggatgtgggattgcccaacgacccggacgatgcatggtcatggcttgtatattcacgtacaagcagaggatgatgagcaggagggagagttgaacataggtggaacatggtctatgccccctagatttatatgcacaagtgctgatgttatgcatgtgcatgattgcctgtccatcacctccggcatttctctgtcatacattacctcatgggatctacttaattggtgccgagttgaaaggtgccccatgttgcgatctgtcttcactgccttttctgaaggaaaagaaaatgatatttctagtgattcatggctgatatttcaaaacctgacaacattctgggcatcacacctcccgatggcaaagcacatctggaactggagtccaagagcttatccatctgcatactcctttcaacagctccagttcttgcacctggactactgcccgagggtcatcttcgtgctccccttggactcgaatatgtcgctgcctcagcttgagaccctagagatcatttgttgcggtgatcttagggagatcttccgcccacaggatcccaggctcgagaaccaagaggaggttgtcaagcatttccccaagctacgacgcatccaccttcacaacctcccgacgctgcgcagcatttgtggccgcatgatgtcttcaccaatgctcgagactatcaatgtcacgggctgcctagcactcagacgtttgccggcagtcggcggccgtctcgggcagccacccacagtggtgtgcgagaaggactggtggaacgccctcgagtgggatgggttggaggccaagcaccacccttccctcttccgccccaagcactcatgccactacaggaagcccaagcttcttagaggcagcgtcctcaggtaatcaacaacagctgccattggaggcggatggatccctccactccatatatatgttgcgggttgcacagtgtcgacgtccattcctgacagcagtcgatgaaataagactcctattaattattggtatctccctcttcaagtcgtggtgtgtggttggttccctccgcttcaactacgttgttcttctgcctttctctgcatccacatcaccaccaccagtttattgtctacgcttgtgtgtgttgtttcatcgctgagcaacattaaatatgtgttttatgtgttgtgtttatctatttggtaccctggttgctatataattatgtgtgttttatatgttgtatttatctatttggtaccctg

SEQ ID NO: 27739 - DNA, 4032 bp, Zea Mays
caagggaggtttagctacaatatatatgaaaaaatatatgaaaatattcctaatatggtgtatctttatgtgcatcgtgatatagtgcaattagatgacacttcattgtggggcattgtgaatgaggaagctaaggaggttgctcagtacacgggtatcatggaccacatggtagtggtggcatgcatcctgtacacgtggaagctaaaagacatgggtaacatagattgggatacccatgcttcaaactactgggtttgtgatggcattatacaaggcagtagtagctcggaagcatgggcttggaaggttggtgatgcactacagagaaacacacagttggactggagaaggtcttatatgcatgaattcttttcatcctcagctattgagatgcagatgcagcatcatttaccacgacctccagtgatttgttgcacttccaagattattagtgtgcctgctgaagcaacttccttttttctacaaccaaaatatgaagatgaagaatctccctctagaggggttgttactgttgacacaacaatacaattaccagcttctatgttcaaacattcagccagtaatctgcgtgtgctgcatctctctcgatgcacctttagatttgcatcaccaccattcctctactgcagcaacctaaggttcctccgccttcaccgttgcgaggacgatggcacaagtatcacaccaacagagggcaaggaacttgacgaccagagtggagcatggagggcttgcttcgggaagctgcgagtaatggatttgagctacacccaatggtgctggttgctgtcagaaaggatgatgaacataatggccaacctcagagagttgaatgcaaagggaatcaagaacttgagcacaagtcatctacgtggttgtggcagccttatcaagcttcgagtagaagacggcagcgttgacggacaaagattaatacttgagaactctgttgcactggaacaagccgtcctcaccaacgatgctaaagatgaaggtgctacagttgataggatacgcaacatctcctttcgtggttgtgctcagttgaggagtatattgttgagaggattattttgttgcctccatgagttggacctctcttgcacatctgtggaaaccgtcaacttgcgaaaggtacaagcccagagattgaagcggctcatcctacttgggtgccagaagctccgtgcaatactatggccactgagcacctcatctattgctaagaccttggatgtgttttgtgtgagcaccaccccatccatgacagcatcaggacaggagtggccgcgtctatgtaaatgggaagaaaagaggaaggaggctaactctgcttctactacagaatcctcatccttggacagaaactggtacatttgtgtaagggatgcgaggctcctccggtcgctacaaatctttcgtacctatgaaaacaatcgtttttcccttggctggcctacacgtgtggagttcactacaccaccagcatcaggtgatcttgttgctgctcaaggagtcagtatcttgcagcagactatacatgttgtagatgtatatgcaagagatatgatcacccataaccaacttattcatgatgaggatgcaactgctggtgatgaggacggtgaaggagcgatccactggatgtgggattgcccaatgacccggacgatgcatggtcatggctggtatattcacgtacaagcagaggatgatgagcaggagggagagggtggtgaagcacaggacaagacaggtggaacatggtcaatgccccctagttttatatgcacaagtgctgatgttgtgcatgtgcatgattgcatgtccatcaccttcggcatctctctgtcatatattacctcatggaatgaacttcattggtgccgagttgaaaggtgccccatgttgcgatctgtcttcactgccttttctgaaggaaaagaaaatgatgtttctagtgattcatggctgatatttcaaaacctgacaacattctgggcatcacacctcccgatggcaaagcacatctggaactggagtccaagagcttatccatctgcatactcctttcaacagctccagttcttgcacctggactactgcccgagggtcatcttcgtgctccccttggactcgaatatgtcgctgcctcagcttgagaccctagagatcatttgttgcggtgatcttagggagatctttcgctcatgggatcccaggctcgagaaccaagaggaggttgtcaagcatttccccaagctacgacgcatccacctccacaacctcccgacgctgcgcggcatttgtggccgcatgatgtcttcaccaatgctcgagactatcaatgtcacaggctgtccagcactcaggcgtttaccggcggtcggcggccgtctcgcgcagccacccacagtggtgtgcgagaaggactggtgggatggcctcgagtgggatgggttggaggccaagcaccacccttccctcttccgccccaagcactcatgccactacaggaagcccaagcttcttagaggcagcgtcctcaggtaatcaacaacagctgccattggaggcgaatggacccctccactccatatatatgttgcaggttgcacagtatcgacgtccattcctgacagcagtcgatgaaataagactcctattaattattggtatctccctcttcaagtcgtggtgtgtggttggttccctctgcttcaactacgttgttcttctgcctttctctgcatccacatcaccaccaccagtttattgtctacgcttgtgtgtgttgtttcatcgctgagcaacattaaatatgtgttttatgtgttgtatttatctatttggtaccatggttgctatataattatgtgtggtttatgtgttgtatttatctatttggtagcctggttgctatataattgtgtgtggtttatgtgttgtatttatctattttgtaccctggttgctatataattatgtgtggtttatgtgttgtatttatctatttggtaccctggttgctatataattatgtgtggtttatgtgttgtatttatctatttggtaccctggttgctatataattatgtgtggtttatgtgatgtatctatttatctatttggtaccttgattgctatatacttatctgcttttatgtgatgtatctactatctatctatgtgactggatactccatatatatgcacaaagtagtcggatgtcatactaagtcatatgaaaaagtttccatcaatttcatccaaattctaaagtgtgaatgtgaggttttgaagttttatggtcgagcttcatatatgggtcccacatatgcatctaatcttattaatttgataaaggtgttttgtgatattctggccccatcggatggtgatatcctagtccaaggcttataatagaattaatagagtactcaaaccaacaagatacatctttttttcggaagcctacctcaaaagaacttctgagttaagcgtgtttgatctagaggaatcgtgatgcactataccacaacaccaaattagtgtcggacgactgtcacaataaatagagaattagcatcgaattgttagttggtatacattgccacagatggtgagtcggcatatgtctatattccaactgagtgttagtcgttatatttatatgtgaatagtgtcgctttgtcagtcgacaattcatacctataacctcgcactgtcagtcgccataaaaagcattgtgcaatttgcggcatcggtggcctgttggcacgcaaaattggtggcccaaatacgagttgccgccgcccaaaaccctatctctcctttcccgtaataccagccaccgccatccaaatattccaaccatccccagccgcgcgctagtttcatccggtcggccgccagtcgtcctccaaccgcgcgccctgctagcttcttcctttgttttttctgagccgacgacgccccactgctactccagaggagcaaggccgaccg

SEQ ID NO: 27740 - DNA, 114 bp, Zea Mays
cttggatctgaggcctcgctcaaggaacaagtctggagttttctggtgattggatacaactttggcagctgcaactctaataatctgaagctataaacacacacatgcctcggg

SEQ ID NO: 27741 - DNA, 56 bp, Zea Mays
gctcaaccctacgaagcatgttaatagtagccttgttgactttcacgaacacgcca

SEQ ID NO: 27742 - DNA, 1008 bp, Zea Mays
ataaaaactaccgctctacttggcctttccgcgatggctgagactagggtttcagtggcggcggttgcacgacatgagggagcgcagcgaagccagcacaaccgcggtggacaagcgtccccatagacgagatccatggcggagcgctggaagagcgtctcctccgtgccgaaggccgagaacgcgcggccgacgggacgatggccggcggcgaagcccaaggcgtcggacctgctcgcccatagccttgactgcagcctcgaccgcaaggactccatcctcgccgccatccacctcctccgccgctctatggccttcgactccacgacatctctctcgtcgtccgacccagccgctccagacctctacgcgtcctctgacaccgacatcgtctcctctggtagcaactcggtagccagtgatccgccgcgtcagggcatcagcgtgccggcgaggttctggcagaaaaccaatagccgcatgctacatgcaagctcaagaattgcaataagcggtaggtctgattttggaagcaggagtcgttgcatcacattggatgcacctggctcatcgtcattactcttcacctggcacagtggcacctaacacttgtgcattatgttgagtcttcaagaagaacgtcatcagcaccgaggtggatgtcctgcaagtgcagtgcaacatggcgctctggactattcaagattcaagtcaaattaggctaagatgtttacaatgccgagacgattggaagctgaaatttgtgaatctatgggggagttctgcttacttcaaaagaacactgacaagctagatttaagacgacgagttcacatggctatagacattatgagtactgtttatctttctataaagttctttgaaattgcaggccaaatcaatgattgatattgttttttgtaattaacaatgattagcagagaattggataaacattctgtgttgtcaagaagcataatgaataaaacagagaagcattaccgtgtc

SEQ ID NO: 27743 - DNA, 876 bp, Zea Mays
ataaaaactaccgctctacttggcctttccgcgatggctgagactagggtttcagtggcggcggttgcacgacatgagggagcgcagcgaagccagcacaaccgcggtggacaagcgtccccatagacgagatccatggcggagcgctggaagagcgtctcctccgtgccgaaggccgagaacgcgcggccgacgggacgatggccggcggcgaagcccaaggcgtcggacctgctcgcccatagccttgactgcagcctcgaccgcaaggactccatcctcgccgccatccacctcctccgccgctctatggccttcgactccacgacatctctctcgtcgtccgacccagccgctccagacctctacgcgtcctctgacaccgacatcgtctcctctggtagcaactcggtagccagtgatccgccgcgtcagggcatcagcgtgccggcgaggttctggcagaaaaccaatagccgcatgctacatgcaagctcaagaattgcaataagcggtaggtctgattttggaagcaggagtcgttgcatcacattggtgagtattgaatcttatctattaaaactccttgtcgtttgcttgcaccagagccttccaacgccagcgcaagaagcgtcctgtcagatcgtctattatgagttgggatatatagtttcatatcatttaggcctctaaggtgttatagaagtaaatactctgctttgagatatattgtttaatatcagttaagtgtgcaatagttaaacttcatatttcttgttggagagtgattctgaatagttaatcttgctaaatatgtatattcagaatcacaaacgccagcgcaagaatgacttgtgccattatgcaaatattttc

SEQ ID NO: 27744 - DNA, 3811 bp, Zea Mays
cgccgttcgggatacctcagctccaataaactcggcgggcgggcggtggagggcgagtgaagacgagggctgtgattccattgcaatggcatctgaaactgatgagaaagctaagatggagagtttgacatctgctgcagcctttgtggagggtggcattcaggatgcatgcaacatttgccttgaggccttctgtgagagtgacccttctgcagatcaaccaaaatggatggatcaacacatgagtcaccaaaatccaccacccaacccaatcggtatccaatcaaatactgtagacttagatgctgaagactctgttccatcaagctttacttcgaagaggccgctaggtcatgattcgtccaaggaaaaggcaaagaagcaaaggtctgttgacacatcgtccactttttctgagtacctcaggtggatgggtgaaatatctttggaacggttgtctgtgttcaaattagtagcttcaattgaggagaggaagttggagtctatgaacaaaaacgagaggcaaaaactcatcttggagaggaagaagctaaacctggagaaacttaggatggatcggcagaaattgaaggaggacaaggaagaggaggtcatgatattgggcatggatctgagtaaatgtaaccccctacttcgacaatgctacgaggctaagcaacaggagatattggcaagggttattggaaactcgtcgtcaagcaagatgctgtcgtttcttctggaaatagcactactgtatctagtcctaggttttttttaacaggtagttccccagcttcgtcctcatcttagagcctcggatggatcaaactaaaactaacaggtggagcagaagtgcagtaacacgatgctccagttccaagttgacaacctggcggtagagcagaagtgcagtaacacgatgctgccatttttatctcaagcactgcataaactgcatgcgtgtggcttaggggaagtccgatctcaaaaaatcttctgtttagggcatgtactaaacatgtacagtggtgtttaatgtggaggctcctaaggtgtttaaggggtgtatttgcaaaaaaaattagagccgtctctccgtgaagagacgcctctggctcgtaaaccaagtagtaacagacgtctcacttcctattgtacgaatttgtcgtctgttctatcgatctgctgctgtacaaatgcatttaattctgtatttattaatagactacatttatagacactccattgtataatagagtctcttagttgtctcttgtgcttggataaccgttttggtgtctcttcactgtacatgcccttatgtcttctgtaaaaaagaacttgtgagaaaagatgtttaccggtacaaataacggatatggcatcttcgtggtgcgcggatcagttacaaatatgattgggacagcgaagtttgctgctgctgatgctatgcaagtgtaccgtgggacggtttcctgttgtgtgggtgaactgacgaattttgctgtacacaagatatgcatcttccgaagcctcatgcctgtgtgtatacatgaacccattccaagtcaatatctgttaaacttgttttgtgatttaagtttagcaagacacatccaaaacgttccatatcgattatggctagattcagggcccgtttggagggctacggcacctgtaaaaatgggtccggctcctctcgtgtattatttgatttggagtaaaacggtctcgctgctagctgcatcttcttgcatcaggcatgaggtggcttggagagaggtgtctgctcggggagagacgcagcgcagcgcccatatgtggagccgtggagagccaaaaatctgggctcccgctcttagccgtattatggctcctgctcaggagctgttttgcgaggtaggagccggtgctggagccggacactcagtaggaagagtggggaaaaaaagacgagctatttacttcccatttgtaagggggaaacaaaagaaaagagcatctgtaagggatttaccctagatcgtgcggcaaaccagtccctcttcgatccgcgtagaaatcccatccgatgtatagggatcgatccgcgtagaaatccaagttccccagcttcgtcctcatcttcaccgagccctacccaacgccaacctcgctgctcgtggcgtccccaatctgacgccccggccccgcgcgcccctcccaaatctcctcccacggccggccgccccggcgtgcagggcgtcggcgcactccgccgcctccgacccaccgggccccaccggcgtgaggccaaccaagaggaaccatggacgagaacggccactacgtcgtcgtcgccctgccctccgcgcgctgcggcggcgacgatgacgagcctacagtcaaggaggaggacgaggaagcggaggagcaggagcagtcgccgaccgaggcgccagcgctacccgccgcccgcgccgtgcggcggcggccgaaccagaagcggaccaagaacttcagcgacagggaggacgagatgctggcgctggcgtggctccgcgtcagcgcggaccccgccgccgggcgcgcgcccttctggagccggctgcacgaccacttccacgcgcaccgggacttcgcgtcggagcgcagcgagaactcgctcctgcaccgctggtccaccgtccaggacaacgtcaggcgcttcgaccgctgcgtcgccgacgtggcgggagcggccgcgggcgcggccgagggagggctcacgccgcaggacacggttgtgcgcgcgctggccctgttcaagtcccgggacaagaacaacaagccgttccagttcatgcactgctggatcctcctgaggtcgcagcggaagtggatggagaggtcgtcgcagtcgcagacctcttcgccgaagctggcgtggaccagtaggccgccgccgtcccagaagaagcagaagacggctccgagcccgagccccagtccgtgcgctccgccgcgtgctctcgacgacggtctagatgctgcagccgcccaagaacgcgaggaggaggaggaggaggctgtgcacgcgatgcagcagccagtggatgggaccgaggaggaggaggagttacagcagggcgggggcgtgggcgtgggcggggctagtctgtacctggaggcggcggacgatctgtggtggggaaagaggaaagcggctgacgacaatggcgaacagcaggccggcgcgaggacgatgcagcagctcagcaacggcgcgcgagagaagcgtgcgctggaacaacagcgcacggtcgcgctggcgctggaccaagccagggctgccaacgaggcgaggagcctcgagataaggaggagagaagtggagctcaggaccaaggaggtggatctgaaggtgatgctggaagaggagaggatcatggccaaggacaccagcgccatgtccgggatacagcagcagtactacaggatgctgcagaacaagatcatgactcggcggttcggtggctcatcttggatggaatgaacggctaggctttttgtgttaattactgtggtggctgcataacaaccgcttagacagcttagagcaggtttatggtctgtttggtttcctacctaaggtgctacaatctgcctaactttagacgtttgaattgaagaactaagcttacacaaaaaagttaggcacgttgtggcgctttaggcagcaaatcaaacagccctttaataatacacccgactgatggctgtaacagcgtaccttttactcatccgtacactagttagctcttcattatattaatataggacttcacat

SEQ ID NO: 27745 - DNA, 4125 bp, Zea Mays
cgccgttcgggatacctcagctccaataaactcggcgggcgggcggtggagggcgagtgaagacgaggtgcttgcctcgctcggctcacaccccttttcgtctcttctctgcctttcctccgcaatcacagagcgcaagaggagagagagagagagtgaggggggagagagagggctagggttttgtgccccccacgcctcacgcatcgaatccgagccgggtcggggttgctgcgaatcgccggcggtgcttgtgcagcctttgtggagggtggcattcaggatgcatgcaacatttgccttgaggccttctgtgagagtgacccttctgcagatcaaccaaaatggatggatcaacacatgagtcaccaaaatccaccacccaacccaatcggtatccaatcaaatactgtagacttagatgctgaagactctgttccatcaagctttacttcgaagaggccgctaggtcatgattcgtccaaggaaaaggcaaagaagcaaaggtctgttgacacatcgtccactttttctgagtacctcaggtggatgggtgaaatatctttggaacggttgtctgtgttcaaattagtagcttcaattgaggagaggaagttggagtctatgaacaaaaacgagaggcaaaaactcatcttggagaggaagaagctaaacctggagaaacttaggatggatcggcagaaattgaaggaggacaaggaagaggaggtcatgatattgggcatggatctgagtaaatgtaaccccctacttcgacaatgctacgaggctaagcaacaggagatattggcaagggttattggaaactcgtcgtcaagcaagtgaggagtgaacgaagttaatttttgttagtggttgagtaagtcatgttatttgttttcgagaaaaactgcatgtttctgaaccatatttttgttcttgttgttccaagttgtttgcaaacttgacatttttcagtatgtcatgcttgaacattgtaatgttggtcgatgctaacctatgatgatgctgaacaggatgctgtcgtttcttctggaaatagcactactgtatctagtcctaggttttttttaacaggtagttccccagcttcgtcctcatcttagagcctcggatggatcaaactaaaactaacaggtggagcagaagtgcagtaacacgatgctccagttccaagttgacaacctggcggtagagcagaagtgcagtaacacgatgctgccatttttatctcaagcactgcataaactgcatgcgtgtggcttaggggaagtccgatctcaaaaaatcttctgtttagggcatgtactaaacatgtacagtggtgtttaatgtggaggctcctaaggtgtttaaggggtgtatttgcaaaaaaaattagagccgtctctccgtgaagagacgcctctggctcgtaaaccaagtagtaacagacgtctcacttcctattgtacgaatttgtcgtctgttctatcgatctgctgctgtacaaatgcatttaattctgtatttattaatagactacatttatagacactccattgtataatagagtctcttagttgtctcttgtgcttggataaccgttttggtgtctcttcactgtacatgcccttatgtcttctgtaaaaaagaacttgtgagaaaagatgtttaccggtacaaataacggatatggcatcttcgtggtgcgcggatcagttacaaatatgattgggacagcgaagtttgctgctgctgatgctatgcaagtgtaccgtgggacggtttcctgttgtgtgggtgaactgacgaattttgctgtacacaagatatgcatcttccgaagcctcatgcctgtgtgtatacatgaacccattccaagtcaatatctgttaaacttgttttgtgatttaagtttagcaagacacatccaaaacgttccatatcgattatggctagattcagggcccgtttggagggctacggcacctgtaaaaatgggtccggctcctctcgtgtattatttgatttggagtaaaacggtctcgctgctagctgcatcttcttgcatcaggcatgaggtggcttggagagaggtgtctgctcggggagagacgcagcgcagcgcccatatgtggagccgtggagagccaaaaatctgggctcccgctcttagccgtattatggctcctgctcaggagctgttttgcgaggtaggagccggtgctggagccggacactcagtaggaagagtggggaaaaaaagacgagctatttacttcccatttgtaagggggaaacaaaagaaaagagcatctgtaagggatttaccctagatcgtgcggcaaaccagtccctcttcgatccgcgtagaaatcccatccgatgtatagggatcgatccgcgtagaaatccaagttccccagcttcgtcctcatcttcaccgagccctacccaacgccaacctcgctgctcgtggcgtccccaatctgacgccccggccccgcgcgcccctcccaaatctcctcccacggccggccgccccggcgtgcagggcgtcggcgcactccgccgcctccgacccaccgggccccaccggcgtgaggccaaccaagaggaaccatggacgagaacggccactacgtcgtcgtcgccctgccctccgcgcgctgcggcggcgacgatgacgagcctacagtcaaggaggaggacgaggaagcggaggagcaggagcagtcgccgaccgaggcgccagcgctacccgccgcccgcgccgtgcggcggcggccgaaccagaagcggaccaagaacttcagcgacagggaggacgagatgctggcgctggcgtggctccgcgtcagcgcggaccccgccgccgggcgcgcgcccttctggagccggctgcacgaccacttccacgcgcaccgggacttcgcgtcggagcgcagcgagaactcgctcctgcaccgctggtccaccgtccaggacaacgtcaggcgcttcgaccgctgcgtcgccgacgtggcgggagcggccgcgggcgcggccgagggagggctcacgccgcaggacacggttgtgcgcgcgctggccctgttcaagtcccgggacaagaacaacaagccgttccagttcatgcactgctggatcctcctgaggtcgcagcggaagtggatggagaggtcgtcgcagtcgcagacctcttcgccgaagctggcgtggaccagtaggccgccgccgtcccagaagaagcagaagacggctccgagcccgagccccagtccgtgcgctccgccgcgtgctctcgacgacggtctagatgctgcagccgcccaagaacgcgaggaggaggaggaggaggctgtgcacgcgatgcagcagccagtggatgggaccgaggaggaggaggagttacagcagggcgggggcgtgggcgtgggcggggctagtctgtacctggaggcggcggacgatctgtggtggggaaagaggaaagcggctgacgacaatggcgaacagcaggccggcgcgaggacgatgcagcagctcagcaacggcgcgcgagagaagcgtgcgctggaacaacagcgcacggtcgcgctggcgctggaccaagccagggctgccaacgaggcgaggagcctcgagataaggaggagagaagtggagctcaggaccaaggaggtggatctgaaggtgatgctggaagaggagaggatcatggccaaggacaccagcgccatgtccgggatacagcagcagtactacaggatgctgcagaacaagatcatgactcggcggttcggtggctcatcttggatggaatgaacggctaggctttttgtgttaattactgtggtggctgcataacaaccgcttagacagcttagagcaggtttatggtctgtttggtttcctacctaaggtgctacaatctgcctaactttagacgtttgaattgaagaactaagcttacacaaaaaagttaggcacgttgtggcgctttaggcagcaaatcaaacagccctttaataatacacccgactgatggctgtaacagcgtaccttttactcatccgtacactagttagctcttcattatattaatataggacttcacat

SEQ ID NO: 27746 - DNA, 4124 bp, Zea Mays
cgccgttcgggatacctcagctccaataaactcggcgggcgggcggtggagggcgagtgaagacgaggtgcttgcctcgctcggctcacaccccttttcgtctcttctctgcctttcctccgcaatcacagagcgcaagaggagagagagagagagtgaggggggagagagagggctagggttttgtgccccccacgcctcacgcatcgaatccgagccgggtcggggttgctgcgaatcgccggcggtgcttgatgattcaggcctgtgtggtaggtgccgtgcttgctcgtcctaggcgattttagggtggtcgtccttgtcgctgtgagctggttgggggctgtgtggatttggttttctggacgcgggaattcaaaggctgtgattccattgcaatggcatctgaaactgatgagaaagctaagatggagagtttgacatctgctgcagcctttgtggagggtggcattcaggatgcatgcaacatttgccttgaggccttctgtgagagtgacccttctgcagatcaaccaaaatggatggatcaacacatgagtcaccaaaatccaccacccaacccaatcggtatccaatcaaatactgtagacttagatgctgaagactctgttccatcaagctttacttcgaagaggccgctaggtcatgattcgtccaaggaaaaggcaaagaagcaaaggtctgttgacacatcgtccactttttctgagtacctcaggtggatgggtgaaatatctttggaacggttgtctgtgttcaaattagtagcttcaattgaggagaggaagttggagtctatgaacaaaaacgagaggcaaaaactcatcttggagaggaagaagctaaacctggagaaacttaggatggatcggcagaaattgaaggaggacaaggaagaggaggtcatgatattgggcatggatctgagtaaatgtaaccccctacttcgacaatgctacgaggctaagcaacaggagatattggcaagggttattggaaactcgtcgtcaagcaagatgctgtcgtttcttctggaaatagcactactgtatctagtcctaggttttttttaacaggtagttccccagcttcgtcctcatcttagagcctcggatggatcaaactaaaactaacaggtggagcagaagtgcagtaacacgatgctccagttccaagttgacaacctggcggtagagcagaagtgcagtaacacgatgctgccatttttatctcaagcactgcataaactgcatgcgtgtggcttaggggaagtccgatctcaaaaaatcttctgtttagggcatgtactaaacatgtacagtggtgtttaatgtggaggctcctaaggtgtttaaggggtgtatttgcaaaaaaaattagagccgtctctccgtgaagagacgcctctggctcgtaaaccaagtagtaacagacgtctcacttcctattgtacgaatttgtcgtctgttctatcgatctgctgctgtacaaatgcatttaattctgtatttattaatagactacatttatagacactccattgtataatagagtctcttagttgtctcttgtgcttggataaccgttttggtgtctcttcactgtacatgcccttatgtcttctgtaaaaaagaacttgtgagaaaagatgtttaccggtacaaataacggatatggcatcttcgtggtgcgcggatcagttacaaatatgattgggacagcgaagtttgctgctgctgatgctatgcaagtgtaccgtgggacggtttcctgttgtgtgggtgaactgacgaattttgctgtacacaagatatgcatcttccgaagcctcatgcctgtgtgtatacatgaacccattccaagtcaatatctgttaaacttgttttgtgatttaagtttagcaagacacatccaaaacgttccatatcgattatggctagattcagggcccgtttggagggctacggcacctgtaaaaatgggtccggctcctctcgtgtattatttgatttggagtaaaacggtctcgctgctagctgcatcttcttgcatcaggcatgaggtggcttggagagaggtgtctgctcggggagagacgcagcgcagcgcccatatgtggagccgtggagagccaaaaatctgggctcccgctcttagccgtattatggctcctgctcaggagctgttttgcgaggtaggagccggtgctggagccggacactcagtaggaagagtggggaaaaaaagacgagctatttacttcccatttgtaagggggaaacaaaagaaaagagcatctgtaagggatttaccctagatcgtgcggcaaaccagtccctcttcgatccgcgtagaaatcccatccgatgtatagggatcgatccgcgtagaaatccaagttccccagcttcgtcctcatcttcaccgagccctacccaacgccaacctcgctgctcgtggcgtccccaatctgacgccccggccccgcgcgcccctcccaaatctcctcccacggccggccgccccggcgtgcagggcgtcggcgcactccgccgcctccgacccaccgggccccaccggcgtgaggccaaccaagaggaaccatggacgagaacggccactacgtcgtcgtcgccctgccctccgcgcgctgcggcggcgacgatgacgagcctacagtcaaggaggaggacgaggaagcggaggagcaggagcagtcgccgaccgaggcgccagcgctacccgccgcccgcgccgtgcggcggcggccgaaccagaagcggaccaagaacttcagcgacagggaggacgagatgctggcgctggcgtggctccgcgtcagcgcggaccccgccgccgggcgcgcgcccttctggagccggctgcacgaccacttccacgcgcaccgggacttcgcgtcggagcgcagcgagaactcgctcctgcaccgctggtccaccgtccaggacaacgtcaggcgcttcgaccgctgcgtcgccgacgtggcgggagcggccgcgggcgcggccgagggagggctcacgccgcaggacacggttgtgcgcgcgctggccctgttcaagtcccgggacaagaacaacaagccgttccagttcatgcactgctggatcctcctgaggtcgcagcggaagtggatggagaggtcgtcgcagtcgcagacctcttcgccgaagctggcgtggaccagtaggccgccgccgtcccagaagaagcagaagacggctccgagcccgagccccagtccgtgcgctccgccgcgtgctctcgacgacggtctagatgctgcagccgcccaagaacgcgaggaggaggaggaggaggctgtgcacgcgatgcagcagccagtggatgggaccgaggaggaggaggagttacagcagggcgggggcgtgggcgtgggcggggctagtctgtacctggaggcggcggacgatctgtggtggggaaagaggaaagcggctgacgacaatggcgaacagcaggccggcgcgaggacgatgcagcagctcagcaacggcgcgcgagagaagcgtgcgctggaacaacagcgcacggtcgcgctggcgctggaccaagccagggctgccaacgaggcgaggagcctcgagataaggaggagagaagtggagctcaggaccaaggaggtggatctgaaggtgatgctggaagaggagaggatcatggccaaggacaccagcgccatgtccgggatacagcagcagtactacaggatgctgcagaacaagatcatgactcggcggttcggtggctcatcttggatggaatgaacggctaggctttttgtgttaattactgtggtggctgcataacaaccgcttagacagcttagagcaggtttatggtctgtttggtttcctacctaaggtgctacaatctgcctaactttagacgtttgaattgaagaactaagcttacacaaaaaagttaggcacgttgtggcgctttaggcagcaaatcaaacagccctttaataatacacccgactgatggctgtaacagcgtaccttttactcatccgtacactagttagctcttcattatattaatataggacttcacat

SEQ ID NO: 27747 - DNA, 4036 bp, Zea Mays
cgccgttcgggatacctcagctccaataaactcggcgggcgggcggtggagggcgagtgaagacgaggtgcttgcctcgctcggctcacaccccttttcgtctcttctctgcctttcctccgcaatcacagagcgcaagaggagagagagagagagtgaggggggagagagagggctagggttttgtgccccccacgcctcacgcatcgaatccgagccgggtcggggttgctgcgaatcgccggcggtgcttgggctgtgattccattgcaatggcatctgaaactgatgagaaagctaagatggagagtttgacatctgctgcagcctttgtggagggtggcattcaggatgcatgcaacatttgccttgaggccttctgtgagagtgacccttctgcagatcaaccaaaatggatggatcaacacatgagtcaccaaaatccaccacccaacccaatcggtatccaatcaaatactgtagacttagatgctgaagactctgttccatcaagctttacttcgaagaggccgctaggtcatgattcgtccaaggaaaaggcaaagaagcaaaggtctgttgacacatcgtccactttttctgagtacctcaggtggatgggtgaaatatctttggaacggttgtctgtgttcaaattagtagcttcaattgaggagaggaagttggagtctatgaacaaaaacgagaggcaaaaactcatcttggagaggaagaagctaaacctggagaaacttaggatggatcggcagaaattgaaggaggacaaggaagaggaggtcatgatattgggcatggatctgagtaaatgtaaccccctacttcgacaatgctacgaggctaagcaacaggagatattggcaagggttattggaaactcgtcgtcaagcaagtgaggagtgaacgaagttaatttttgttagtggttgagatgctgtcgtttcttctggaaatagcactactgtatctagtcctaggttttttttaacaggtagttccccagcttcgtcctcatcttagagcctcggatggatcaaactaaaactaacaggtggagcagaagtgcagtaacacgatgctccagttccaagttgacaacctggcggtagagcagaagtgcagtaacacgatgctgccatttttatctcaagcactgcataaactgcatgcgtgtggcttaggggaagtccgatctcaaaaaatcttctgtttagggcatgtactaaacatgtacagtggtgtttaatgtggaggctcctaaggtgtttaaggggtgtatttgcaaaaaaaattagagccgtctctccgtgaagagacgcctctggctcgtaaaccaagtagtaacagacgtctcacttcctattgtacgaatttgtcgtctgttctatcgatctgctgctgtacaaatgcatttaattctgtatttattaatagactacatttatagacactccattgtataatagagtctcttagttgtctcttgtgcttggataaccgttttggtgtctcttcactgtacatgcccttatgtcttctgtaaaaaagaacttgtgagaaaagatgtttaccggtacaaataacggatatggcatcttcgtggtgcgcggatcagttacaaatatgattgggacagcgaagtttgctgctgctgatgctatgcaagtgtaccgtgggacggtttcctgttgtgtgggtgaactgacgaattttgctgtacacaagatatgcatcttccgaagcctcatgcctgtgtgtatacatgaacccattccaagtcaatatctgttaaacttgttttgtgatttaagtttagcaagacacatccaaaacgttccatatcgattatggctagattcagggcccgtttggagggctacggcacctgtaaaaatgggtccggctcctctcgtgtattatttgatttggagtaaaacggtctcgctgctagctgcatcttcttgcatcaggcatgaggtggcttggagagaggtgtctgctcggggagagacgcagcgcagcgcccatatgtggagccgtggagagccaaaaatctgggctcccgctcttagccgtattatggctcctgctcaggagctgttttgcgaggtaggagccggtgctggagccggacactcagtaggaagagtggggaaaaaaagacgagctatttacttcccatttgtaagggggaaacaaaagaaaagagcatctgtaagggatttaccctagatcgtgcggcaaaccagtccctcttcgatccgcgtagaaatcccatccgatgtatagggatcgatccgcgtagaaatccaagttccccagcttcgtcctcatcttcaccgagccctacccaacgccaacctcgctgctcgtggcgtccccaatctgacgccccggccccgcgcgcccctcccaaatctcctcccacggccggccgccccggcgtgcagggcgtcggcgcactccgccgcctccgacccaccgggccccaccggcgtgaggccaaccaagaggaaccatggacgagaacggccactacgtcgtcgtcgccctgccctccgcgcgctgcggcggcgacgatgacgagcctacagtcaaggaggaggacgaggaagcggaggagcaggagcagtcgccgaccgaggcgccagcgctacccgccgcccgcgccgtgcggcggcggccgaaccagaagcggaccaagaacttcagcgacagggaggacgagatgctggcgctggcgtggctccgcgtcagcgcggaccccgccgccgggcgcgcgcccttctggagccggctgcacgaccacttccacgcgcaccgggacttcgcgtcggagcgcagcgagaactcgctcctgcaccgctggtccaccgtccaggacaacgtcaggcgcttcgaccgctgcgtcgccgacgtggcgggagcggccgcgggcgcggccgagggagggctcacgccgcaggacacggttgtgcgcgcgctggccctgttcaagtcccgggacaagaacaacaagccgttccagttcatgcactgctggatcctcctgaggtcgcagcggaagtggatggagaggtcgtcgcagtcgcagacctcttcgccgaagctggcgtggaccagtaggccgccgccgtcccagaagaagcagaagacggctccgagcccgagccccagtccgtgcgctccgccgcgtgctctcgacgacggtctagatgctgcagccgcccaagaacgcgaggaggaggaggaggaggctgtgcacgcgatgcagcagccagtggatgggaccgaggaggaggaggagttacagcagggcgggggcgtgggcgtgggcggggctagtctgtacctggaggcggcggacgatctgtggtggggaaagaggaaagcggctgacgacaatggcgaacagcaggccggcgcgaggacgatgcagcagctcagcaacggcgcgcgagagaagcgtgcgctggaacaacagcgcacggtcgcgctggcgctggaccaagccagggctgccaacgaggcgaggagcctcgagataaggaggagagaagtggagctcaggaccaaggaggtggatctgaaggtgatgctggaagaggagaggatcatggccaaggacaccagcgccatgtccgggatacagcagcagtactacaggatgctgcagaacaagatcatgactcggcggttcggtggctcatcttggatggaatgaacggctaggctttttgtgttaattactgtggtggctgcataacaaccgcttagacagcttagagcaggtttatggtctgtttggtttcctacctaaggtgctacaatctgcctaactttagacgtttgaattgaagaactaagcttacacaaaaaagttaggcacgttgtggcgctttaggcagcaaatcaaacagccctttaataatacacccgactgatggctgtaacagcgtaccttttactcatccgtacactagttagctcttcattatattaatataggacttcacat

SEQ ID NO: 27748 - DNA, 4162 bp, Zea Mays
cgccgttcgggatacctcagctccaataaactcggcgggcgggcggtggagggcgagtgaagacgaggtgcttgcctcgctcggctcacaccccttttcgtctcttctctgcctttcctccgcaatcacagagcgcaagaggagagagagagagagtgaggggggagagagagggctagggttttgtgccccccacgcctcacgcatcgaatccgagccgggtcggggttgctgcgaatcgccggcggtgcttgatgattcaggcctgtgtggtaggtgccgtgcttgctcgtcctaggcgattttagggtggtcgtccttgtcgctgtgagctggttgggggctgtgtggatttggttttctggacgcgggaattcaaaggctgtgattccattgcaatggcatctgaaactgatgagaaagctaagatggagagtttgacatctgctgcagcctttgtggagggtggcattcaggatgcatgcaacatttgccttgaggccttctgtgagagtgacccttctgcagatcaaccaaaatggatggatcaacacatgagtcaccaaaatccaccacccaacccaatcggtatccaatcaaatactgtagacttagatgctgaagactctgttccatcaagctttacttcgaagaggccgctaggtcatgattcgtccaaggaaaaggcaaagaagcaaaggtctgttgacacatcgtccactttttctgagtacctcaggtggatgggtgaaatatctttggaacggttgtctgtgttcaaattagtagcttcaattgaggagaggaagttggagtctatgaacaaaaacgagaggcaaaaactcatcttggagaggaagaagctaaacctggagaaacttaggatggatcggcagaaattgaaggaggacaaggaagaggaggtcatgatattgggcatggatctgagtaaatgtaaccccctacttcgacaatgctacgaggctaagcaacaggagatattggcaagggttattggaaactcgtcgtcaagcaagtgaggagtgaacgaagttaatttttgttagtggttgagatgctgtcgtttcttctggaaatagcactactgtatctagtcctaggttttttttaacaggtagttccccagcttcgtcctcatcttagagcctcggatggatcaaactaaaactaacaggtggagcagaagtgcagtaacacgatgctccagttccaagttgacaacctggcggtagagcagaagtgcagtaacacgatgctgccatttttatctcaagcactgcataaactgcatgcgtgtggcttaggggaagtccgatctcaaaaaatcttctgtttagggcatgtactaaacatgtacagtggtgtttaatgtggaggctcctaaggtgtttaaggggtgtatttgcaaaaaaaattagagccgtctctccgtgaagagacgcctctggctcgtaaaccaagtagtaacagacgtctcacttcctattgtacgaatttgtcgtctgttctatcgatctgctgctgtacaaatgcatttaattctgtatttattaatagactacatttatagacactccattgtataatagagtctcttagttgtctcttgtgcttggataaccgttttggtgtctcttcactgtacatgcccttatgtcttctgtaaaaaagaacttgtgagaaaagatgtttaccggtacaaataacggatatggcatcttcgtggtgcgcggatcagttacaaatatgattgggacagcgaagtttgctgctgctgatgctatgcaagtgtaccgtgggacggtttcctgttgtgtgggtgaactgacgaattttgctgtacacaagatatgcatcttccgaagcctcatgcctgtgtgtatacatgaacccattccaagtcaatatctgttaaacttgttttgtgatttaagtttagcaagacacatccaaaacgttccatatcgattatggctagattcagggcccgtttggagggctacggcacctgtaaaaatgggtccggctcctctcgtgtattatttgatttggagtaaaacggtctcgctgctagctgcatcttcttgcatcaggcatgaggtggcttggagagaggtgtctgctcggggagagacgcagcgcagcgcccatatgtggagccgtggagagccaaaaatctgggctcccgctcttagccgtattatggctcctgctcaggagctgttttgcgaggtaggagccggtgctggagccggacactcagtaggaagagtggggaaaaaaagacgagctatttacttcccatttgtaagggggaaacaaaagaaaagagcatctgtaagggatttaccctagatcgtgcggcaaaccagtccctcttcgatccgcgtagaaatcccatccgatgtatagggatcgatccgcgtagaaatccaagttccccagcttcgtcctcatcttcaccgagccctacccaacgccaacctcgctgctcgtggcgtccccaatctgacgccccggccccgcgcgcccctcccaaatctcctcccacggccggccgccccggcgtgcagggcgtcggcgcactccgccgcctccgacccaccgggccccaccggcgtgaggccaaccaagaggaaccatggacgagaacggccactacgtcgtcgtcgccctgccctccgcgcgctgcggcggcgacgatgacgagcctacagtcaaggaggaggacgaggaagcggaggagcaggagcagtcgccgaccgaggcgccagcgctacccgccgcccgcgccgtgcggcggcggccgaaccagaagcggaccaagaacttcagcgacagggaggacgagatgctggcgctggcgtggctccgcgtcagcgcggaccccgccgccgggcgcgcgcccttctggagccggctgcacgaccacttccacgcgcaccgggacttcgcgtcggagcgcagcgagaactcgctcctgcaccgctggtccaccgtccaggacaacgtcaggcgcttcgaccgctgcgtcgccgacgtggcgggagcggccgcgggcgcggccgagggagggctcacgccgcaggacacggttgtgcgcgcgctggccctgttcaagtcccgggacaagaacaacaagccgttccagttcatgcactgctggatcctcctgaggtcgcagcggaagtggatggagaggtcgtcgcagtcgcagacctcttcgccgaagctggcgtggaccagtaggccgccgccgtcccagaagaagcagaagacggctccgagcccgagccccagtccgtgcgctccgccgcgtgctctcgacgacggtctagatgctgcagccgcccaagaacgcgaggaggaggaggaggaggctgtgcacgcgatgcagcagccagtggatgggaccgaggaggaggaggagttacagcagggcgggggcgtgggcgtgggcggggctagtctgtacctggaggcggcggacgatctgtggtggggaaagaggaaagcggctgacgacaatggcgaacagcaggccggcgcgaggacgatgcagcagctcagcaacggcgcgcgagagaagcgtgcgctggaacaacagcgcacggtcgcgctggcgctggaccaagccagggctgccaacgaggcgaggagcctcgagataaggaggagagaagtggagctcaggaccaaggaggtggatctgaaggtgatgctggaagaggagaggatcatggccaaggacaccagcgccatgtccgggatacagcagcagtactacaggatgctgcagaacaagatcatgactcggcggttcggtggctcatcttggatggaatgaacggctaggctttttgtgttaattactgtggtggctgcataacaaccgcttagacagcttagagcaggtttatggtctgtttggtttcctacctaaggtgctacaatctgcctaactttagacgtttgaattgaagaactaagcttacacaaaaaagttaggcacgttgtggcgctttaggcagcaaatcaaacagccctttaataatacacccgactgatggctgtaacagcgtaccttttactcatccgtacactagttagctcttcattatattaatataggacttcacat

SEQ ID NO: 27749 - DNA, 3996 bp, Zea Mays
cgccgttcgggatacctcagctccaataaactcggcgggcgggcggtggagggcgagtgaagacgaggtgcttgcctcgctcggctcacaccccttttcgtctcttctctgcctttcctccgcaatcacagagcgcaagaggagagagagagagagtgaggggggagagagagggctagggttttgtgccccccacgcctcacgcatcgaatccgagccgggtcggggttgctgcgaatcgccggcggtgcttgggctgtgattccattgcaatggcatctgaaactgatgagaaagctaagatggagagtttgacatctgctgcagcctttgtggagggtggcattcaggatgcatgcaacatttgccttgaggccttctgtgagagtgacccttctgcagatcaaccaaaatggatggatcaacacatgagtcaccaaaatccaccacccaacccaatcggtatccaatcaaatactgtagacttagatgctgaagactctgttccatcaagctttacttcgaagaggccgctaggtcatgattcgtccaaggaaaaggcaaagaagcaaaggtctgttgacacatcgtccactttttctgagtacctcaggtggatgggtgaaatatctttggaacggttgtctgtgttcaaattagtagcttcaattgaggagaggaagttggagtctatgaacaaaaacgagaggcaaaaactcatcttggagaggaagaagctaaacctggagaaacttaggatggatcggcagaaattgaaggaggacaaggaagaggaggtcatgatattgggcatggatctgagtaaatgtaaccccctacttcgacaatgctacgaggctaagcaacaggagatattggcaagggttattggaaactcgtcgtcaagcaagatgctgtcgtttcttctggaaatagcactactgtatctagtcctaggttttttttaacaggtagttccccagcttcgtcctcatcttagagcctcggatggatcaaactaaaactaacaggtggagcagaagtgcagtaacacgatgctccagttccaagttgacaacctggcggtagagcagaagtgcagtaacacgatgctgccatttttatctcaagcactgcataaactgcatgcgtgtggcttaggggaagtccgatctcaaaaaatcttctgtttagggcatgtactaaacatgtacagtggtgtttaatgtggaggctcctaaggtgtttaaggggtgtatttgcaaaaaaaattagagccgtctctccgtgaagagacgcctctggctcgtaaaccaagtagtaacagacgtctcacttcctattgtacgaatttgtcgtctgttctatcgatctgctgctgtacaaatgcatttaattctgtatttattaatagactacatttatagacactccattgtataatagagtctcttagttgtctcttgtgcttggataaccgttttggtgtctcttcactgtacatgcccttatgtcttctgtaaaaaagaacttgtgagaaaagatgtttaccggtacaaataacggatatggcatcttcgtggtgcgcggatcagttacaaatatgattgggacagcgaagtttgctgctgctgatgctatgcaagtgtaccgtgggacggtttcctgttgtgtgggtgaactgacgaattttgctgtacacaagatatgcatcttccgaagcctcatgcctgtgtgtatacatgaacccattccaagtcaatatctgttaaacttgttttgtgatttaagtttagcaagacacatccaaaacgttccatatcgattatggctagattcagggcccgtttggagggctacggcacctgtaaaaatgggtccggctcctctcgtgtattatttgatttggagtaaaacggtctcgctgctagctgcatcttcttgcatcaggcatgaggtggcttggagagaggtgtctgctcggggagagacgcagcgcagcgcccatatgtggagccgtggagagccaaaaatctgggctcccgctcttagccgtattatggctcctgctcaggagctgttttgcgaggtaggagccggtgctggagccggacactcagtaggaagagtggggaaaaaaagacgagctatttacttcccatttgtaagggggaaacaaaagaaaagagcatctgtaagggatttaccctagatcgtgcggcaaaccagtccctcttcgatccgcgtagaaatcccatccgatgtatagggatcgatccgcgtagaaatccaagttccccagcttcgtcctcatcttcaccgagccctacccaacgccaacctcgctgctcgtggcgtccccaatctgacgccccggccccgcgcgcccctcccaaatctcctcccacggccggccgccccggcgtgcagggcgtcggcgcactccgccgcctccgacccaccgggccccaccggcgtgaggccaaccaaggaaccatggacgagaacggccactacgtcgtcgtcgccctgccctccgcgcgctgcggcggcgacgatgacgagcctacagtcaaggaggaggacgaggaagcggaggagcaggagcagtcgccgaccgaggcgccagcgctacccgccgcccgcgccgtgcggcggcggccgaaccagaagcggaccaagaacttcagcgacagggaggacgagatgctggcgctggcgtggctccgcgtcagcgcggaccccgccgccgggcgcgcgcccttctggagccggctgcacgaccacttccacgcgcaccgggacttcgcgtcggagcgcagcgagaactcgctcctgcaccgctggtccaccgtccaggacaacgtcaggcgcttcgaccgctgcgtcgccgacgtggcgggagcggccgcgggcgcggccgagggagggctcacgccgcaggacacggttgtgcgcgcgctggccctgttcaagtcccgggacaagaacaacaagccgttccagttcatgcactgctggatcctcctgaggtcgcagcggaagtggatggagaggtcgtcgcagtcgcagacctcttcgccgaagctggcgtggaccagtaggccgccgccgtcccagaagaagcagaagacggctccgagcccgagccccagtccgtgcgctccgccgcgtgctctcgacgacggtctagatgctgcagccgcccaagaacgcgaggaggaggaggaggaggctgtgcacgcgatgcagcagccagtggatgggaccgaggaggaggaggagttacagcagggcgggggcgtgggcgtgggcggggctagtctgtacctggaggcggcggacgatctgtggtggggaaagaggaaagcggctgacgacaatggcgaacagcaggccggcgcgaggacgatgcagcagctcagcaacggcgcgcgagagaagcgtgcgctggaacaacagcgcacggtcgcgctggcgctggaccaagccagggctgccaacgaggcgaggagcctcgagataaggaggagagaagtggagctcaggaccaaggaggtggatctgaaggtgatgctggaagaggagaggatcatggccaaggacaccagcgccatgtccgggatacagcagcagtactacaggatgctgcagaacaagatcatgactcggcggttcggtggctcatcttggatggaatgaacggctaggctttttgtgttaattactgtggtggctgcataacaaccgcttagacagcttagagcaggtttatggtctgtttggtttcctacctaaggtgctacaatctgcctaactttagacgtttgaattgaagaactaagcttacacaaaaaagttaggcacgttgtggcgctttaggcagcaaatcaaacagccctttaataatacacccgactgatggctgtaacagcgtaccttttactcatccgtacactagttagctcttcattatattaatataggacttcacat

SEQ ID NO: 27750 - DNA, 2222 bp, Zea Mays
ccacggtcagtttgctcagatccgggaaggcgggagaacccctcgtctcctgtcctggccactgccgcacggtttcggcgtccgccgtgacgctcgccagcgaccgggcttgcaaatatccgcccgccccgaaccagccgattcggcggccgtggtcctggtccgtcccctccccaccccgcgtccccgccacgggacgggaccaacagctcccgcgcccgccgccgagcccgagacgagaacgccgcccttcccaaccctgctcgccttgcccccttgcactcttgccagaacaaatcccctcgtcaaaacttactataatatcctggcgtagccccgtctcccccctgccggcgcctttcacgccgtgcctctcccacgccttgaccacggccacccgcgcctcctcgcctcccgcaagcccaccccgcgcgcgcccgccccggcggcgttggcgtctccctcctctccggccgctatggcaggggagaacgacccccgcagcggcggcggtcccgttcccgtcgacgcgtgcccgctctgcggcggggccaacgggcccccctcgcgcgtcgccctcgccaggcgggccccgcccggcgacgccctcgcgctggcggtggcgttgtcccccgccgacgaggcgtccgcgctgcgcgaggcgctggcgcggcaccggcgcggcgtcgcggacctgcaggcggagctggaggccgagcgcggcgccgccgcgggcgccgccagcgaggccatgtccatgatcctgcgcctgcagcgcgagaagtctgaggccatgatggaggcgcgccagtaccggcgctacgccgaggagcggttcgcgcacgacgccgccgaggccgaccatcccttctcctcctccgacggcgacgacggttaccattccgtccactgcctcgacgaccacctcgccgacgagggcaccccgcgcgccccccacggagctcccagccccccggactccgataagccggtcgtcatgtttggctcgccgcgccgctcgtcacgccacgtccgcacgttctccggcgacggcggcccgtacagctgccgggtcgcgctggccgacgagttcccgctcttcacggacagggacgcgccggggcaggacgacgaggaggaggccgaccgggtgtacacggttgacgcggtgcatggcgtgccggtcatggcgcctgacgacgactgctgcgactttgggaccacgtgggagggcgaggtgggcgctcgtgctggggccgcgggctgggcggaggaggacgagatacaggaactcaaagccaggttgcacgcgttggaggcggatcgggagtctatgcggcacgccatcatggccatgggagatgagaaggcgcaggtcgttctgctcagggagatcgctcagcagctctgcagggacgcggcaccgttccctgctgtcccgctcaaggtgcagccaaggccacagccgtttgtcatggcacagaggaaggtggtgaagaggcactcgtccttcgctaagatcttcattgtcacagtgatcaagtgggtcatgtctatcttttgctggcgacggaaatcagatcgcgtaaggtatccgatcggtatgtgtgggagcaacgtcggattgatgctggtactggataggttccccaaacagagacaaaagaagattcctaaaaggaagctaagtgcctccattctttgataatctgattacaggcgacctagggaaagctgagtcatgcctctgcgattatctgacccgaatgagcagttctctgaacataaaaagctggctttgtgaagaagcaattgttgtcgcacatcgttccaaccctttttcctatgcattctttggttgatttcgtttttggcaatctagctaaaatgttgatatcctttgtgttttcttcctctgtctgccttttttttctacatatatcgttgatattctttttttgtgcagtagcatcgaaaagtccactgtgaataaaacacggaccattttaatcattagcagtaggcagcagagttcgtttttcttttttctatgtcaccttctctcccgttttgtggaacaaaatcatattctgttgtaagcaaatttcaaactgaatagcttgttttgtggggagacttttcttgttttagtgctgtgggatgaagtcggtgtaaatttgaaattttgtttagaagagaattttaaatgtcttggatatatt

SEQ ID NO: 27751 - DNA, 1454 bp, Zea Mays
gggagtgtggtgggggagtgggggacatgaggagcggcaggaagcgagcccttctagatcccacggaccgcgccgtcatgcaatggtagaagctcatgatcaagaaccgagagttcgatgtccagggataggaaacaggcatgcatcgtagagacggattcgcaggttatgcaggtcgaggaggagcatatagaaccattaagggagcagagcggaactcagcagccaccgagttttggacaatgtggcaaaaatggtgaaccattggagcatatggtaacaacaagcatcttgcaaggggcatgtctgcctgacctagatccaggtcgtggtgaaagaattagacgacttgctgaaattcttccagcccatcaggacatagaaaaaaacttgcacacatgtgctcatccatgcatgccaatttaaaggtgtcatatacagtgcagtgcatgggtgtttatggccatggttgtggttgtggttgcaaggcatgagcgagcaagaagccaaccatccatttaaactgtttggttgtactgcttctactatgtgttgttactactaatgaatactcatgcagatttgaagggctatcttcccattgttgttgtagtagtagtattgtattagtttgtttatcttttgttttgatctgggtcttaatttgccttgatatgtgcaaggcctacagttgaatgcaatgcgagcaacagctcagttatgtgtgtgtgatgttgaagggatctatcctatgctcaagcataagaagcataattttgttagacattgaatggagaactggctactctatccgttccaaattatatatacttcaagttgtacatgataatcaggtggcaaaagaatgttaactcaattttttctatgttttcttttttcaggtggcagcaaattttgatagacaaccttgttggatatgatactatacctacaaacagcttggtgatttctcctggtcatggttatttatacaactttgagatgaaggagctttatggtcttagttataggcatgaaacaccagaaggtcctacaagatttggagactagcttggatcatggtgctacgttttcaagagctgctagccaacgccaatgcatctcgtttaagatcgtgcatgtgacatttcctctcctctcctgatgttaggccttcacaacttgtgttatgtgcggggcaaaaaaatccactcttttatatagcaaccacctgctgttaagaccttttgactctagatcctaaggttgtaaactgtgttctctaagtatctgtgcagccaacatcttttattggcccaaaaatatatttgattccatgcctcacttatggttgtttacttttatttggagttatttctgtaccttaagtctagctggaggtgcttttatatacttgtgctaactgaaggttagtattataccttaagtctaac

SEQ ID NO: 27752 - DNA, 911 bp, Zea Mays
gttggggttccctgatggtgatggagatgtggcagggagtgtggtgggggagtgggggacatgaggagcggcaggaagcgagcccttctagatcccacggaccgcgccgtcatgcaatggtagaagctcatgatcaagaaccgagagttcgatgtccagggataggaaacaggcatgcatcgtagagacggattcgcaggttatgcaggtcgaggaggagcatatagaaccattaagggagcagagcggaactcagcagccaccgagttttggacaatgtggcaaaaatggtgaaccattggagcatatggtaacaacaagcatcttgcaaggggcatgtctgcctgacctagatccaggtggcagcaaattttgatagacaaccttgttggatatgatactatacctacaaacagcttggtgatttctcctggtcatggttatttatacaactttgagatgaaggagctttatggtcttagttataggcatgaaacaccagaaggtcctacaagatttggagactagcttggatcatggtgctacgttttcaagagctgctagccaacgccaatgcatctcgtttaagatcgtgcatgtgacatttcctctcctctcctgatgttaggccttcacaacttgtgttatgtgcggggcaaaaaaatccactcttttatatagcaaccacctgctgttaagaccttttgactctagatcctaaggttgtaaactgtgttctctaagtatctgtgcagccaacatcttttattggcccaaaaatatatttgattccatgcctcacttatggttgtttacttttatttggagttatttctgtaccttaagtctagctggaggtgcttttatatacttgtgctaactgaaggttagtattataccttaagtctaac

SEQ ID NO: 27753 - DNA, 862 bp, Zea Mays
gttggggttccctgatggtgatggagatgtggcagggagtgtggtgggggagtgggggacatgaggagcggcaggaagcgagcccttctagatcccacggaccgcgccgtcatgcaatggtagaagctcatgatcaagaaccgagagttcgatgtccagggataggaaacaggcatgcatcgtagagacggattcgcaggttatgcaggtcgaggaggagcatatagaaccattaagggagcagagcggaactcagcagccaccgagttttggacaatgtggcaaaaatggtgaaccattggagcatatggtggcagcaaattttgatagacaaccttgttggatatgatactatacctacaaacagcttggtgatttctcctggtcatggttatttatacaactttgagatgaaggagctttatggtcttagttataggcatgaaacaccagaaggtcctacaagatttggagactagcttggatcatggtgctacgttttcaagagctgctagccaacgccaatgcatctcgtttaagatcgtgcatgtgacatttcctctcctctcctgatgttaggccttcacaacttgtgttatgtgcggggcaaaaaaatccactcttttatatagcaaccacctgctgttaagaccttttgactctagatcctaaggttgtaaactgtgttctctaagtatctgtgcagccaacatcttttattggcccaaaaatatatttgattccatgcctcacttatggttgtttacttttatttggagttatttctgtaccttaagtctagctggaggtgcttttatatacttgtgctaactgaaggttagtattataccttaagtctaac

SEQ ID NO: 27754 - DNA, 826 bp, Zea Mays
tagggcggtggtgatggaggggaacatggcgttggggttccctgatggtgatggagatgtggcagggagtgtggtgggggagtgggggacatgaggagcggcaggaagcgagcccttctagatcccacggaccgcgccgtcatgcaatggtagaagctcatgatcaagaaccgagagttcgatgtccagggataggaaacaggcatgcatcgtagagacggattcgcaggttatgcaggtcgaggaggagcatatagaaccattaagggagcaggtggcagcaaattttgatagacaaccttgttggatatgatactatacctacaaacagcttggtgatttctcctggtcatggttatttatacaactttgagatgaaggagctttatggtcttagttataggcatgaaacaccagaaggtcctacaagatttggagactagcttggatcatggtgctacgttttcaagagctgctagccaacgccaatgcatctcgtttaagatcgtgcatgtgacatttcctctcctctcctgatgttaggccttcacaacttgtgttatgtgcggggcaaaaaaatccactcttttatatagcaaccacctgctgttaagaccttttgactctagatcctaaggttgtaaactgtgttctctaagtatctgtgcagccaacatcttttattggcccaaaaatatatttgattccatgcctcacttatggttgtttacttttatttggagttatttctgtaccttaagtctagctggaggtgcttttatatacttgtgctaactgaaggttagtattataccttaagtctaac

SEQ ID NO: 27755 - DNA, 998 bp, Zea Mays
ataggagtcttcttcctccccgaccacaccgctcctctccttccaagccctcgtcaccaccagcctgctctcattcctgtgccacctggatctcgccctgcttgcgctcaacatgctccccacacactctcgctgcggcgtgtgcccgcccaacccgcgcatcgctctctgtcgcctctgcctcatcacaggtgatggcgtcgtcgtccccgcagcagcacaccgaggtcggctcgtcctcgaacctcgctcaatttaggaatagcggcatcatatccatgaacatgggcgacatcatctgtaacatctacgaccacgagaccgtcaacgctgccgccgccagcgtcagccccggcccggtggatccttcccaggcatgcatcgtagagacggattcgcaggttatgcaggtcgaggaggagcatatagaaccattaagggagcaggtggcagcaaattttgatagacaaccttgttggatatgatactatacctacaaacagcttggtgatttctcctggtcatggttatttatacaactttgagatgaaggagctttatggtcttagttataggcatgaaacaccagaaggtcctacaagatttggagactagcttggatcatggtgctacgttttcaagagctgctagccaacgccaatgcatctcgtttaagatcgtgcatgtgacatttcctctcctctcctgatgttaggccttcacaacttgtgttatgtgcggggcaaaaaaatccactcttttatatagcaaccacctgctgttaagaccttttgactctagatcctaaggttgtaaactgtgttctctaagtatctgtgcagccaacatcttttattggcccaaaaatatatttgattccatgcctcacttatggttgtttacttttatttggagttatttctgtaccttaagtctagctggaggtgcttttatatacttgtgctaactgaaggttagtattataccttaagtctaac

SEQ ID NO: 27756 - DNA, 1725 bp, Zea Mays
ctcccctctgctccgttttccaattagtgaatctgataggagtcttcttcctccccgaccacaccgctcctctccttccaagccctcgtcaccaccagcctgctctcattcctgtgccacctggatctcgccctgcttgcgctcaacatgctccccacacactctcgctgcggcgtgtgcccgcccaacccgcgcatcgctctctgtcgcctctgcctcatcacaggtgatggcgtcgtcgtccccgcagcagcacaccgaggtcggctcgtcctcgaacctcgctcaatttaggaatagcggcatcatatccatgaacatgggcgacatcatctgtaacatctacgaccacgagaccgtcaacgctgccgccgccagcgtcagccccggcccggtggatccttcccaggcatgcatcgtagagacggattcgcaggttatgcaggtcgaggaggagcatatagaaccattaagggagcagagcggaactcagcagccaccgagttttggacaatgtggcaaaaatggtgaaccattggagcatatggtaacaacaagcatcttgcaaggggcatgtctgcctgacctagatccaggtcgtggtgaaagaattagacgacttgctgaaattcttccagcccatcaggacatagaaaaaaacttgcacacatgtgctcatccatgcatgccaatttaaaggtgtcatatacagtgcagtgcatgggtgtttatggccatggttgtggttgtggttgcaaggcatgagcgagcaagaagccaaccatccatttaaactgtttggttgtactgcttctactatgtgttgttactactaatgaatactcatgcagatttgaagggctatcttcccattgttgttgtagtagtagtattgtattagtttgtttatcttttgttttgatctgggtcttaatttgccttgatatgtgcaaggcctacagttgaatgcaatgcgagcaacagctcagttatgtgtgtgtgatgttgaagggatctatcctatgctcaagcataagaagcataattttgttagacattgaatggagaactggctactctatccgttccaaattatatatacttcaagttgtacatgataatcaggtggcaaaagaatgttaactcaattttttctatgttttcttttttcaggtggcagcaaattttgatagacaaccttgttggatatgatactatacctacaaacagcttggtgatttctcctggtcatggttatttatacaactttgagatgaaggagctttatggtcttagttataggcatgaaacaccagaaggtcctacaagatttggagactagcttggatcatggtgctacgttttcaagagctgctagccaacgccaatgcatctcgtttaagatcgtgcatgtgacatttcctctcctctcctgatgttaggccttcacaacttgtgttatgtgcggggcaaaaaaatccactcttttatatagcaaccacctgctgttaagaccttttgactctagatcctaaggttgtaaactgtgttctctaagtatctgtgcagccaacatcttttattggcccaaaaatatatttgattccatgcctcacttatggttgtttacttttatttggagttatttctgtaccttaagtctagctggaggtgcttttatatacttgtgctaactgaaggttagtattataccttaagtctaac

SEQ ID NO: 27757 - DNA, 1154 bp, Zea Mays
cgggttctcccctctgctccgttttccaattagtgaatctgataggagtcttcttcctccccgaccacaccgctcctctccttccaagccctcgtcaccaccagcctgctctcattcctgtgccacctggatctcgccctgcttgcgctcaacatgctccccacacactctcgctgcggcgtgtgcccgcccaacccgcgcatcgctctctgtcgcctctgcctcatcacaggtgatggcgtcgtcgtccccgcagcagcacaccgaggtcggctcgtcctcgaacctcgctcaatttaggaatagcggcatcatatccatgaacatgggcgacatcatctgtaacatctacgaccacgagaccgtcaacgctgccgccgccagcgtcagccccggcccggtggatccttcccaggcatgcatcgtagagacggattcgcaggttatgcaggtcgaggaggagcatatagaaccattaagggagcagagcggaactcagcagccaccgagttttggacaatgtggcaaaaatggtgaaccattggagcatatggtaacaacaagcatcttgcaaggggcatgtctgcctgacctagatccaggtggcagcaaattttgatagacaaccttgttggatatgatactatacctacaaacagcttggtgatttctcctggtcatggttatttatacaactttgagatgaaggagctttatggtcttagttataggcatgaaacaccagaaggtcctacaagatttggagactagcttggatcatggtgctacgttttcaagagctgctagccaacgccaatgcatctcgtttaagatcgtgcatgtgacatttcctctcctctcctgatgttaggccttcacaacttgtgttatgtgcggggcaaaaaaatccactcttttatatagcaaccacctgctgttaagaccttttgactctagatcctaaggttgtaaactgtgttctctaagtatctgtgcagccaacatcttttattggcccaaaaatatatttgattccatgcctcacttatggttgtttacttttatttggagttatttctgtaccttaagtctagctggaggtgcttttatatacttgtgctaactgaaggttagtattataccttaagtctaac

SEQ ID NO: 27758 - DNA, 1098 bp, Zea Mays
cgggttctcccctctgctccgttttccaattagtgaatctgataggagtcttcttcctccccgaccacaccgctcctctccttccaagccctcgtcaccaccagcctgctctcattcctgtgccacctggatctcgccctgcttgcgctcaacatgctccccacacactctcgctgcggcgtgtgcccgcccaacccgcgcatcgctctctgtcgcctctgcctcatcacaggtgatggcgtcgtcgtccccgcagcagcacaccgaggtcggctcgtcctcgaacctcgctcaatttaggaatagcggcatcatatccatgaacatgggcgacatcatctgtaacatctacgaccacgagaccgtcaacgctgccgccgccagcgtcagccccggcccggtggatccttcccaggcatgcatcgtagagacggattcgcaggttatgcaggtcgaggaggagcatatagaaccattaagggagcagagcggaactcagcagccaccgagttttggacaatgtggcaaaaatggtgaaccattggagcatatgcaaattttgatagacaaccttgttggatatgatactatacctacaaacagcttggtgatttctcctggtcatggttatttatacaactttgagatgaaggagctttatggtcttagttataggcatgaaacaccagaaggtcctacaagatttggagactagcttggatcatggtgctacgttttcaagagctgctagccaacgccaatgcatctcgtttaagatcgtgcatgtgacatttcctctcctctcctgatgttaggccttcacaacttgtgttatgtgcggggcaaaaaaatccactcttttatatagcaaccacctgctgttaagaccttttgactctagatcctaaggttgtaaactgtgttctctaagtatctgtgcagccaacatcttttattggcccaaaaatatatttgattccatgcctcacttatggttgtttacttttatttggagttatttctgtaccttaagtctagctggaggtgcttttatatacttgtgctaactgaaggttagtattataccttaagtctaac

SEQ ID NO: 27759 - DNA, 1691 bp, Zea Mays
gcaggaagcgagcccttctagatcccacggaccgcgccgtcatgcaatggtagaagctcatgatcaagaaccgagagttcgatgtccagggataggaaacaggcatgcatcgtagagacggattcgcaggttatgcaggtcgaggaggagcatatagaaccattaagggagcagagcggaactcagcagccaccgagttttggacaatgtggcaaaaatggtgaaccattggagcatatggtaacaacaagcatcttgcaaggggcatgtctgcctgacctagatccaggtcgtggtgaaagaattagacgacttgctgaaattcttccagcccatcaggacatagaaaaaaacttgcacacatgtgctcatccatgcatgccaatttaaaggtgtcatatacagtgcagtgcatgggtgtttatggccatggttgtggttgtggttgcaaggcatgagcgagcaagaagccaaccatccatttaaactgtttggttgtactgcttctactatgtgttgttactactaatgaatactcatgcagatttgaagggctatcttcccattgttgttgtagtagtagtattgtattagtttgtttatcttttgttttgatctgggtcttaatttgccttgatatgtgcaaggcctacagttgaatgcaatgcgagcaacagctcagttatgtgtgtgtgatgttgaagggatctatcctatgctcaagcataagaagcataattttgttagacattgaatggagaactggctactctatccgttccaaattatatatacttcaagttgtacatgataatcaggtggcaaaagaatgttaactcaattttttctatgttttcttttttcaggtggcagcaaattttgatagacaaccttgttggatatgatactatacctacaaacagcttggtgatttctcctggtcatggttatttatacaactttgagatgaaggagctttatggtcttagttataggcatgaaacaccagaaggtcctacaagatttggagaaggcatgttaaccccgctggaccccaaccctctattcacgccaaacctcagccatttggaacatcttctcttcctccggttcatctctaatcttcatcgcttcaagtgttagagcatccacctcaactttgtcatagacttcttccacgagcacacgtgccttcctccttctcacaatcttacaaataacgcttggcagcagactttatctcagatagatcattgagcagtttggaattcattatctctgcactctgttactgtttcctctcctgattcaattcttcctttgagccaataaaaatagtggcaacatcaacattcttataactaccctcccttgaacactattggctgataagtatggactgggccaaggaaaacgtcattagctgcagctgcaatccctgcattcaatctagctcagcgtagcgttagtgagacaactgacctaattatcattgcaaaagaagggcactagaattatagataaccagtatcatagagaccttgcatctgaattttgagtgctatctaaaaagagatcgagagaatgtggatatgctaaactcagaacaagatcgcagcaacctgaatagggtacaaatccagagaatgtggatgtgctgaaccctgagcaggaccaccgtttttgctgtt

SEQ ID NO: 27760 - DNA, 1169 bp, Zea Mays
gattcctgcgctagggcggtggtgatggaggggaacatggcgttggggttccctgatggtgatggagatgtggcagggagtgtggtgggggagtgggggacatgaggagcggcaggaagcgagcccttctagatcccacggaccgcgccgtcatgcaatggtagaagctcatgatcaagaaccgagagttcgatgtccagggataggaaacaggcatgcatcgtagagacggattcgcaggttatgcaggtcgaggaggagcatatagaaccattaagggagcagagcggaactcagcagccaccgagttttggacaatgtggcaaaaatggtgaaccattggagcatatgcaaattttgatagacaaccttgttggatatgatactatacctacaaacagcttggtgatttctcctggtcatggttatttatacaactttgagatgaaggagctttatggtcttagttataggcatgaaacaccagaaggtcctacaagatttggagaaggcatgttaaccccgctggaccccaaccctctattcacgccaaacctcagccatttggaacatcttctcttcctccggttcatctctaatcttcatcgcttcaagtgttagagcatccacctcaactttgtcatagacttcttccacgagcacacgtgccttcctccttctcacaatcttacaaataacgcttggcagcagactttatctcagatagatcattgagcagtttggaattcattatctctgcactctgttactgtttcctctcctgattcaattcttcctttgagccaataaaaatagtggcaacatcaacattcttataactaccctcccttgaacactattggctgataagtatggactgggccaaggaaaacgtcattagctgcagctgcaatccctgcattcaatctagctcagcgtagcgttagtgagacaactgacctaattatcattgcaaaagaagggcactagaattatagataaccagtatcatagagaccttgcatctgaattttgagtgctatctaaaaagagatcgagagaatgtggatatgctaaactcagaacaagatcgcagcaacctgaatagggtacaaatccagagaatgtggatgtgctgaaccctgagcaggaccaccgtttttgctgtt

SEQ ID NO: 27761 - DNA, 1431 bp, Zea Mays
caccaccagcctgctctcattcctgtgccacctggatctcgccctgcttgcgctcaacatgctccccacacactctcgctgcggcgtgtgcccgcccaacccgcgcatcgctctctgtcgcctctgcctcatcacaggtgatggcgtcgtcgtccccgcagcagcacaccgaggtcggctcgtcctcgaacctcgctcaatttaggaatagcggcatcatatccatgaacatgggcgacatcatctgtaacatctacgaccacgagaccgtcaacgctgccgccgccagcgtcagccccggcccggtggatccttcccagggattcctgcgctagggcggtggtgatggaggggaacatggcgttggggttccctgatggtgatggagatgtggcagggagtgtggtgggggagtgggggacatgaggagcggcaggaagcgagcccttctagatcccacggaccgcgccgtcatgcaatggtagaagctcatgatcaagaaccgagagttcgatgtccagggataggaaacaggcatgcatcgtagagacggattcgcaggttatgcaggtcgaggaggagcatatagaaccattaagggagcaggtggcagcaaattttgatagacaaccttgttggatatgatactatacctacaaacagcttggtgatttctcctggtcatggttatttatacaactttgagatgaaggagctttatggtcttagttataggcatgaaacaccagaaggtcctacaagatttggagaaggcatgttaaccccgctggaccccaaccctctattcacgccaaacctcagccatttggaacatcttctcttcctccggttcatctctaatcttcatcgcttcaagtgttagagcatccacctcaactttgtcatagacttcttccacgagcacacgtgccttcctccttctcacaatcttacaaataacgcttggcagcagactttatctcagatagatcattgagcagtttggaattcattatctctgcactctgttactgtttcctctcctgattcaattcttcctttgagccaataaaaatagtggcaacatcaacattcttataactaccctcccttgaacactattggctgataagtatggactgggccaaggaaaacgtcattagctgcagctgcaatccctgcattcaatctagctcagcgtagcgttagtgagacaactgacctaattatcattgcaaaagaagggcactagaattatagataaccagtatcatagagaccttgcatctgaattttgagtgctatctaaaaagagatcgagagaatgtggatatgctaaactcagaacaagatcgcagcaacctgaatagggtacaaatccagagaatgtggatgtgctgaaccctgagcaggaccaccgtttttgctgtt

SEQ ID NO: 27762 - DNA, 2574 bp, Zea Mays
ctagcagagagagaacataaatccaaagatgggctggagaccacacgttgtctctgtgtcatcttctgcactactagtgctgcttcagctcctcgtgctactgatgctgcccgctgatgcgtcgtcatcaagccaaacgacgacgacgacgatctacgtcgtgtacatgggcgagaagaagcacgacgacccttccctcgtcgtggcgtcgcaccacgccacgctggcctccgttcttgggagcaaggatgaagcactcagctccatagtctacagctacaagcacggattctccggtttcgcggcgaagctcacccagccccaagcggaggagcttaaaaaataccctggagttgtgagcgtgaagccaaacacgtaccaccacgtccacacgactcggagctgggattttcttggcatgagctacggccaacagcagtcgtcgtcgtggtcgtcgtcgtcgcggctccttaggaaggccaagtacggcgaagatgtcatcgtcggcgtcatagactcaggcatctggccggaatcccggagcttcgacgacagcgggtacggctacggccccgtgccgaaacggtggaaaggcgtgtgccagacaggccaggcgttcaacgcgagcaactgcaaccggaaggtcatcggcgcgcggtggtacgccgccgacgtcagcgaggaggacctcaagaacgaatacaggtcgccacgggacgccaacggccacggcacgcacaccgcctccacgatcgccggctcgcccgtgcggaacgcgagccaccacggcggcggcctggccgccggcatagcgcgcggcggggcgccgcgcgcgcggctggcaatatacaaggcctgccacgctgtcggcggcagcgcgagctgcggcgacgcctcgatcctcgcggccctcgatgccgccattggggacggcgtcgacctagtgtccctgtcgctgggaggcttaggcgagatctaccagtcgttgcacgccgtggcggccgggatcaccgtggtgctcgctgcagggaacgatggccccgtggagcagtccctcaacaatgccctgccgtggggcatcacggtggccgccgccaccatggaccgcaccttcccgacagtggtcacgctgggcgacggagagaagctggtggggcaatcactgtattaccacaaccgctcagcggcggcatcgacgagcgacgacgacgacttcgcttggcgccatttgatattattccctagctgcgacgagaagaatctggggtcggaaaacatcaccgggaaaatcgtcatatgccgtgcgccggtgttctggtccgactatcctcctccgcggcagcttagcagggccagccgagccgccatcgccggcggggccaagggcatcatcttcgagcagtacagtaccaacagccttgacacccaggtcgtctgccaaggccacctgccatgcgtcgtggtggacagagaatccatattcacgatccaaagtagcgacagtaccttgccgactgtgtatcctctgccagcaatgtggccaagatttcgccggcggcgaccatggtcggatcccaggtcgcctcgccgagaatcgcgacgttctcgtcgaggggccccagtgctgagtttccctccgtactcaagcccgacatagcagcccctggagtgagcatcttggcagccatgcgtgactcgtacgtgctcctgtccgggacatccatggcatgccctcacgtctccgccgtcgtcgccttgctcaagtcggtccacccggactggtcgcctgccatgatcaagtctgccattgtcaccacagcatcggtgaccgaccgattcggcctgccgatccaagccaactcggtgcagaggaagccggccgacgccttcgacatgggcggcggcctcatagcgccggacagggccatggaccccggcctggtgtacgacatccagccggaggagtacacaagattggacgaccgcgccgaccgcctcaacctcccgtccatcgccgtgtccgacctcaagaactccgtcacggtctcgcgcaccgtcaccaacgtcgggccggcggaggtggcgacgtaccgggccgtggtcgaggcgccggccggcgtcacgatggacgtggagcctccggtgatcgccttcgagagaggcggcgccaggaacgccacgttcagggtgacgttcgtggcgaagcagcgggtgcagggcggctacgcgttcgggagcctgacgtggctggacgacgccaagcggcactcggtgaggatccccgtcgccgttcggaccgtcgtccgggacctcgtcgccgatgtagcttgatggtcgagttcggtttctgggcacgcacatacatgtgttccgcgttgtttacgtgctgtgtttgtctcgcggcgccgattcgatcgggttcttgtaataagaaagatggcgtggaaggaaaaaaatttggtgcagcactgctgcaaactagagtggtttgcagctcctcacaaaaaagaggatagaccccacccgcagcaacaataatacaactaaaacgttatctgctggacctacaggtgg

SEQ ID NO: 27763 - DNA, 2637 bp, Zea Mays
atgggagcagaaggacatgtgcactatcactcgtgcataacactagcagagagagaacataaatccaaagatgggctggagaccacacgttgtctctgtgtcatcttctgcactactagtgctgcttcagctcctcgtgctactgatgctgcccgctgatgcgtcgtcatcaagccaactgttccttgaaagaactcagacgacgacgacgacgatctacgtcgtgtacatgggcgagaagaagcacgacgacccttccctcgtcgtggcgtcgcaccacgccacgctggcctccgttcttgggagcaaggatgaagcactcagctccatagtctacagctacaagcacggattctccggtttcgcggcgaagctcacccagccccaagcggaggagcttaaaaaataccctggagttgtgagcgtgaagccaaacacgtaccaccacgtccacacgactcggagctgggattttcttggcatgagctacggccaacagcagtcgtcgtcgtggtcgtcgtcgtcgcggctccttaggaaggccaagtacggcgaagatgtcatcgtcggcgtcatagactcaggcatctggccggaatcccggagcttcgacgacagcgggtacggctacggccccgtgccgaaacggtggaaaggcgtgtgccagacaggccaggcgttcaacgcgagcaactgcaaccggaaggtcatcggcgcgcggtggtacgccgccgacgtcagcgaggaggacctcaagaacgaatacaggtcgccacgggacgccaacggccacggcacgcacaccgcctccacgatcgccggctcgcccgtgcggaacgcgagccaccacggcggcggcctggccgccggcatagcgcgcggcggggcgccgcgcgcgcggctggcaatatacaaggcctgccacgctgtcggcggcagcgcgagctgcggcgacgcctcgatcctcgcggccctcgatgccgccattggggacggcgtcgacctagtgtccctgtcgctgggaggcttaggcgagatctaccagtcgttgcacgccgtggcggccgggatcaccgtggtgctcgctgcagggaacgatggccccgtggagcagtccctcaacaatgccctgccgtggggcatcacggtggccgccgccaccatggaccgcaccttcccgacagtggtcacgctgggcgacggagagaagctggtggggcaatcactgtattaccacaaccgctcagcggcggcatcgacgagcgacgacgacgacttcgcttggcgccatttgatattattccctagctgcgacgagaagaatctggggtcggaaaacatcaccgggaaaatcgtcatatgccgtgcgccggtgttctggtccgactatcctcctccgcggcagcttagcagggccagccgagccgccatcgccggcggggccaagggcatcatcttcgagcagtacagtaccaacagccttgacacccaggtcgtctgccaaggccacctgccatgcgtcgtggtggacagagaatccatattcacgatccaaagtagcgacagtaccttgccgactgtgtatcctctgccagcaatgtggccaagatttcgccggcggcgaccatggtcggatcccaggtcgcctcgccgagaatcgcgacgttctcgtcgaggggccccagtgctgagtttccctccgtactcaagcccgacatagcagcccctggagtgagcatcttggcagccatgcgtgactcgtacgtgctcctgtccgggacatccatggcatgccctcacgtctccgccgtcgtcgccttgctcaagtcggtccacccggactggtcgcctgccatgatcaagtctgccattgtcaccacagcatcggtgaccgaccgattcggcctgccgatccaagccaactcggtgcagaggaagccggccgacgccttcgacatgggcggcggcctcatagcgccggacagggccatggaccccggcctggtgtacgacatccagccggaggagtacacaagattggacgaccgcgccgaccgcctcaacctcccgtccatcgccgtgtccgacctcaagaactccgtcacggtctcgcgcaccgtcaccaacgtcgggccggcggaggtggcgacgtaccgggccgtggtcgaggcgccggccggcgtcacgatggacgtggagcctccggtgatcgccttcgagagaggcggcgccaggaacgccacgttcagggtgacgttcgtggcgaagcagcgggtgcagggcggctacgcgttcgggagcctgacgtggctggacgacgccaagcggcactcggtgaggatccccgtcgccgttcggaccgtcgtccgggacctcgtcgccgatgtagcttgatggtcgagttcggtttctgggcacgcacatacatgtgttccgcgttgtttacgtgctgtgtttgtctcgcggcgccgattcgatcgggttcttgtaataagaaagatggcgtggaaggaaaaaaatttggtgcagcactgctgcaaactagagtggtttgcagctcctcacaaaaaagaggatagaccccacccgcagcaacaataatacaactaaaacgttatctgctggacctacaggtgg

SEQ ID NO: 27764 - DNA, 5984 bp, Zea Mays
ggactttctcctgcgacgcgtgcatgaaacagacacgcagtcgtaatttaaatttaaccgactccacgggcgcgtaaaatggcaaaccaacccagaacccagccccgaaaatgcaccgcgccgccgccgccaccgtggcggcgccgcaggcgaccgacgcgcagctcctggcgggcgcggtggaggcggcgatcgccacccgatccgcgcggctcggccgagcggcccacgcgcgcgcgctcaggctgctgtccccggcgctcccgcccttcctctgcgcgcacctcgtcaacctctactccaagctcgacctcccgggcgccgccgccgcgtcgctggccgccgaccccagccccaccgtggtgtcctacacggccttcatctcgggcgcggcgcagcacgcgcgcccgctccaggcgctctcggcgttcgccgccatgctccggctcggcctccgccccaacgacttcacgttcccttccgccttcaaggccgccgcctccgcgccgccgcgcagcgccgccggaacgcagctgcacgccctcgcgctcaggttcggatacctccccgacgacgccttcgtctcgtgcgcggcgctggacatgtacttcaagacgggctgcctcgcgctggcgcgccgcctgttcgacgaaatgcccaacaggaacgtggtcgcctggaacgcggtcatgaccaatgcggtgctcgacggccgcccccttgagacggtcgaggcctactttgggctccggggtgctggtgggatgccgaacgtggtctcggtctgtgcgttcttcaacgcgtgcgctggtatgacgaacctgtcccttggggagcagttctatggttttgtggccaagtgcggctttggcaaggatgtctccgtgtccaattctgtggtggatttttatgggaagtgccgttgcgtggggaaggccagggcggtgtttgatgggatgggagttcggaacaacgtgtcctggtgttctatggttgttgcatatgcgcagaatggggcagaggaggaggctttctttgtctacttgggtgcaaggagagctggggaagagccgactgacttcatggtttccagtgtgctcaccacatgtgcaggcctgctaggacttgaccttgggcgtgctctgcatgcagttgctgtccgttcctgcattgattcaaacatttttgttgcaagtgccttggttgacatgtatgggaagtgtggcggaatcgaagatgctgagcaggtctttttcgagatgccacagcggaatcttgtcacatggaatgcgatgataggaggttatgctcatattggtgatgctcacaatgcactttctgtgtttgataaaatgataatgggtcaagaaacagcacctaactacatcacacttgtcaatgttctcacggcatgcagcagaggaggtttgacaaaggaagggtatgagttgttccagacaatgaagtggaggtttgggattgaaccaagaattgagcattatgcttgtgtggtggacttgctttgccgtgcaggaatggaagagcgagcttataagatcatacaggggatgccaatgagaccttccatttctgtctggggagcactacttggggggtgcaagatgcatgggaagacagaactaggaaggattgctgctgagaagttgtttgaacttgatcctcaggattcaggcaatcatgttttgctctcaaacatgcttgcatctgctggcaggtgggcagaagcaacggatgtgagaaaggagatgaagaatgttgggatcaagaaggacccagggcgcagttggatcacttggaaaaatgttgtccatgttttccaggctaaggatacaacacatgatatgaatagggagatccaggcattgttggccaagctcaaagggcaaatgcaagctgctggatacatgccagacacacaatatgctctctatgatcttgaggaagaagagaaagaatcagaagtgtttcaacacagtgaaaagcttgctctggcttttggattgatatgtataccacctggcatacctataaggatcatgaagaatctgcgaatttgtgtagattgccaccgggcttttaaattcatatctggtattgctggtagggagataattgtgcgggacaacaatatgtttcatcacttcaaaaattatgagtgttcatgcaaggattattggtgaaagttgtatccacaagatatactgatgcatgttttgttggcatctctagaagcacctctgcagatatagaaggctttcagcagtgggctgcattgcatgatcacagtaggacccacatggtaagtgagacaaggtacaattttgaagtttgaaatgatactagaggagtttttgctttatattaacacaagtgatctttatatggtacaagaaattccaactgagattcaaatgttgattcacatttattgatgcaatcattttttaaagaacatgcaaacatgctgaaatcataccttctagcatgtattgcaatctttagccaccttcagtccagctacagcctagtctcaagtccagttattttgacatcgacaactttgtacttctccggttctcccagttgaaacataaaaccagccagcatcttatagttatctctgttttctggatccaaggacaacagatgcctacctgctgcttctccaatcaccaaaatgtcccccacaatatagggtttcttgcatgttcagagtgggaactctggatcatatgatatgcatcactcaagcgtacagtacgacagcatatcaacgacacatgaaatatgctctataactagctcccgcctgcacatatctactggctccagagaaagggaggcagtgacgaggggcagatggaggtagtggtggagaagggcaacgacctccacatggcggccgtgtctacctcaggttctgctgctgccgactggcctccataatttgaatccccactggtctgatcatgcttaaaacttctccaacgcccgcaaggacttggctcaggttttacggtggatggggaaaaaaaatctggaccgtcttttgtttcagatcggagcatatccgctactacaggatggatgtgcacactacactacacggtaggtaattcgtcaaatcatgctcgcgcgcggggaaaagcagatgggttgttttggctgtgtggcctgctttggcattgcaaagaggagggctaccccccagcaaacccggcccgcatcgactggcatacttgatgcccatgtttagtacacaaaagtccattattcgtgtagctagtacagtatcacacacaggctgcttgcaacaacaatggtccaagactgctgcttgttgctatatatacgcatgggagcagaaggacatgtgcactatcactcgtgcataacactagcagagagagaacataaatccaaagatgggctggagaccacacgttgtctctgtgtcatcttctgcactactagtgctgcttcagctcctcgtgctactgatgctgcccgctgatgcgtcgtcatcaagccaactgttccttgaaagaactcagacgacgacgacgacgatctacgtcgtgtacatgggcgagaagaagcacgacgacccttccctcgtcgtggcgtcgcaccacgccacgctggcctccgttcttgggagcaaggatgaagcactcagctccatagtctacagctacaagcacggattctccggtttcgcggcgaagctcacccagccccaagcggaggagcttaaaaaataccctggagttgtgagcgtgaagccaaacacgtaccaccacgtccacacgactcggagctgggattttcttggcatgagctacggccaacagcagtcgtcgtcgtggtcgtcgtcgtcgcggctccttaggaaggccaagtacggcgaagatgtcatcgtcggcgtcatagactcaggcatctggccggaatcccggagcttcgacgacagcgggtacggctacggccccgtgccgaaacggtggaaaggcgtgtgccagacaggccaggcgttcaacgcgagcaactgcaaccggaaggtcatcggcgcgcggtggtacgccgccgacgtcagcgaggaggacctcaagaacgaatacaggtcgccacgggacgccaacggccacggcacgcacaccgcctccacgatcgccggctcgcccgtgcggaacgcgagccaccacggcggcggcctggccgccggcatagcgcgcggcggggcgccgcgcgcgcggctggcaatatacaaggcctgccacgctgtcggcggcagcgcgagctgcggcgacgcctcgatcctcgcggccctcgatgccgccattggggacggcgtcgacctagtgtccctgtcgctgggaggcttaggcgagatctaccagtcgttgcacgccgtggcggccgggatcaccgtggtgctcgctgcagggaacgatggccccgtggagcagtccctcaacaatgccctgccgtggggcatcacggtggccgccgccaccatggaccgcaccttcccgacagtggtcacgctgggcgacggagagaagctggtggggcaatcactgtattaccacaaccgctcagcggcggcatcgacgagcgacgacgacgacttcgcttggcgccatttgatattattccctagctgcgacgagaagaatctggggtcggaaaacatcaccgggaaaatcgtcatatgccgtgcgccggtgttctggtccgactatcctcctccgcggcagcttagcagggccagccgagccgccatcgccggcggggccaagggcatcatcttcgagcagtacagtaccaacagccttgacacccaggtcgtctgccaaggccacctgccatgcgtcgtggtggacagagaatccatattcacgatccaaagtagcgacagcaatgtggccaagatttcgccggcggcgaccatggtcggatcccaggtcgcctcgccgagaatcgcgacgttctcgtcgaggggccccagtgctgagtttccctccgtactcaagcccgacatagcagcccctggagtgagcatcttggcagccatgcgtgactcgtacgtgctcctgtccgggacatccatggcatgccctcacgtctccgccgtcgtcgccttgctcaagtcggtccacccggactggtcgcctgccatgatcaagtctgccattgtcaccacagcatcggtgaccgaccgattcggcctgccgatccaagccaactcggtgcagaggaagccggccgacgccttcgacatgggcggcggcctcatagcgccggacagggccatggaccccggcctggtgtacgacatccagccggaggagtacacaagattggacgaccgcgccgaccgcctcaacctcccgtccatcgccgtgtccgacctcaagaactccgtcacggtctcgcgcaccgtcaccaacgtcgggccggcggaggtggcgacgtaccgggccgtggtcgaggcgccggccggcgtcacgatggacgtggagcctccggtgatcgccttcgagagaggcggcgccaggaacgccacgttcagggtgacgttcgtggcgaagcagcgggtgcagggcggctacgcgttcgggagcctgacgtggctggacgacgccaagcggcactcggtgaggatccccgtcgccgttcggaccgtcgtccgggacctcgtcgccgatgtagcttgatggtcgagttcggtttctgggcacgcacatacatgtgttccgcgttgtttacgtgctgtgtttgtctcgcggcgccgattcgatcgggttcttgtaataagaaagatggcgtggaaggaaaaaaatttggtgcagcactgctgcaaactagagtggtttgcagctcctcacaaaaaagaggatagaccccacccgcagcaacaataatacaactaaaacgttatctgctggacctacaggtgg

SEQ ID NO: 27765 - DNA, 6522 bp, Zea Mays
ggactttctcctgcgacgcgtgcatgaaacagacacgcagtcgtaatttaaatttaaccgactccacgggcgcgtaaaatggcaaaccaacccagaacccagccccgaaaatgcaccgcgccgccgccgccaccgtggcggcgccgcaggcgaccgacgcgcagctcctggcgggcgcggtggaggcggcgatcgccacccgatccgcgcggctcggccgagcggcccacgcgcgcgcgctcaggctgctgtccccggcgctcccgcccttcctctgcgcgcacctcgtcaacctctactccaagctcgacctcccgggcgccgccgccgcgtcgctggccgccgaccccagccccaccgtggtgtcctacacggccttcatctcgggcgcggcgcagcacgcgcgcccgctccaggcgctctcggcgttcgccgccatgctccggctcggcctccgccccaacgacttcacgttcccttccgccttcaaggccgccgcctccgcgccgccgcgcagcgccgccggaacgcagctgcacgccctcgcgctcaggttcggatacctccccgacgacgccttcgtctcgtgcgcggcgctggacatgtacttcaagacgggctgcctcgcgctggcgcgccgcctgttcgacgaaatgcccaacaggaacgtggtcgcctggaacgcggtcatgaccaatgcggtgctcgacggccgcccccttgagacggtcgaggcctactttgggctccggggtgctggtgggatgccgaacgtggtctcggtctgtgcgttcttcaacgcgtgcgctggtatgacgaacctgtcccttggggagcagttctatggttttgtggccaagtgcggctttggcaaggatgtctccgtgtccaattctgtggtggatttttatgggaagtgccgttgcgtggggaaggccagggcggtgtttgatgggatgggagttcggaacaacgtgtcctggtgttctatggttgttgcatatgcgcagaatggggcagaggaggaggctttctttgtctacttgggtgcaaggagagctggggaagagccgactgacttcatggtttccagtgtgctcaccacatgtgcaggcctgctaggacttgaccttgggcgtgctctgcatgcagttgctgtccgttcctgcattgattcaaacatttttgttgcaagtgccttggttgacatgtatgggaagtgtggcggaatcgaagatgctgagcaggtctttttcgagatgccacagcggaatcttgtcacatggaatgcgatgataggaggttatgctcatattggtgatgctcacaatgcactttctgtgtttgataaaatgataatgggtcaagaaacagcacctaactacatcacacttgtcaatgttctcacggcatgcagcagaggaggtttgacaaaggaagggtatgagttgttccagacaatgaagtggaggtttgggattgaaccaagaattgagcattatgcttgtgtggtggacttgctttgccgtgcaggaatggaagagcgagcttataagatcatacaggggatgccaatgagaccttccatttctgtctggggagcactacttggggggtgcaagatgcatgggaagacagaactaggaaggattgctgctgagaagttgtttgaacttgatcctcaggattcaggcaatcatgttttgctctcaaacatgcttgcatctgctggcaggtgggcagaagcaacggatgtgagaaaggagatgaagaatgttgggatcaagaaggacccagggcgcagttggatcacttggaaaaatgttgtccatgttttccaggctaaggatacaacacatgatatgaatagggagatccaggcattgttggccaagctcaaagggcaaatgcaagctgctggatacatgccagacacacaatatgctctctatgatcttgaggaagaagagaaagaatcagaagtgtttcaacacagtgaaaagcttgctctggcttttggattgatatgtataccacctggcatacctataaggatcatgaagaatctgcgaatttgtgtagattgccaccgggcttttaaattcatatctggtattgctggtagggagataattgtgcgggacaacaatatgtttcatcacttcaaaaattatgagtgttcatgcaaggattattggtgaaagttgtatccacaagatatactgatgcatgttttgttggcatctctagaagcacctctgcagatatagaaggctttcagcagtgggctgcattgcatgatcacagtaggacccacatgatgcctacctgctgcttctccaatcaccaaaatgtcccccacaatatagggtttcttgcatgttcagagtgggaactctggatcatatgatatgcatcactcaagcgtacagtacgacagcatatcaacgacacatgaaatatgctctataactagctcccgcctgcacatatctactggctccagagaaagggaggcagtgacgaggggcagatggaggtagtggtggagaagggcaacgacctccacatggcggccgtgtctacctcaggttctgctgctgccgactggcctccataatttgaatccccactggtctgatcatgcttaaaacttctccaacgcccgcaaggacttggctcaggttttacggtggatggggaaaaaaaatctggaccgtcttttgtttcagatcggagcatatccgctactacaggatggatgtgcacactacactacacggtaggtaattcgtcaaatcatgctcgcgcgcggggaaaagcagatgggttgttttggctgtgtggcctgctttggcattgcaaaggtgtgtactgcttgcgactttggcatatatttcgatttcatgcgcatgtggtttgatgctttttattgtggtctgtggtagtatgctatccatgcatgagatatatctgatcatgcttatacgcatgcgcattatagtcccagccagcactagctaggctttacatagcataataattaacctaagccagagcgtaaatatacaagccagaataatagctgcacagggtactttaagcattgtgtgtttttttttaaaaaaattcctggcagccaaaatcctctcgagcggtcgagcctaatatctaactcaagactgtttgaattacgataattccaaagttgattaattttttttaggacagatagaaatgcctccttttatgttgtctaacccactgctatccccacgcgttgagattcatcggaacactccgatacatcgtccattattgaacgaccaaatgattccccgggccccgcgcgcacaccaatctgcaagcattttggatgctgccctcccagtgcggagagcttatgagtagctcaaagatttcttcagcgcttgctgtgaatagactgtgcatgtgatagccattacccatttgaaaaagttttttagtacgaaagaatactaattgtggtatgtataatcctatttaataaactgtctcttgaatagtttctaggggttatataaaaaatacaagagacaagaacccgttgaaagcttagggttgtatcataccatttattagctgtctcttgtgctttaaaagccgatccaagatctctaggttgtacgtacatgcccctgtgaatttctactcatactaagtttcttttcgtttcttgctgtaataactgcttagtcgatgcatagatatgtgtcttttgcagaggagggctaccccccagcaaacccggcccgcatcgactggcatacttgatgcccatgtttagtacacaaaagtccattattcgtgtagctagtacagtatcacacacaggctgcttgcaacaacaatggtccaagactgctgcttgttgctatatatacgcatgggagcagaaggacatgtgcactatcactcgtgcataacactagcagagagagaacataaatccaaagatgggctggagaccacacgttgtctctgtgtcatcttctgcactactagtgctgcttcagctcctcgtgctactgatgctgcccgctgatgcgtcgtcatcaagccaaaactcagacgacgacgacgacgatctacgtcgtgtacatgggcgagaagaagcacgacgacccttccctcgtcgtggcgtcgcaccacgccacgctggcctccgttcttgggagcaaggatgaagcactcagctccatagtctacagctacaagcacggattctccggtttcgcggcgaagctcacccagccccaagcggaggagcttaaaaaataccctggagttgtgagcgtgaagccaaacacgtaccaccacgtccacacgactcggagctgggattttcttggcatgagctacggccaacagcagtcgtcgtcgtggtcgtcgtcgtcgcggctccttaggaaggccaagtacggcgaagatgtcatcgtcggcgtcatagactcaggcatctggccggaatcccggagcttcgacgacagcgggtacggctacggccccgtgccgaaacggtggaaaggcgtgtgccagacaggccaggcgttcaacgcgagcaactgcaaccggaaggtcatcggcgcgcggtggtacgccgccgacgtcagcgaggaggacctcaagaacgaatacaggtcgccacgggacgccaacggccacggcacgcacaccgcctccacgatcgccggctcgcccgtgcggaacgcgagccaccacggcggcggcctggccgccggcatagcgcgcggcggggcgccgcgcgcgcggctggcaatatacaaggcctgccacgctgtcggcggcagcgcgagctgcggcgacgcctcgatcctcgcggccctcgatgccgccattggggacggcgtcgacctagtgtccctgtcgctgggaggcttaggcgagatctaccagtcgttgcacgccgtggcggccgggatcaccgtggtgctcgctgcagggaacgatggccccgtggagcagtccctcaacaatgccctgccgtggggcatcacggtggccgccgccaccatggaccgcaccttcccgacagtggtcacgctgggcgacggagagaagctggtggggcaatcactgtattaccacaaccgctcagcggcggcatcgacgagcgacgacgacgacttcgcttggcgccatttgatattattccctagctgcgacgagaagaatctggggtcggaaaacatcaccgggaaaatcgtcatatgccgtgcgccggtgttctggtccgactatcctcctccgcggcagcttagcagggccagccgagccgccatcgccggcggggccaagggcatcatcttcgagcagtacagtaccaacagccttgacacccaggtcgtctgccaaggccacctgccatgcgtcgtggtggacagagaatccatattcacgatccaaagtagcgacagcaatgtggccaagatttcgccggcggcgaccatggtcggatcccaggtcgcctcgccgagaatcgcgacgttctcgtcgaggggccccagtgctgagtttccctccgtactcaagcccgacatagcagcccctggagtgagcatcttggcagccatgcgtgactcgtacgtgctcctgtccgggacatccatggcatgccctcacgtctccgccgtcgtcgccttgctcaagtcggtccacccggactggtcgcctgccatgatcaagtctgccattgtcaccacagcatcggtgaccgaccgattcggcctgccgatccaagccaactcggtgcagaggaagccggccgacgccttcgacatgggcggcggcctcatagcgccggacagggccatggaccccggcctggtgtacgacatccagccggaggagtacacaagattggacgaccgcgccgaccgcctcaacctcccgtccatcgccgtgtccgacctcaagaactccgtcacggtctcgcgcaccgtcaccaacgtcgggccggcggaggtggcgacgtaccgggccgtggtcgaggcgccggccggcgtcacgatggacgtggagcctccggtgatcgccttcgagagaggcggcgccaggaacgccacgttcagggtgacgttcgtggcgaagcagcgggtgcagggcggctacgcgttcgggagcctgacgtggctggacgacgccaagcggcactcggtgaggatccccgtcgccgttcggaccgtcgtccgggacctcgtcgccgatgtagcttgatggtcgagttcggtttctgggcacgcacatacatgtgttccgcgttgtttacgtgctgtgtttgtctcgcggcgccgattcgatcgggttcttgtaataagaaagatggcgtggaaggaaaaaaatttggtgcagcactgctgcaaactagagtggtttgcagctcctcacaaaaaagaggatagaccccacccgcagcaacaataatacaactaaaacgttatctgctggacctacaggtgg

SEQ ID NO: 27766 - DNA, 6414 bp, Zea Mays
cttttccagagttgaggtgagtgccggagaaacatgggaggttgtttggtttcggatttgcatctggatttggaagagcaaaaggactttctcctgcgacgcgtgcatgaaacagacacgcagtcgtaatttaaatttaaccgactccacgggcgcgtaaaatggcaaaccaacccagaacccagccccgaaaatgcaccgcgccgccgccgccaccgtggcggcgccgcaggcgaccgacgcgcagctcctggcgggcgcggtggaggcggcgatcgccacccgatccgcgcggctcggccgagcggcccacgcgcgcgcgctcaggctgctgtccccggcgctcccgcccttcctctgcgcgcacctcgtcaacctctactccaagctcgacctcccgggcgccgccgccgcgtcgctggccgccgaccccagccccaccgtggtgtcctacacggccttcatctcgggcgcggcgcagcacgcgcgcccgctccaggcgctctcggcgttcgccgccatgctccggctcggcctccgccccaacgacttcacgttcccttccgccttcaaggccgccgcctccgcgccgccgcgcagcgccgccggaacgcagctgcacgccctcgcgctcaggttcggatacctccccgacgacgccttcgtctcgtgcgcggcgctggacatgtacttcaagacgggctgcctcgcgctggcgcgccgcctgttcgacgaaatgcccaacaggaacgtggtcgcctggaacgcggtcatgaccaatgcggtgctcgacggccgcccccttgagacggtcgaggcctactttgggctccggggtgctggtgggatgccgaacgtggtctcggtctgtgcgttcttcaacgcgtgcgctggtatgacgaacctgtcccttggggagcagttctatggttttgtggccaagtgcggctttggcaaggatgtctccgtgtccaattctgtggtggatttttatgggaagtgccgttgcgtggggaaggccagggcggtgtttgatgggatgggagttcggaacaacgtgtcctggtgttctatggttgttgcatatgcgcagaatggggcagaggaggaggctttctttgtctacttgggtgcaaggagagctggggaagagccgactgacttcatggtttccagtgtgctcaccacatgtgcaggcctgctaggacttgaccttgggcgtgctctgcatgcagttgctgtccgttcctgcattgattcaaacatttttgttgcaagtgccttggttgacatgtatgggaagtgtggcggaatcgaagatgctgagcaggtctttttcgagatgccacagcggaatcttgtcacatggaatgcgatgataggaggttatgctcatattggtgatgctcacaatgcactttctgtgtttgataaaatgataatgggtcaagaaacagcacctaactacatcacacttgtcaatgttctcacggcatgcagcagaggaggtttgacaaaggaagggtatgagttgttccagacaatgaagtggaggtttgggattgaaccaagaattgagcattatgcttgtgtggtggacttgctttgccgtgcaggaatggaagagcgagcttataagatcatacaggggatgccaatgagaccttccatttctgtctggggagcactacttggggggtgcaagatgcatgggaagacagaactaggaaggattgctgctgagaagttgtttgaacttgatcctcaggattcaggcaatcatgttttgctctcaaacatgcttgcatctgctggcaggtgggcagaagcaacggatgtgagaaaggagatgaagaatgttgggatcaagaaggacccagggcgcagttggatcacttggaaaaatgttgtccatgttttccaggctaaggatacaacacatgatatgaatagggagatccaggcattgttggccaagctcaaagggcaaatgcaagctgctggatacatgccagacacacaatatgctctctatgatcttgaggaagaagagaaagaatcagaagtgtttcaacacagtgaaaagcttgctctggcttttggattgatatgtataccacctggcatacctataaggatcatgaagaatctgcgaatttgtgtagattgccaccgggcttttaaattcatatctggtattgctggtagggagataattgtgcgggacaacaatatgtttcatcacttcaaaaattatgagtgttcatgcaaggattattggtgaaagttgtatccacaagatatactgatgcatgttttgttggcatctctagaagcacctctgcagatatagaaggctttcagcagtgggctgcattgcatgatcacagtaggacccacatggacaacagatgcctacctgctgcttctccaatcaccaaaatgtcccccacaatatagggtttcttgcatgttcagagtgggaactctggatcatatgatatgcatcactcaagcgtacagtacgacagcatatcaacgacacatgaaatatgctctataactagctcccgcctgcacatatctactggctccagagaaagggaggcagtgacgaggggcagatggaggtagtggtggagaagggcaacgacctccacatggcggccgtgtctacctcaggttctgctgctgccgactggcctccataatttgaatccccactggtctgatcatgcttaaaacttctccaacgcccgcaaggacttggctcaggttttacggtggatggggaaaaaaaatctggaccgtcttttgtttcagatcggagcatatccgctactacaggatggatgtgcacactacactacacggtaggtaattcgtcaaatcatgctcgcgcgcggggaaaagcagatgggttgttttggctgtgtggcctgctttggcattgcaaaggtgtgtactgcttgcgactttggcatatatttcgatttcatgcgcatgtggtttgatgctttttattgtggtctgtggtagtatgctatccatgcatgagatatatctgatcatgcttatacgcatgcgcattatagtcccagccagcactagctaggctttacatagcataataattaacctaagccagagcgtaaatatacaagccagaataatagctgcacagggtactttaagcattgtgtgtttttttttaaaaaaattcctggcagccaaaatcctctcgagcggtcgagcctaatatctaactcaagactgtttgaattacgataattccaaagttgattaattttttttaggacagatagaaatgcctccttttatgttgtctaacccactgctatccccacgcgttgagattcatcggaacactccgatacatcgtccattattgaacgaccaaatgattccccgggccccgcgcgcacaccaatctgcaagcattttggatgctgccctcccagtgcggagagcttatgagtagctcaaagatttcttcagcgcttgctgtgaatagactgtgcatgtgatagccattacccatttgaaaaagttttttagtacgaaagaatactaattgtggtatgtataatcctatttaataaactgtctcttgaatagtttctaggggttatataaaaaatacaagagacaagaacccgttgaaagcttagggttgtatcataccatttattagctgtctcttgtgctttaaaagccgatccaagatctctaggttgtacgtacatgcccctgtgaatttctactcatactaagtttcttttcgtttcttgctgtaataactgcttagtcgatgcatagatatgtgtcttttgcagaggagggctaccccccagcaaacccggcccgcatcgactggcatacttgatgcccatgtttagtacacaaaagtccattattcgtgtagctagtacagtatcacacacaggctgcttgcaacaacaatggtccaagactgctgcttgttgctatatatacgcatgggagcagaaggacatgtgcactatcactcgtgcataacactagcagagagagaacataaatccaaagatgggctggagaccacacgttgtctctgtgtcatcttctgcactactagtgctgcttcagctcctcgtgctactgatgctgcccgctgatgcgtcgtcatcaagccaaaactcagacgacgacgacgacgatctacgtcgtgtacatgggcgagaagaagcacgacgacccttccctcgtcgtggcgtcgcaccacgccacgctggcctccgttcttgggaggcatctggccggaatcccggagcttcgacgacagcgggtacggctacggccccgtgccgaaacggtggaaaggcgtgtgccagacaggccaggcgttcaacgcgagcaactgcaaccggaaggtcatcggcgcgcggtggtacgccgccgacgtcagcgaggaggacctcaagaacgaatacaggtcgccacgggacgccaacggccacggcacgcacaccgcctccacgatcgccggctcgcccgtgcggaacgcgagccaccacggcggcggcctggccgccggcatagcgcgcggcggggcgccgcgcgcgcggctggcaatatacaaggcctgccacgctgtcggcggcagcgcgagctgcggcgacgcctcgatcctcgcggccctcgatgccgccattggggacggcgtcgacctagtgtccctgtcgctgggaggcttaggcgagatctaccagtcgttgcacgccgtggcggccgggatcaccgtggtgctcgctgcagggaacgatggccccgtggagcagtccctcaacaatgccctgccgtggggcatcacggtggccgccgccaccatggaccgcaccttcccgacagtggtcacgctgggcgacggagagaagctggtggggcaatcactgtattaccacaaccgctcagcggcggcatcgacgagcgacgacgacgacttcgcttggcgccatttgatattattccctagctgcgacgagaagaatctggggtcggaaaacatcaccgggaaaatcgtcatatgccgtgcgccggtgttctggtccgactatcctcctccgcggcagcttagcagggccagccgagccgccatcgccggcggggccaagggcatcatcttcgagcagtacagtaccaacagccttgacacccaggtcgtctgccaaggccacctgccatgcgtcgtggtggacagagaatccatattcacgatccaaagtagcgacagcaatgtggccaagatttcgccggcggcgaccatggtcggatcccaggtcgcctcgccgagaatcgcgacgttctcgtcgaggggccccagtgctgagtttccctccgtactcaaggtgatgtacatgtgtattcgatcgctgctgcctgttatacatacatatcacaacgtgtctctgtttgggcggacggcagcccgacatagcagcccctggagtgagcatcttggcagccatgcgtgactcgtacgtgctcctgtccgggacatccatggcatgccctcacgtctccgccgtcgtcgccttgctcaagtcggtccacccggactggtcgcctgccatgatcaagtctgccattgtcaccacagcatcggtgaccgaccgattcggcctgccgatccaagccaactcggtgcagaggaagccggccgacgccttcgacatgggcggcggcctcatagcgccggacagggccatggaccccggcctggtgtacgacatccagccggaggagtacacaagattggacgaccgcgccgaccgcctcaacctcccgtccatcgccgtgtccgacctcaagaactccgtcacggtctcgcgcaccgtcaccaacgtcgggccggcggaggtggcgacgtaccgggccgtggtcgaggcgccggccggcgtcacgatggacgtggagcctccggtgatcgccttcgagagaggcggcgccaggaacgccacgttcagggtgacgttcgtggcgaagcagcgggtgcagggcggctacgcgttcgggagcctgacgtggctggacgacgccaagcggcactcggtgaggatccccgtcgccgttcggaccgtcgtccgggacctcgtcgccgatgtagcttgatggtcgagttcggtttctgggcacgcacatacatgtgttccgcgttgtttacgtgctgtgtttgtctcgcggcgccgattcgatcgggttcttgtaataagaaagatggcgtggaaggaaaaaaatttggtgcagcactgctgcaaactagagtggtttgcagctcctcacaaaaaagaggatagaccccacccgcagcaacaataatacaactaaaacgttatctgctggacctacaggtgg

SEQ ID NO: 27767 - DNA, 6606 bp, Zea Mays
cttttccagagttgaggtgagtgccggagaaacatgggaggttgtttggtttcggatttgcatctggatttggaagagcaaaaggactttctcctgcgacgcgtgcatgaaacagacacgcagtcgtaatttaaatttaaccgactccacgggcgcgtaaaatggcaaaccaacccagaacccagccccgaaaatgcaccgcgccgccgccgccaccgtggcggcgccgcaggcgaccgacgcgcagctcctggcgggcgcggtggaggcggcgatcgccacccgatccgcgcggctcggccgagcggcccacgcgcgcgcgctcaggctgctgtccccggcgctcccgcccttcctctgcgcgcacctcgtcaacctctactccaagctcgacctcccgggcgccgccgccgcgtcgctggccgccgaccccagccccaccgtggtgtcctacacggccttcatctcgggcgcggcgcagcacgcgcgcccgctccaggcgctctcggcgttcgccgccatgctccggctcggcctccgccccaacgacttcacgttcccttccgccttcaaggccgccgcctccgcgccgccgcgcagcgccgccggaacgcagctgcacgccctcgcgctcaggttcggatacctccccgacgacgccttcgtctcgtgcgcggcgctggacatgtacttcaagacgggctgcctcgcgctggcgcgccgcctgttcgacgaaatgcccaacaggaacgtggtcgcctggaacgcggtcatgaccaatgcggtgctcgacggccgcccccttgagacggtcgaggcctactttgggctccggggtgctggtgggatgccgaacgtggtctcggtctgtgcgttcttcaacgcgtgcgctggtatgacgaacctgtcccttggggagcagttctatggttttgtggccaagtgcggctttggcaaggatgtctccgtgtccaattctgtggtggatttttatgggaagtgccgttgcgtggggaaggccagggcggtgtttgatgggatgggagttcggaacaacgtgtcctggtgttctatggttgttgcatatgcgcagaatggggcagaggaggaggctttctttgtctacttgggtgcaaggagagctggggaagagccgactgacttcatggtttccagtgtgctcaccacatgtgcaggcctgctaggacttgaccttgggcgtgctctgcatgcagttgctgtccgttcctgcattgattcaaacatttttgttgcaagtgccttggttgacatgtatgggaagtgtggcggaatcgaagatgctgagcaggtctttttcgagatgccacagcggaatcttgtcacatggaatgcgatgataggaggttatgctcatattggtgatgctcacaatgcactttctgtgtttgataaaatgataatgggtcaagaaacagcacctaactacatcacacttgtcaatgttctcacggcatgcagcagaggaggtttgacaaaggaagggtatgagttgttccagacaatgaagtggaggtttgggattgaaccaagaattgagcattatgcttgtgtggtggacttgctttgccgtgcaggaatggaagagcgagcttataagatcatacaggggatgccaatgagaccttccatttctgtctggggagcactacttggggggtgcaagatgcatgggaagacagaactaggaaggattgctgctgagaagttgtttgaacttgatcctcaggattcaggcaatcatgttttgctctcaaacatgcttgcatctgctggcaggtgggcagaagcaacggatgtgagaaaggagatgaagaatgttgggatcaagaaggacccagggcgcagttggatcacttggaaaaatgttgtccatgttttccaggctaaggatacaacacatgatatgaatagggagatccaggcattgttggccaagctcaaagggcaaatgcaagctgctggatacatgccagacacacaatatgctctctatgatcttgaggaagaagagaaagaatcagaagtgtttcaacacagtgaaaagcttgctctggcttttggattgatatgtataccacctggcatacctataaggatcatgaagaatctgcgaatttgtgtagattgccaccgggcttttaaattcatatctggtattgctggtagggagataattgtgcgggacaacaatatgtttcatcacttcaaaaattatgagtgttcatgcaaggattattggtgaaagttgtatccacaagatatactgatgcatgttttgttggcatctctagaagcacctctgcagatatagaaggctttcagcagtgggctgcattgcatgatcacagtaggacccacatggacaacagatgcctacctgctgcttctccaatcaccaaaatgtcccccacaatatagggtttcttgcatgttcagagtgggaactctggatcatatgatatgcatcactcaagcgtacagtacgacagcatatcaacgacacatgaaatatgctctataactagctcccgcctgcacatatctactggctccagagaaagggaggcagtgacgaggggcagatggaggtagtggtggagaagggcaacgacctccacatggcggccgtgtctacctcaggttctgctgctgccgactggcctccataatttgaatccccactggtctgatcatgcttaaaacttctccaacgcccgcaaggacttggctcaggttttacggtggatggggaaaaaaaatctggaccgtcttttgtttcagatcggagcatatccgctactacaggatggatgtgcacactacactacacggtaggtaattcgtcaaatcatgctcgcgcgcggggaaaagcagatgggttgttttggctgtgtggcctgctttggcattgcaaaggtgtgtactgcttgcgactttggcatatatttcgatttcatgcgcatgtggtttgatgctttttattgtggtctgtggtagtatgctatccatgcatgagatatatctgatcatgcttatacgcatgcgcattatagtcccagccagcactagctaggctttacatagcataataattaacctaagccagagcgtaaatatacaagccagaataatagctgcacagggtactttaagcattgtgtgtttttttttaaaaaaattcctggcagccaaaatcctctcgagcggtcgagcctaatatctaactcaagactgtttgaattacgataattccaaagttgattaattttttttaggacagatagaaatgcctccttttatgttgtctaacccactgctatccccacgcgttgagattcatcggaacactccgatacatcgtccattattgaacgaccaaatgattccccgggccccgcgcgcacaccaatctgcaagcattttggatgctgccctcccagtgcggagagcttatgagtagctcaaagatttcttcagcgcttgctgtgaatagactgtgcatgtgatagccattacccatttgaaaaagttttttagtacgaaagaatactaattgtggtatgtataatcctatttaataaactgtctcttgaatagtttctaggggttatataaaaaatacaagagacaagaacccgttgaaagcttagggttgtatcataccatttattagctgtctcttgtgctttaaaagccgatccaagatctctaggttgtacgtacatgcccctgtgaatttctactcatactaagtttcttttcgtttcttgctgtaataactgcttagtcgatgcatagatatgtgtcttttgcagaggagggctaccccccagcaaacccggcccgcatcgactggcatacttgatgcccatgtttagtacacaaaagtccattattcgtgtagctagtacagtatcacacacaggctgcttgcaacaacaatggtccaagactgctgcttgttgctatatatacgcatgggagcagaaggacatgtgcactatcactcgtgcataacactagcagagagagaacataaatccaaagatgggctggagaccacacgttgtctctgtgtcatcttctgcactactagtgctgcttcagctcctcgtgctactgatgctgcccgctgatgcgtcgtcatcaagccaaacgacgacgacgacgatctacgtcgtgtacatgggcgagaagaagcacgacgacccttccctcgtcgtggcgtcgcaccacgccacgctggcctccgttcttgggagcaaggatgaagcactcagctccatagtctacagctacaagcacggattctccggtttcgcggcgaagctcacccagccccaagcggaggagcttaaaaaataccctggagttgtgagcgtgaagccaaacacgtaccaccacgtccacacgactcggagctgggattttcttggcatgagctacggccaacagcagtcgtcgtcgtggtcgtcgtcgtcgcggctccttaggaaggccaagtacggcgaagatgtcatcgtcggcgtcatagactcaggcatctggccggaatcccggagcttcgacgacagcgggtacggctacggccccgtgccgaaacggtggaaaggcgtgtgccagacaggccaggcgttcaacgcgagcaactgcaaccggaaggtcatcggcgcgcggtggtacgccgccgacgtcagcgaggaggacctcaagaacgaatacaggtcgccacgggacgccaacggccacggcacgcacaccgcctccacgatcgccggctcgcccgtgcggaacgcgagccaccacggcggcggcctggccgccggcatagcgcgcggcggggcgccgcgcgcgcggctggcaatatacaaggcctgccacgctgtcggcggcagcgcgagctgcggcgacgcctcgatcctcgcggccctcgatgccgccattggggacggcgtcgacctagtgtccctgtcgctgggaggcttaggcgagatctaccagtcgttgcacgccgtggcggccgggatcaccgtggtgctcgctgcagggaacgatggccccgtggagcagtccctcaacaatgccctgccgtggggcatcacggtggccgccgccaccatggaccgcaccttcccgacagtggtcacgctgggcgacggagagaagctggtggggcaatcactgtattaccacaaccgctcagcggcggcatcgacgagcgacgacgacgacttcgcttggcgccatttgatattattccctagctgcgacgagaagaatctggggtcggaaaacatcaccgggaaaatcgtcatatgccgtgcgccggtgttctggtccgactatcctcctccgcggcagcttagcagggccagccgagccgccatcgccggcggggccaagggcatcatcttcgagcagtacagtaccaacagccttgacacccaggtcgtctgccaaggccacctgccatgcgtcgtggtggacagagaatccatattcacgatccaaagtagcgacagcaatgtggccaagatttcgccggcggcgaccatggtcggatcccaggtcgcctcgccgagaatcgcgacgttctcgtcgaggggccccagtgctgagtttccctccgtactcaagcccgacatagcagcccctggagtgagcatcttggcagccatgcgtgactcgtacgtgctcctgtccgggacatccatggcatgccctcacgtctccgccgtcgtcgccttgctcaagtcggtccacccggactggtcgcctgccatgatcaagtctgccattgtcaccacagcatcggtgaccgaccgattcggcctgccgatccaagccaactcggtgcagaggaagccggccgacgccttcgacatgggcggcggcctcatagcgccggacagggccatggaccccggcctggtgtacgacatccagccggaggagtacacaagattggacgaccgcgccgaccgcctcaacctcccgtccatcgccgtgtccgacctcaagaactccgtcacggtctcgcgcaccgtcaccaacgtcgggccggcggaggtggcgacgtaccgggccgtggtcgaggcgccggccggcgtcacgatggacgtggagcctccggtgatcgccttcgagagaggcggcgccaggaacgccacgttcagggtgacgttcgtggcgaagcagcgggtgcagggcggctacgcgttcgggagcctgacgtggctggacgacgccaagcggcactcggtgaggatccccgtcgccgttcggaccgtcgtccgggacctcgtcgccgatgtagcttgatggtcgagttcggtttctgggcacgcacatacatgtgttccgcgttgtttacgtgctgtgtttgtctcgcggcgccgattcgatcgggttcttgtaataagaaagatggcgtggaaggaaaaaaatttggtgcagcactgctgcaaactagagtggtttgcagctcctcacaaaaaagaggatagaccccacccgcagcaacaataatacaactaaaacgttatctgctggacctacaggtgg

SEQ ID NO: 27768 - DNA, 6598 bp, Zea Mays
agcgaggctatatacgtcgtttgcttgcattgcgattgcgacgtgtatttatagtcagggtgcgaaattgctaacgacttttccagagttgaggtgagtgccggagaaacatgggaggttgtttggtttcggatttgcatctggatttggaagagcaaaaggactttctcctgcgacgcgtgcatgaaacagacacgcagtcgtaatttaaatttaaccgactccacgggcgcgtaaaatggcaaaccaacccagaacccagccccgaaaatgcaccgcgccgccgccgccaccgtggcggcgccgcaggcgaccgacgcgcagctcctggcgggcgcggtggaggcggcgatcgccacccgatccgcgcggctcggccgagcggcccacgcgcgcgcgctcaggctgctgtccccggcgctcccgcccttcctctgcgcgcacctcgtcaacctctactccaagctcgacctcccgggcgccgccgccgcgtcgctggccgccgaccccagccccaccgtggtgtcctacacggccttcatctcgggcgcggcgcagcacgcgcgcccgctccaggcgctctcggcgttcgccgccatgctccggctcggcctccgccccaacgacttcacgttcccttccgccttcaaggccgccgcctccgcgccgccgcgcagcgccgccggaacgcagctgcacgccctcgcgctcaggttcggatacctccccgacgacgccttcgtctcgtgcgcggcgctggacatgtacttcaagacgggctgcctcgcgctggcgcgccgcctgttcgacgaaatgcccaacaggaacgtggtcgcctggaacgcggtcatgaccaatgcggtgctcgacggccgcccccttgagacggtcgaggcctactttgggctccggggtgctggtgggatgccgaacgtggtctcggtctgtgcgttcttcaacgcgtgcgctggtatgacgaacctgtcccttggggagcagttctatggttttgtggccaagtgcggctttggcaaggatgtctccgtgtccaattctgtggtggatttttatgggaagtgccgttgcgtggggaaggccagggcggtgtttgatgggatgggagttcggaacaacgtgtcctggtgttctatggttgttgcatatgcgcagaatggggcagaggaggaggctttctttgtctacttgggtgcaaggagagctggggaagagccgactgacttcatggtttccagtgtgctcaccacatgtgcaggcctgctaggacttgaccttgggcgtgctctgcatgcagttgctgtccgttcctgcattgattcaaacatttttgttgcaagtgccttggttgacatgtatgggaagtgtggcggaatcgaagatgctgagcaggtctttttcgagatgccacagcggaatcttgtcacatggaatgcgatgataggaggttatgctcatattggtgatgctcacaatgcactttctgtgtttgataaaatgataatgggtcaagaaacagcacctaactacatcacacttgtcaatgttctcacggcatgcagcagaggaggtttgacaaaggaagggaatggaagagcgagcttataagatcatacaggggatgccaatgagaccttccatttctgtctggggagcactacttggggggtgcaagatgcatgggaagacagaactaggaaggattgctgctgagaagttgtttgaacttgatcctcaggattcaggcaatcatgttttgctctcaaacatgcttgcatctgctggcaggtgggcagaagcaacggatgtgagaaaggagatgaagaatgttgggatcaagaaggacccagggcgcagttggatcacttggaaaaatgttgtccatgttttccaggctaaggatacaacacatgatatgaatagggagatccaggcattgttggccaagctcaaagggcaaatgcaagctgctggatacatgccagacacacaatatgctctctatgatcttgaggaagaagagaaagaatcagaagtgtttcaacacagtgaaaagcttgctctggcttttggattgatatgtataccacctggcatacctataaggatcatgaagaatctgcgaatttgtgtagattgccaccgggcttttaaattcatatctggtattgctggtagggagataattgtgcgggacaacaatatgtttcatcacttcaaaaattatgagtgttcatgcaaggattattggtgaaagttgtatccacaagatatactgatgcatgttttgttggcatctctagaagcacctctgcagatatagaaggctttcagcagtgggctgcattgcatgatcacagtaggacccacatggacaacagatgcctacctgctgcttctccaatcaccaaaatgtcccccacaatatagggtttcttgcatgttcagagtgggaactctggatcatatgatatgcatcactcaagcgtacagtacgacagcatatcaacgacacatgaaatatgctctataactagctcccgcctgcacatatctactggctccagagaaagggaggcagtgacgaggggcagatggaggtagtggtggagaagggcaacgacctccacatggcggccgtgtctacctcaggttctgctgctgccgactggcctccataatttgaatccccactggtctgatcatgcttaaaacttctccaacgcccgcaaggacttggctcaggttttacggtggatggggaaaaaaaatctggaccgtcttttgtttcagatcggagcatatccgctactacaggatggatgtgcacactacactacacggtaggtaattcgtcaaatcatgctcgcgcgcggggaaaagcagatgggttgttttggctgtgtggcctgctttggcattgcaaaggtgtgtactgcttgcgactttggcatatatttcgatttcatgcgcatgtggtttgatgctttttattgtggtctgtggtagtatgctatccatgcatgagatatatctgatcatgcttatacgcatgcgcattatagtcccagccagcactagctaggctttacatagcataataattaacctaagccagagcgtaaatatacaagccagaataatagctgcacagggtactttaagcattgtgtgtttttttttaaaaaaattcctggcagccaaaatcctctcgagcggtcgagcctaatatctaactcaagactgtttgaattacgataattccaaagttgattaattttttttaggacagatagaaatgcctccttttatgttgtctaacccactgctatccccacgcgttgagattcatcggaacactccgatacatcgtccattattgaacgaccaaatgattccccgggccccgcgcgcacaccaatctgcaagcattttggatgctgccctcccagtgcggagagcttatgagtagctcaaagatttcttcagcgcttgctgtgaatagactgtgcatgtgatagccattacccatttgaaaaagttttttagtacgaaagaatactaattgtggtatgtataatcctatttaataaactgtctcttgaatagtttctaggggttatataaaaaatacaagagacaagaacccgttgaaagcttagggttgtatcataccatttattagctgtctcttgtgctttaaaagccgatccaagatctctaggttgtacgtacatgcccctgtgaatttctactcatactaagtttcttttcgtttcttgctgtaataactgcttagtcgatgcatagatatgtgtcttttgcagaggagggctaccccccagcaaacccggcccgcatcgactggcatacttgatgcccatgtttagtacacaaaagtccattattcgtgtagctagtacagtatcacacacaggctgcttgcaacaacaatggtccaagactgctgcttgttgctatatatacgcatgggagcagaaggacatgtgcactatcactcgtgcataacactagcagagagagaacataaatccaaagatgggctggagaccacacgttgtctctgtgtcatcttctgcactactagtgctgcttcagctcctcgtgctactgatgctgcccgctgatgcgtcgtcatcaagccaaaactcagacgacgacgacgacgatctacgtcgtgtacatgggcgagaagaagcacgacgacccttccctcgtcgtggcgtcgcaccacgccacgctggcctccgttcttgggagcaaggatgaagcactcagctccatagtctacagctacaagcacggattctccggtttcgcggcgaagctcacccagccccaagcggaggagcttaaaaaataccctggagttgtgagcgtgaagccaaacacgtaccaccacgtccacacgactcggagctgggattttcttggcatgagctacggccaacagcagtcgtcgtcgtggtcgtcgtcgtcgcggctccttaggaaggccaagtacggcgaagatgtcatcgtcggcgtcatagactcaggcatctggccggaatcccggagcttcgacgacagcgggtacggctacggccccgtgccgaaacggtggaaaggcgtgtgccagacaggccaggcgttcaacgcgagcaactgcaaccggaaggtcatcggcgcgcggtggtacgccgccgacgtcagcgaggaggacctcaagaacgaatacaggtcgccacgggacgccaacggccacggcacgcacaccgcctccacgatcgccggctcgcccgtgcggaacgcgagccaccacggcggcggcctggccgccggcatagcgcgcggcggggcgccgcgcgcgcggctggcaatatacaaggcctgccacgctgtcggcggcagcgcgagctgcggcgacgcctcgatcctcgcggccctcgatgccgccattggggacggcgtcgacctagtgtccctgtcgctgggaggcttaggcgagatctaccagtcgttgcacgccgtggcggccgggatcaccgtggtgctcgctgcagggaacgatggccccgtggagcagtccctcaacaatgccctgccgtggggcatcacggtggccgccgccaccatggaccgcaccttcccgacagtggtcacgctgggcgacggagagaagctggtggggcaatcactgtattaccacaaccgctcagcggcggcatcgacgagcgacgacgacgacttcgcttggcgccatttgatattattccctagctgcgacgagaagaatctggggtcggaaaacatcaccgggaaaatcgtcatatgccgtgcgccggtgttctggtccgactatcctcctccgcggcagcttagcagggccagccgagccgccatcgccggcggggccaagggcatcatcttcgagcagtacagtaccaacagccttgacacccaggtcgtctgccaaggccacctgccatgcgtcgtggtggacagagaatccatattcacgatccaaagtagcgacagcaatgtggccaagatttcgccggcggcgaccatggtcggatcccaggtcgcctcgccgagaatcgcgacgttctcgtcgaggggccccagtgctgagtttccctccgtactcaagcccgacatagcagcccctggagtgagcatcttggcagccatgcgtgactcgtacgtgctcctgtccgggacatccatggcatgccctcacgtctccgccgtcgtcgccttgctcaagtcggtccacccggactggtcgcctgccatgatcaagtctgccattgtcaccacagcatcggtgaccgaccgattcggcctgccgatccaagccaactcggtgcagaggaagccggccgacgccttcgacatgggcggcggcctcatagcgccggacagggccatggaccccggcctggtgtacgacatccagccggaggagtacacaagattggacgaccgcgccgaccgcctcaacctcccgtccatcgccgtgtccgacctcaagaactccgtcacggtctcgcgcaccgtcaccaacgtcgggccggcggaggtggcgacgtaccgggccgtggtcgaggcgccggccggcgtcacgatggacgtggagcctccggtgatcgccttcgagagaggcggcgccaggaacgccacgttcagggtgacgttcgtggcgaagcagcgggtgcagggcggctacgcgttcgggagcctgacgtggctggacgacgccaagcggcactcggtgaggatccccgtcgccgttcggaccgtcgtccgggacctcgtcgccgatgtagcttgatggtcgagttcggtttctgggcacgcacatacatgtgttccgcgttgtttacgtgctgtgtttgtctcgcggcgccgattcgatcgggttcttgtaataagaaagatggcgtggaaggaaaaaaatttggtgcagcactgctgcaaactagagtggtttgcagctcctcacaaaaaagaggatagaccccacccgcagcaacaataatacaactaaaacgttatctgctggacctacaggtgg

SEQ ID NO: 27769 - DNA, 3309 bp, Zea Mays
tgcatgaaacagacacgcagtcgtaatttaaatttaaccgactccacgggcgcgtaaaatggcaaaccaacccagaacccagccccgaaaatgcaccgcgccgccgccgccaccgtggcggcgccgcaggcgaccgacgcgcagctcctggcgggcgcggtggaggcggcgatcgccacccgatccgcgcggctcggccgagcggcccacgcgcgcgcgctcaggctgctgtccccggcgctcccgcccttcctctgcgcgcacctcgtcaacctctactccaagctcgacctcccgggcgccgccgccgcgtcgctggccgccgaccccagccccaccgtggtgtcctacacggccttcatctcgggcgcggcgcagcacgcgcgcccgctccaggcgctctcggcgttcgccgccatgctccggctcggcctccgccccaacgacttcacgttcccttccgccttcaaggccgccgcctccgcgccgccgcgcagcgccgccggaacgcagctgcacgccctcgcgctcaggttcggatacctccccgacgacgccttcgtctcgtgcgcggcgctggacatgtacttcaagacgggctgcctcgcgctggcgcgccgcctgttcgacgaaatgcccaacaggaacgtggtcgcctggaacgcggtcatgaccaatgcggtgctcgacggccgcccccttgagacggtcgaggcctactttgggctccggggtgctggtgggatgccgaacgtggtctcggtctgtgcgttcttcaacgcgtgcgctggtatgacgaacctgtcccttggggagcagttctatggttttgtggccaagtgcggctttggcaaggatgtctccgtgtccaattctgtggtggatttttatgggaagtgccgttgcgtggggaaggccagggcggtgtttgatgggatgggagttcggaacaacgtgtcctggtgttctatggttgttgcatatgcgcagaatggggcagaggaggaggctttctttgtctacttgggtgcaaggagagctggggaagagccgactgacttcatggtttccagtgtgctcaccacatgtgcaggcctgctaggacttgaccttgggcgtgctctgcatgcagttgctgtccgttcctgcattgattcaaacatttttgttgcaagtgccttggttgacatgtatgggaagtgtggcggaatcgaagatgctgagcaggtctttttcgagatgccacagcggaatcttgtcacatggaatgcgatgataggaggttatgctcatattggtgatgctcacaatgcactttctgtgtttgataaaatgataatgggtcaagaaacagcacctaactacatcacacttgtcaatgttctcacggcatgcagcagaggaggtttgacaaaggaagggtatgagttgttccagacaatgaagtggaggtttgggattgaaccaagaattgagcattatgcttgtgtggtggacttgctttgccgtgcaggaatggaagagcgagcttataagatcatacaggggatgccaatgagaccttccatttctgtctggggagcactacttggggggtgcaagatgcatgggaagacagaactaggaaggattgctgctgagaagttgtttgaacttgatcctcaggattcaggcaatcatgttttgctctcaaacatgcttgcatctgctggcaggtgggcagaagcaacggatgtgagaaaggagatgaagaatgttgggatcaagaaggacccagggcgcagttggatcacttggaaaaatgttgtccatgttttccaggctaaggatacaacacatgatatgaatagggagatccaggcattgttggccaagctcaaagggcaaatgcaagctgctggatacatgccagacacacaatatgctctctatgatcttgaggaagaagagaaagaatcagaagtgtttcaacacagtgaaaagcttgctctggcttttggattgatatgtataccacctggcatacctataaggatcatgaagaatctgcgaatttgtgtagattgccaccgggcttttaaattcatatctggtattgctggtagggagataattgtgcgggacaacaatatgtttcatcacttcaaaaattatgagtgttcatgcaaggattattggtgaaagttgtatccacaagatatactgatgcatgttttgttggcatctctagaagcacctctgcagatatagaagtagcttcctacctcagaaagtttagctgttcaagcccaagacaaatgaagttgcaaccctgcagtgcaacagcagactcagtctcacctgtcatcgccccaggagcagttcctgagcagagttacctcaatgatcggcgcagtgctcccgactccaggggctggcaggacgagaatgtcaagggaacctcgttcgaaggaaaagttgaggcgcagcagaagactagcagggttgagcgctgattcggctcatattcgacctggtagacccaagaaaaacgtcttgaaggctctgaagatttcagatggctctgatctcctatctcaaaaagcccttgatgcttataccaagctgttccttgaaccgcttaatcaagagcagagctcagcttctgaagattctgaccactgtccactcatcttgggactgaatgatgggcatcacggaaagaggagattccatttcgaagacttttggcctcagtttgaaggctttcatgaagctgtccttttggcctgggagtctgtcccagccactaggtgtcccttggaaaccttctcttccaagctaagggctacagctaaaggccttcaaagttggagtgataaaaaagtcgggcattttaaagcacagctagaaaatgcaagagagatcattcatcaattggagatagctagagatatcagagcgcttagccaacttgaggcttggctgctatcagccttgaagaagctttccctggctctatcctcgctgctccgctcagtggcgagaattagatcgagaatcacgtggctcaagtgcggggatgcgaattctaatctatttcacctacatgccaagcatcgcaagcaaaagaactttatagctatgctaaagaaggagaaccaggtcattacagctcatgaggaaaaggctcattatcctgtgggacttttatgccaacctgattggatctagtgatgatcgaacctgcacccttaacctggaagaattaggcatacaacaacatgatctcagtgcattggacgagcctatttcggaacaggaagtgtg

SEQ ID NO: 27770 - DNA, 3486 bp, Zea Mays
gagatttttgcaaataattatatacaaaataattaaccttaaaaattgagtcaaacagattcaaggttcaaaaccttaaaaatcattttttacaatttgttttctttaccataattctttttttcttttctacaattctttttttctttactacaatttagcgatcaatgtttaattgttttaattattttttagtcaataacatctacaggtacgttcaggctataagatttaatagtgatccttgctctatagcgacccaccgctagtccccaaagacatctataacgaccaaccataagttgttaaatttttagacttttagcgaccaaccgaccgttgctacaaaaggttttagcgactgaccgtcggtccctaacctttagcaaccaacagttggtacctattaagggtcgctaaagatcaaccgtcgtgtagtgcatatcaggttcacgccaaccgagagcaaaaatacaccaccgtccagccttttgccacggagggtacacgctactcccgccatctctccactcccattgtgcgttatcttattctggtattagtctgtccgaggcaaagcttaccatgtcccatttccaggtcatgtggccagttaagatagtccttgatcagcaagcctacatacgcatccaatccttaatcaacctgggtagaacatcaccggttcctagcccaagtcccgatttaagtacttccacccttaggattgtttgtattccttaggatgaaaagagcatcaaagggaactttgcagtaagatcccaccatgctctcaatgaaaatatttttgcaggtagaagccatctttccttaggataacccctgagctaggccttaatgcaaaaggcaacatctatccacaagatctgagcagggctaagcatttttgtaaatcataattttgatacttcatcagaagtatttataaaggtgtggatatcaaggaaagcaatgcatcaaagggttccaaacaactcctataaacttaatgcacatttcactagacttaaagtgtgcaaaaattatttaaaaacacaaggaaggggttgcatgcaccggggcttgcctagaataaacactatgttagtgtttgttagatgacgtccacttggcgatcagcttttgttccgatacttgctccgtctatccatcttcagattcgtccatcagcttcactatgcggagtagtccacccgttatgtcatcttggggtcgactcggttcaggttcttcacatcacgtagtcaacaaacgtacctaaatgatttgcataatgcacatgaatgcatataagcaggaacaacacaaatctaaatagtgctacacgatagcgaattaaacacctagtggcgaggcgttgaacaacttcatacgaagacactagttatcgacgtacgactaagcacaataattacgcttatctaaattaaccgaatctaacacaaacatctcgaaacaacaaattatacacattattcacgattggcctaaacacaacttattagttaattaattaaattctaaacttattcctcgcattattaattataccacatcgctcacaaagaactaatttaattttatttcgtaccacacatatttattcaatctatctaacaatttgactaacaggaataacaaatcagttcgccatactaaaatcctacttgaacccacgaaatcgacgacactacctggtccgcgcatatcaccaaatacgtgacgagcaatgtactagacttcactattctacacgattaaattttattctcgcaataaaccactactgcgatttactcgtacgtcaccagcccacattaaaagcgcaggtataccaaactgatgagaaatattaaaacgaagagcgggggcgacgatagctcaccaataatttaatatatcttgaaggccacgagcacagctacgatttccaattccgccattacgtcgagcacgtggtgagcaccacatggacctcactgtcttctaaatcacgacagcacccatcgcgactacttcagaatcatgaaaataatcatatctcattcatcgaactaattcaataatactagacgcatccatttatcaatccaataattaagctaacagaaatatgaatcggcttacccatgactaaatttgatatgatatcggcgaatatggcaaggattccggttcagcccttgtgtcgagcacaaaggcgagaatcgcaagtcatcgacacggtgctgcgacggagggtgatggcgaggcggagatcgagctggggccgagcaggggttggcgaggatgagaaccggtgtctgccagcagcgagattgaagaccaaagtatgacggagacacagctgcttgagggatacagtccgatgtccatggacgcgagctggagcagagcgagcagtctgtcgagcgagatgcaagggaggcgcggagccgagcaatcacttgaacatggtcgacggcgagttctgccggaagagaacactagcacacagcgcggcacgacgaacgcgcagagcttcaaaaccacgcgcgcgagacctggccggaaccaacgacaagcgaacagagaggaacatgtatgggagttcaacggcgatggggacactgccgaggtccacctccacaggctgcgaggggaacaacagcgcgcaggaaccagagctcagagtcgagcggtggccagggaacagggtcgagcggttgaatcgatgccgatcgcgagcagtttcgcatgtacgacaacccggcggaggagaacttaacggggtgctttgcggctggggagggagcggctgcgcgcacaggaagcaggcgcgcgcgcggcgatgagccgggatgcgacagatcgaggctgaggcgcagcagttccaaatcaaattaggaggagacccaggtacccacgacggccggctaggaaggaagcggcttggcacgtccatggctgagggctagctgggcgacaacgcgcgaccatggcgagcacagggagggagcaggtacggctgggctgggcgaccatggcgagggagctcaggagaaaagctacggcgcaggaagctgggcggccgagcgcgtgggagctcgagggcgcgcggtacagagagctccagcggcgagcgcaggggcgcggcgcagcggccatggccgagttggagccagggacggcgccgagcagagaaggaagctgcggtgcccagactgggcgagcgccggtagaggaagatccgagctggggcgcggcggggaagctccacggcgatcatggcacaacagcgcgcgggatccggtgaactctagtacagaggcacggacgaggtgagagatggcacatccgctcggggaggcagggaagcgatgcaggcagggagcttcgacggtgcacaaggagatgaaggataattgaaagaattagttagaagataaggcagaggagaagcatatccactagagctgagggcgt

SEQ ID NO: 27771 - DNA, 324 bp, Zea Mays
aaacacaaaagcaccacaattatatattcacaaaagcatcacaattataacatcattcacaactagatcatttacagatagctagctagatcacaataaaaatgcataggaccgatctacaggtgctgtttaaatcttttaattctagaaggaagaatcttcaaacagaaaatacactgaacaaagtcctttatagtgtgacagtgtatggccacctcccaaacttccatccagggtcctgtgaccttgcctgctcttcggatcagttgcttgtgcacgaagctcaggagacagtggcaatctgtgtgtgtatactctcgtcaa

SEQ ID NO: 27772 - DNA, 2468 bp, Zea Mays
atggacgcacaaaatatatttgacttaaaggtaaatgttggtctgcatcctgatgctgtggtgtatagtatgctgatggatgggtactgtcttgttggcaagatggagaaagcattaagagtatttgatgctatggtgtcagctggcattgaaccaaacgttgtagtgtattgtacacttgttaatggctattgtaaaattggaaggattgatgaaggattgagtcttttcagagaaatgctgcaaaggggaataaagccttcaactattttatacagcatcataattgatgggttatttcaggccgggagaacagttcctgcaaaggtgaaattccatgaaatgacagaaagtggtatcgctatggacatatgtacatacaacatagttcttcgtggactttttaaaaatagatgctttgatgaagcaatctttcttttcaaagaattacgtgcaatgaatgtaaagatcaatatcataactctcaataccatgatagatggaatgtttcaaaccaggagagttgaagaagctaaggatctgtttgcttctatctcgagaagtcggctggtgcctagtgttgtgacttacagtataatgatcacaaatcttataaaagaaggattggtggaagaggcagaagatatgttttcatccatgcagaatgctggctgtgagcccaattctcgattgctgaatcatgtagtcagggaattactaaagaaaaatgaaatagtcagggctggagcttacctgtccaagattgacgagaggaatttctcacttgaacatttaaccacaatgttgctggtcgatctcttctcaagcaaaggaacttgtagggaacacataagatttctccctgcaaagtatcattttcttgcagaggccagtccgtgattgatattttgatttttttttttggaataagtccttgcacgcacctgtcacacatgttttatcatgtctgttaacacagccgatgttgcatttatgaggaatgacgttataactgctgaattgtgatgaagaataatgtagcatgctgaatcctgttttggcccctggccgagccgcccagttcgtcatgaccagcaggtgattgcaaccaaaggcagtttggcctaatgctgtggcttgtaagggcaaagtggataccctgctgctgggtagtactagtatattgctgttcaaacctgcaaatgtaagttttaaacaaacctgccatttctatctactgtactatgcacttgcacttgaaacatataactttcattcatgttcagttagcatataagtatatgcattaatgattaagttcatgcaccggccgattcacaacactgaaatactgatgccacagatctgggatcagctgatggatgaaagaacaatcagtagtctctgggtaaaatatcatgcctgcgcaagcgagcggacatgagtgacaagaagcgatgagattagacgaaatggaagcagagcattgtggtcagaccaccaccatctccaagggagaacaaagagaaggattgtgctgtttacattaacaaatagataacgttcttcctcattagtgattgcaaccaaaggcagtctggcctaatgctgtggtttgtaagggcaaagtggataccctgctgctgggtagtactagtgtattgctgttgaaacctgcaaatatctgggatcagctgatggatgaagaacaatgagtagtctctgggtaaaatagcatgcctgcgcaagcgagcggacatgagtgacaagaagctgtgagtgcctgcctgcctccatttagagctgatatttaggtgggattaaaatccatggtgggattgggtgtaagaatgaccggacaaggcctaatgtgtatcagcagattgacaacgcaacaagagcgaagccacaagaggtttcagggtagggtaccatctaatgtgtatcagcagcagcaggtttttctcaggtgttaagaaccaccgacatgaaaaagcaccgagtttgctcgttcattccttggcagccttgtcgatgagctcctgtggatgtgggggatgacgccgccgccgctggcggcgatggtagccttgatcagggtttccagctcgtcgttcccgtggatcgccagctgaaggaacagaaggcaaaaacagagagggaaattgaacaaggaataaacaagagattgtataggaagcttgatacgaaatggaagcagagcattgtggtcagaccaccaccatctctaagggagaacaaagagaaggcaagcagagcctgtgcacgtattggttggttcagttgtgcggttgctctttttggctcttatcttcgtcaccatccttgtatttgtaggattgtggaaatgtaacccgttcaagttgctgcattagtagcagctagtagtatctgtgattcagaaatctaaaagttgtgacttgtgaggcagcctgctgccttgttca

SEQ ID NO: 27773 - DNA, 705 bp, Zea Mays
gcctactcgatctgaacagacatttgagtacactcctccagaggcactccttaattcaaactggtttcaaggatcaagaagtgcaaggcttaagtatgacatctggagcgttggagttgtcatgctagagttgatgatgggttctccccatgtttttcagataagtgaccgtacacgtattttaatggatcaacatctcggagggtggagtgaacaaacaaaggagcttgcatacaagttgaggtcatacatggagttgtgcattttagtcccagggatttcctcgcaacatcatggcagtggtagcctagaacagggtcaatttgggttagcttcttggaaatgctctgaagaatcatttgcacatcaagtgaagatcagagatcctctcaagattggttttcctaatttatgggcgttgcgacttgcacgccagctacttgtgtggcatcctgaggatcgactaagtgtagatgaagcactaaatcatccttacttccaggagccaatgtaatgtaaggagaggagattagtgataactaaccgacgaatcttcagctcggtcctttcaagttcaagccgcgtgcatttggttagaggaattcatgaatcgtttgtaatttaccatcctagctgtgtcataaagatgttgtgaatataacataacatgaagtaaaagatagtagcatatgtgaaattacatgt

SEQ ID NO: 27774 - DNA, 3821 bp, Zea Mays
ctggcaacgacgcagaggtcgttactgagctcgacgccgacgaagcctctcccaccgctgcctcccaccatgtctcgaccaaggaaatgcaccgcggcaatgccgtcatgtgcccgcatctcctccgccgtctccaccgccgccgcatcctcctcctcgccgccgccgcatcctcctcctcgctgccgccgccgcatcctcgccgccgccacggcgcgcgtgcgggaggggacgctccgccctgaggaggcacacgacctgctcgacgagttgcagcgtcgaggcacgcccgttctcgagcgcgatctgaacggcttcctcgcggcgctcgcgcgtgcgccgtcctccgccgcctgcaggagtggccctgccctcgccgtcgcgctcttcaaccgcgcggcgtctcgggctcaaggaccgcgggtgctgtcccccacatcccacacctacgccatcctcatggactgctgcacccgcgcgcaccgcccagagctagcgctggcgttcttcggccagctcctcaggacaggcttgcgcgtcaatatcatcatcgctaaccaccttctcgagggcttttgtgaagcgaagcggacagacgaggctttggacatccttctccacagaacgcctgagttgggctgtgtgcccgatgttttctcgtacagcatacttctgaagagcctctgcgaccaaggaaagagtggccaggcagatgatttgctacggatgatggctgaagggggagctgtctgctcgcccaacgtggttgcctacaatacagtaatcgacggcttttttaaggagggtgacgtaaataaagcatgtgatctattcaaagaaatggtacagcggggcattccacctgatttagtgacttataactctgtggtccatgccctgtgtaaggcaagagcaatggacaaggcagaggctttccttcgacaaatggtcaataaacgtgttctgccaaataactggacatataataacttgatatatggatactcctccacaggacagtggaaggaggcggttagggtatttaaagaaatgagaagacacagcatcttaccagatgttgttactttgagcatgttgatgggttccctttgcaagtatggaaaaatcaaggaagctagagatgtttttgacacaatggcaatgaagggccaaaatcctgatgttttctcctacaatattatgctcaacgggtacgctactaaaggatgtttagttgatatgacagatctcttcgatttgatgctaggtgacggtattgcacctgacttttatacttttaatgtgctgatcaaggcatatgcaaactgtggaatgctagataaggctatgatcatcttcaatgaaatgagagaccatggagtgaaacctgatgtggtaacctataggacagtgattgctgccctctgcagaatcggtaagatggatgatgctatggaaaaatttaatcagatgattgatcaaggagtagcacctgacaaatatgcatacaattgcctgattcaaggtttttgtactcatggtagtttactgaaagccaaggaattgatttcggaaataatgaataatggcatgcatcttgacattgttttcttcagttcgataattaacaacctttgcaaactgggaagggtaatggacgcacaaaatatatttgacttaactgtaaatgttggtctgcatcctgatgctgtggtgtatagtatgctgatggatgggtactgtcttgttggcaagatggagaaagcattaagagtatttgatgctatggtgtcagctggcattgaaccaaacgttgtagtgtattgtacacttgttaatggctattgtaaaattggaaggattgatgaaggattgagtcttttcagagaaatgctgcaaaggggaataaagccttcaactattttatacagcatcataattgatgggttatttcaggccgggagaacagttcctgcaaagatgaaattccatgaaatgacagaaagtggtatcgctatggacatatgtacatacaacatagttcttcgtggactttttaaaaatagatgctttgatgaagcaatctttcttttcaaagaattacgtgcaatgaatgtaaagatcaatatcataactctcaataccatgatagatggaatgtttcaaaccaggagagttgaagaagctaaggatctgtttgcttctatctcgagaagtcggctggtgcctaatgttgtgacttacagtataatgatcacaaatcttataaaagaaggattggtggaagaggcagaagatatgttttcatccatgcagaatgctggctgtgagcccaattctcgattgctgaatcatgtagtcagggaattactaaagaaaaatgaaatagtcagggctggagcttacctgtccaagattgacgagaggaatttctcacttgaacatttaactgcaatgttgctggtcgatctcttctcaagcaaaggaacttgtagggaacaaataagatttctccctgcaaagtatcattttcttgcagaggccagtccgtgattgatatgttgattttttttggaatcagtccttgcacgcacctgtcacagttaaactagtatatgatcttaactaaaaccattggtttacttcatgttcatgtttctcggaagattttcttctcatttgacctgcttgatatgcagatgttcatttacttttgatccaatatatgcagagcgttttatgtttttcgaagcatattcgttccggtgctgatgtagctatgtgctctccgtacacaactgatgtgtgattctctcttgtagcatgttttatcatgtctgttaacacagccgatgttgcatttatgaggaatgacgttataactgctgggagaataatgtagcatgctgaatcctgttttgggccctggctgagccgcccagttcgtcatgaccagcaaggtaatgttcatctacatgtctagtttgctcatcttgtctttgagaagggacacccttagctgtttacattaacaaatagatagcgttcttcctcattagtgattgcaaccaaaggcagtctggcctaatgctgtggcttgtaagggcaaagtggataccctgctgctgggtagtactagtatattgctgttcaaacctgcaaatgtaagttttaaacaaacctgccatttctatctactgtactatgcacgtgcacttgaaacatataactttcattcatgttcagttagcatataagtatatgcattaatgattaagttcatgcaccggccgattcacaacactgaaatactgatgccacagatctgggatcagctgatggatgaagaacaatcagtagtctctgggtaaaatagcatgcctgcgcaagcgagcggacatgagtgacaagaagcgattgacaacgcaacaagagcgaagccacaagaggtttcagggtagggtaccatctaatgtgtatcagcagcagcaggtttttctcaggtgttaagaaccaccgacatgaaaaagcaccgagtttgctcgttcattccttggcagccttgtcgatgagctcctgtggatgcgggggatgacgccgccgccgctggcggcgatggtagccttgatcagggtttccagctcgtcgttcccgtggatcgccagctgaaggtatcgtacaaaaccgatttttttcccactcccgctcaacatttaaaactgtttttttccccactccgctcagcataagcagagaagcatatggtggccatggctatgctatttaggaacagaaggcaaaaacagagagggaaattgaac

SEQ ID NO: 27775 - DNA, 3743 bp, Zea Mays
aatgacgagggagggaggaacccggacgcccaaaaaatccccccacccccagcgcggcaatgccgtcatgtgcccgcatctcctccgccgtctccaccgccgccgcatcctcctcctcgccgccgccgcatcctcctcgctgcagccgccgcatcctcgccgccgccacggcgcgcgtgcgggaggggacgctccgccctgaggaggcacacgacctgctcgacgagttgcagcgtcgaggcacgcccgttctcgatcgagatctgaacggcttcctcgcggcgctcgcgcgtgcgccgtcctccgccgcctgcgggagtggccctgccctcgccgtcgcgctcttcaaccgcgcggcgtctcgggctcaaggaccgcgggtgctgtcccccacatcctacacctacgccatcctcatggactgctgcacccgcgcgcaccgcccagagctagcgctggccttcttcggccagctcctcaggacaggcttgcgcgtcgatgccatcatcgctagccaccttctcaagggcttttgtgaagcgaagcggacagacgaggctttggacatccttctccacagaacgcctgagttgggctgtgtgcccgatgttttctcgtacaacatacttctgaagagcctctgcaaccaaggaaagagtggccaggcagatgatttgctacggatgatggctgaagggggaactgtctgctcgcccgacgtggttgcctacaatacagtaatcgacggcttttttaaggagggtgatgttaataaagcatgtgatctattcaaagaaatggtacagcggggcattccacctgatttagtgacttatagctctgtggtccatgccctgtgtaaggcaagagcaatggacaaggcagaggctttccttcgacaaatggtcaataaaggtgttctgccagataactggacatataataacttgatatatggatactcctccacaggacagtggaaggaggcagttagggtatttaaagaaatgagaagacagagcatcttaccagatgttgttgctttgaacacgttgatgggttccctttgcaagtatggaaaaatcaaggaagctagagatgtttttgacacaatggcaatgaagggccaaaatcctgatgttttctcgtacacaattatgctcaacgggcatatgcaaactgtggaatgctagataaggctatgatcatcttcaatgaaatgagagaccatggagtgaaacctgatgtggtaacctataggacagtgattgctgccctctgcagaatcggtaagatggatgatgctatggaaaaatttaatcagatgattgatcaaggagtagcacctgacaaatatgcatacaattgcctgattcaaggtttttgtactcatggtagtttactgaaagccaaggaattgatttcggaaataatgaataatggcatgcatcttgacattgttttcttcagttcgataattaacaacctttgcaaactgggaagggtaatggacgcacaaaatatatttgacttaactgtaaatgttggtctgcatcctgatgctgtggtgtatagtatgctgatggatgggtactgtcttgttggcaagatggagaaagcattaagagtatttgatgctatggtgtcagctggcattgaaccaaacgttgtagtgtattgtacacttgttaatggctattgtaaaattggaaggattgatgaaggattgagtcttttcagagaaatgctgcaaaggggaataaagccttcaactattttatacagcatcataattgatgggttatttcaggccgggagaacagttcctgcaaagatgaaattccatgaaatgacagaaagtggtatcgctatggacatatgtacatacaacatagttcttcgtggactttttaaaaatagatgctttgatgaagcaatctttcttttcaaagaattacgtgcaatgaatgtaaagatcaatatcataactctcaataccatgatagatggaatgtttcaaaccaggagagttgaagaagctaaggatctgtttgcttctatctcgagaagtcggctggtgcctaatgttgtgacttacagtataatgatcacaaatcttataaaagaaggattggtggaagaggcagaagatatgttttcatccatgcagaatgctggctgtgagcccaattctcgattgctgaatcatgtagtcagggaattactaaagaaaaatgaaatagtcagggctggagcttacctgtccaagattgacgagaggaatttctcacttgaacatttaactgcaatgttgctggtcgatctcttctcaagcaaaggaacttgtagggaacaaataagatttctccctgcaaagtatcattttcttgcagaggccagtccgtgattgatatgttgattttttttggaatcagtccttgcacgcacctgtcacagttaaactagtatatgatcttaactaaaaccattggtttacttcatgttcatgtttctcggaagattttcttctcatttgacctgcttgatatgcagatgttcatttacttttgatccaatatatgcagagcgttttatgtttttcgaagcatattcgttccggtgctgatgtagctatgtgctctccgtacacaactgatgtgtgattctctcttgtagcatgttttatcatgtctgttaacacagccgatgttgcatttatgaggaatgacgttataactgctgggagaataatgtagcatgctgaatcctgttttgggccctggctgagccgcccagttcgtcatgaccagcaaggtaatgttcatctacatgtctagtttgctcatcttgtctttgagaagggacacccttagctgtttacattaacaaatagatagcgttcttcctcattagtgattgcaaccaaaggcagtctggcctaatgctgtggcttgtaagggcaaagtggataccctgctgctgggtagtactagtatattgctgttcaaacctgcaaatgtaagttttaaacaaacctgccatttctatctactgtactatgcacgtgcacttgaaacatataactttcattcatgttcagttagcatataagtatatgcattaatgattaagttcatgcaccggccgattcacaacactgaaatactgatgccacagatctgggatcagctgatggatgaagaacaatcagtagtctctgggtaaaatagcatgcctgcgcaagcgagcggacatgagtgacaagaagcggtgagtgcctgcctgcctccatttaagggcctgttcgttctcatcttaattcatgtggattggataggattaggtgggattaaaatccatggtgggattgggtgtaagaatgaccggacaaggcctaatgtgtatcagcagattgacaacgcaacaagagcgaagccacaagaggtttcagggtagggtaccatctaatgtgtatcagcagcagcaggtttttctcaggtgttaagaaccaccgacatgaaaaagcaccgagtttgctcgttcattccttggcagccttgtcgatgagctcctgtggatgcgggggatgacgccgccgccgctggcggcgatggtagccttgatcagggtttccagctcgtcgttcccgtggatcgccagctgaagcataagcagagaagcatatggtggccatggctatgctatttaggaacagaaggcaaaaacagagagggaaattgaac

SEQ ID NO: 27776 - DNA, 3594 bp, Zea Mays
aatgacgagggagggaggaacccggacgcccaaaaaatccccccacccccagcgcggcaatgccgtcatgtgcccgcatctcctccgccgtctccaccgccgccgcatcctcctcctcgccgccgccgcatcctcctcgctgcagccgccgcatcctcgccgccgccacggcgcgcgtgcgggaggggacgctccgccctgaggaggcacacgacctgctcgacgagttgcagcgtcgaggcacgcccgttctcgatcgagatctgaacggcttcctcgcggcgctcgcgcgtgcgccgtcctccgccgcctgcgggagtggccctgccctcgccgtcgcgctcttcaaccgcgcggcgtctcgggctcaaggaccgcgggtgctgtcccccacatcctacacctacgccatcctcatggactgctgcacccgcgcgcaccgcccagagctagcgctggccttcttcggccagctcctcaggacaggcttgcgcgtcgatgccatcatcgctagccaccttctcaagggcttttgtgaagcgaagcggacagacgaggctttggacatccttctccacagaacgcctgagttgggctgtgtgcccgatgttttctcgtacaacatacttctgaagagcctctgcaaccaaggaaagagtggccaggcagatgatttgctacggatgatggctgaagggggaactgtctgctcgcccgacgtggttgcctacaatacagtaatcgacggcttttttaaggagggtgatgttaataaagcatgtgatctattcaaagaaatggtacagcggggcattccacctgatttagtgacttatagctctgtggtccatgccctgtgtaaggcaagagcaatggacaaggcagaggctttccttcgacaaatggtcaataaaggtgttctgccagataactggacatataataacttgatatatggatactcctccacaggacagtggaaggaggcagttagggtatttaaagaaatgagaagacagagcatcttaccagatgttgttgctttgaacacgttgatgggttccctttgcaagtatggaaaaatcaaggaagctagagatgtttttgacacaatggcaatgaagggccaaaatcctgatgttttctcgtacacaattatgctcaacgggtacgctactaaaggatgtctagttgatatgacagatctcttcgatttgatgctaggtgacggtattgcacctgacatttatacttttaatgtgctgatcaaggcatatgcaaactgtggaatgctagataaggctatgatcatcttcaatgaaatgagagaccatggagtgaaacctcatgtggtgacctatatgacagtgattgctgccctctgcagaatcggtaagatggatgatgctatggaaaaatttaatcagatgattgatcaaggagtagtacctgataaatatgcataccattgcctgattcaaggtttttgtactcatggtagtttactgaaagccaaggaattgatttcggaaataatgaataatggcatgcgtcttgatattgttttcttcggttcgataattaacaacctttgcaaactgggaagggtaatggacgcacaaaatatatttgacttaactgtaaatgttggtctgcatcctgatgctgtggtgtataatatgctgatggatgggtactgtcttgttggcaagatggagaaagcattaagagtatttgatgctatggtgtcagctggcattgaaccaaatgttgtagggtatggtacacttgttaatggctattgtaaaattggaaggattgatgaaggattgagtcttttcagagaaatgctgcaaaagggaataaagccttcaactattttatacaacatcataattgatgggttatttgaggccgggagaacagttcctgcaaaggtgaaattccatgaaatgacagaaagtggtattgctatgaacaaatgtacatacagcatagtacttcgtggactttttaaaaatagatgctttgatgaagcaatctttcttttcaaagaattacgtgcaatgaatgtaaagatcgatatcataactctcaataccatgatagctggaatgtttcaaaccaggagagttgaagaagctaaggatctgtttgcttctatctcgagaagtgggctggtgccttgtgctgtgacttacagtataatgatcacaaatcttctaaaagaaggattggtggaagaggcagaagatatgttttcatccatgcagaatgctggctgtgagcccgattctcgattgctgaatcatgtagtcagggaattactaaagaaaaatgaaatagtcagggctggagcttacctgtccaagattgacgagaggaatttctcacttgaacatttaaccgcaatgttgctggtcgatctcttctcaagcaaaggaacttgtagggaacaaataagatttctccctgcaaagtatcattttcttgcagaggccagtccgtgattgatatgttgattttttttggaatcagtccttgcacgcacctgtcacagttaaactagtatatgatcttaactaaaaccattggtttacttcatgttcatgtttctcggaagattttcttctcatttgacctgcttgatatgcagatgttcatttacttttgatccaatatatgcagagcgttttatgtttttcgaagcatattcgttccggtgctgatgtagctatgtgctctccgtacacaactgatgttgattctctcttgtagcatgttttatcatgtctgttaacacagccgatgttgcatttatgaggaatgacgttataactgctgggagaataatgtagcatgctgaatcctgttttgggccctggctgagccgcccagttcgtcatgaccagcaagtgattgcaaccaaaggcagtctggcctaatgctgtggcttgtaagggcaaagtggataccctgctgctgggtagtactagtatattgctgttcaaacctgcaaatatctgggatcagctgatggatgaaagaacaatcagtagtctctgggtaaaatatcatgcctgcgcaagcgagcggacatgagtgacaagaagcggattaggtgggattaaaatccatggtgggattgggtgtaagaatgaccggacaaggcctaatgtgtatcagcagattgacaacgcaacaagagcgaagccacaagaggtttcagggtagggtaccatctaatgtgtatcagcagcagcaggtttttctcaggtgttaagaaccaccgacatgaaaaagcaccgagtttgctcgttcattccttggcagccttgtcgatgagctcctgtggatgcgggggatgacgccgccgccgctggcggcgatggtagccttgatcagggtttccagctcgtcgttcccgtggatcgccagctgaaggtatcgtacaaaaccgatttttttcccactcccgctcaacatttaaaactgtttttttccccactccgctcagcataagcagagaagcatatggtggccatggctatgctatttaggaacagaaggcaaaaacagagagggaaattgaac

SEQ ID NO: 27777 - DNA, 3483 bp, Zea Mays
aatgacgagggagggaggaacccggacgcccaaaaaatccccccacccccagcgcggcaatgccgtcatgtgcccgcatctcctccgccgtctccaccgccgccgcatcctcctcctcgccgccgccgcatcctcctcgctgcagccgccgcatcctcgccgccgccacggcgcgcgtgcgggaggggacgctccgccctgaggaggcacacgacctgctcgacgagttgcagcgtcgaggcacgcccgttctcgatcgagatctgaacggcttcctcgcggcgctcgcgcgtgcgccgtcctccgccgcctgcgggagtggccctgccctcgccgtcgcgctcttcaaccgcgcggcgtctcgggctcaaggaccgcgggtgctgtcccccacatcctacacctacgccatcctcatggactgctgcacccgcgcgcaccgcccagagctagcgctggccttcttcggccagctcctcaggacaggcttgcgcgtcgatgccatcatcgctagccaccttctcaagggcttttgtgaagcgaagcggacagacgaggctttggacatccttctccacagaacgcctgagttgggctgtgtgcccgatgttttctcgtacaacatacttctgaagagcctctgcaaccaaggaaagagtggccaggcagatgatttgctacggatgatggctgaagggggaactgtctgctcgcccgacgtggttgcctacaatacagtaatcgacggcttttttaaggagggtgatgttaataaagcatgtgatctattcaaagaaatggtacagcggggcattccacctgatttagtgacttatagctctgtggtccatgccctgtgtaaggcaagagcaatggacaaggcagaggctttccttcgacaaatggtcaataaaggtgttctgccagataactggacatataataacttgatatatggatactcctccacaggacagtggaaggaggcagttagggtatttaaagaaatgagaagacagagcatcttaccagatgttgttgctttgaacacgttgatgggttccctttgcaagtatggaaaaatcaaggaagctagagatgtttttgacacaatggcaatgaagggccaaaatcctgatgttttctcgtacacaattatgctcaacgggtacgctactaaaggatgtctagttgatatgacagatctcttcgatttgatgctaggtgacggtattgcacctgacatttatacttttaatgtgctgatcaaggcatatgcaaactgtggaatgctagataaggctatgatcatcttcaatgaaatgagagaccatggagtgaaacctcatgtggtgacctatatgacagtgattgctgccctctgcagaatcggtaagatggatgatgctatggaaaaatttaatcagatgattgatcaaggagtagtacctgataaatatgcataccattgcctgattcaaggtttttgtactcatggtagtttactgaaagccaaggaattgatttcggaaataatgaataatggcatgcgtcttgatattgttttcttcggttcgataattaacaacctttgcaaactgggaagggtaatggacgcacaaaatatatttgacttaactgtaaatgttggtctgcatcctgatgctgtggtgtataatatgctgatggatgggtactgtcttgttggcaagatggagaaagcattaagagtatttgatgctatggtgtcagctggcattgaaccaaatgttgtagggtatggtacacttgttaatggctattgtaaaattggaaggattgatgaaggattgagtcttttcagagaaatgctgcaaaagggaataaagccttcaactattttatacaacatcataattgatgggttatttgaggccgggagaacagttcctgcaaaggtgaaattccatgaaatgacagaaagtggtattgctatgaacaaatgtacatacagcatagtacttcgtggactttttaaaaatagatgctttgatgaagcaatctttcttttcaaagaattacgtgcaatgaatgtaaagatcgatatcataactctcaataccatgatagctggaatgtttcaaaccaggagagttgaagaagctaaggatctgtttgcttctatctcgagaagtgggctggtgccttgtgctgtgacttacagtataatgatcacaaatcttctaaaagaaggattggtggaagaggcagaagatatgttttcatccatgcagaatgctggctgtgagcccgattctcgattgctgaatcatgtagtcagggaattactaaagaaaaatgaaatagtcagggctggagcttacctgtccaagattgacgagaggaatttctcacttgaacatttaaccgcaatgttgctggtcgatctcttctcaagcaaaggaacttgtagggaacaaataagatttctccctgcaaagtatcattttcttgcagaggccagtccgtgattgatatgttgattttttttggaatcagtccttgcacgcacctgtcacagttaaactagtatatgatcttaactaaaaccattggtttacttcatgttcatgtttctcggaagattttcttctcatttgacctgcttgatatgcagatgttcatttacttttgatccaatatatgcagagcgttttatgtttttcgaagcatattcgttccggtgctgatgtagctatgtgctctccgtacacaactgatgttgattctctcttgtagcatgttttatcatgtctgttaacacagccgatgttgcatttatgaggaatgacgttataactgctgggagaataatgtagcatgctgaatcctgttttgggccctggctgagccgcccagttcgtcatgaccagcaagtgattgcaaccaaaggcagtctggcctaatgctgtggcttgtaagggcaaagtggataccctgctgctgggtagtactagtatattgctgttcaaacctgcaaatatctgggatcagctgatggatgaaagaacaatcagtagtctctgggtaaaatatcatgcctgcgcaagcgagcggacatgagtgacaagaagcggtgagtgcctgcctgcctccatttaagggcctgttcgttctcatcttaatacatgtggattagatgagattagacgaaatggaagcagagcattgtggtcagaccaccaccatctccaagggagaacaaagagaaggattgtggaaatgtaacccgttcaagttgctgcattagtagcagctagtagtatctgtgattcagaaatctaaaagttgtgacttgtgaggcagcctgctgccttgttcatgtagaatgaaccttgtgtagatgagttgcaaggtgtgagtgttccatatattattgtaggatgagttagaatcctgaatgtcaagtgcttattacgtggatgcaaaatgcaaataaataaa

SEQ ID NO: 27778 - DNA, 835 bp, Zea Mays
tataaacccttgaccgggagacggaaaaccccaacgccggcaagaaccgcccctcgcaagcaatcgcttgctcgtcgcgctcgaatcccttccctgtgggacgcatccaccgccacctgaaggatagcgcacaggccggcgagcgggtgggggcgacggcggccgtgtacgcggcggccgtcctggagtacctgacggcggagatcatggagctggccgggaacgcgtgcagggacctcaaggtgaagcgcatcaccccgcggcacctccagctggcggtacgcggggacgaggagctggacaccctgatcaaggccaccatcgccggcggcggcgtcatcccccacatccacagggagctcatcgacaaggctgcctaggaatgacgaaggagcaagcagtctgagaaaaaaacctgagaaccaagtagtaccatgaacctcttgtgggtggcttcgctcttgttgcgttgtcaatctgctgatacatacacatttctcaaaaatagaggcgggcactcgccgcttcatgctcccttggatggttgttcttttcatccatcagctgaacccagctgatcatcccggtcagcattgagaattggtctgtgcatgaacttaatcgataaacagtcaaagagctcaccctttttactctaccattgacgaagaacgttatctatgtgttaaacattcattgcacgcaattctttgaaaagcaagattgcttcatcagagcatctgtttttaaaaagtcctctgataactgtgctgtatgatactaattaaatactgcaactaaatggttaatagaaattagtaaaatatgtgaagat

SEQ ID NO: 27779 - DNA, 3503 bp, Zea Mays
gtcacagtcactgttcacacaacagctgctagtagccgtagcccgtaggcgagccagaggcggcccaattcgagagcggttccggcggcgtgggcggcgccgtgcctgagatcggagccccgtggcgcggtgctggcaactggcggcgcgatgtgggcggtccacgggagggagtccacggccgctgcgcttcgcctgctgctgatcgcgatcgcctgcggcctcgtcttcgcgctcctccacctccccctcccggatgaccgtgcgcgaaccgccgaccccggtgggcagcgcggcgctgctgggggcggcggggcccgcctgtcggtgcagcaggggagggttcgagaggccagaaggctgagtgtcgtcaccgaagagacagatgggcaaactgacgaaacggcggcggaagaagatgaaaggatatctaaatctcccccagacaccaaagagaagatctggatgatgcaagatcagctaattttggccaaggcgtacttgcatttcgcttctccccaaggtagtgtacatttagttcgagagctgaaattgaagataaaagagatcgaaagggcaataagccactcaagtggaggtacccatgtacctgggagtgtgttgcaaaaaataaaggcgatggagctgaccctttcaaaggctcagaggacctacccgcattgctctcagatgacgtcaaagctacgtgcaatgatgcataatagtgaagaattggtcagagcacaccaaagtgaatcttcattccttgagcaggttgctgtgaggacattacccaaaggccatcactgcctagcaatgcagcttaccgcagaatacttttcgttagatcccactaaacgtgaattccctaaaagagacaacattcagttgggtggttattatcattatgcgatgttctctgacaatgtgcttgcaagtgctgtggttgtcaactctacaattgctgcatcaaaggtatgagcttagattcgtgatgcaatatttttttagtgaattcgtgaagcaataatacctggcttgctttttctgtgagcttcgtacttgctgaatgcagtacaattaaaataatggaacttcaatgtgggaactgctgcgaaaatttagatgcaatgagcatggaagggaggactgcaccatgacttcttcagtagaatcttcttttcattcagcctgtcttatttggcaggatcctggaaggatattattacatattgtaactgacgcgttgaattatcctgcaatgatgatgtggtttctgacaaacccaccaactccatcagtaatccaaatccagagcctagatgatttgaaatggttgcctggtgatttcagttccagattcaagctgaagggggttcgggatccgagatacacttctgcactcaaccacttgcgtttttatttgccagaagtgtttccatctttgagcaaggttctactcttggaccatgatgtggtagtacagaatgacttgtctggattatgggacctagatatgaagggtaaggtaaccggtgctgtcgacacatgcacctcaagtgaaggtttccgccaattggatagccttattgatttttccaatccaagcgtcttcaacgaacttgacccaaaggcttgtgcatttgcatttgggatgaacatatttgacctgaacgaatggcgcaaacagggtttgagtacaacctatcatagatggtttcaactgggcaaaagtgagaagttgtggaaggcaggaagcctgccactgggtcaggtcgtcttctacaaccggacgctgcctctggaccaccggtggcatgttctagggctcggtcatgactccagcatcggaagagatgaactcgagagtgcctctgtcatccactacagtgggaaactcaaaccctggttggagatttctatcccaaagtacagaggctactggaacagaatggacctagcaaacaatgccacaaattctcaggcgatgtcaaacaattcaactggtcagcaatttcccactccaccaccgttatggcctaggggcatgatgctgcagcaacctatggattgcagcatgatgggcaaccttaattttcctaatccatcacaaggtccaataacaacgtgggctcccattcagacaagaaatacaagttccgaatcaaccatgcttccagtctcacaatctgctctgtattggaaccattacatgaaccttgtcaggaatcctctaggatcagttcaaggaaatccttttgcagattcctttccaggttcaaatactagtacaccattgcagggttcgaatacaataccttcaatacctgtgaacttggagtctgatgctgaacatagtattcaggacatcaatagtcatgtaaagactccagcacttgttaacaaaccaaagaaaacaaaggaacaaaactttactgctgctgaagaccttctactttgtacaacatggttgcaaattagcagtgatcctattgtccacactggacaagggaaggagggactttgggcacgaatagaaaaaaggtacaacgaacaaaggggggagtacccttgtagactgaaccgagcacttagcagcagatgggacaagattcgagcagatgtcagtaagttctcgggctgctacacaagagttctccgagagaaacaaagtggcttgactgacgacgacaagacttccaaggcagctacattgtttgcacatgaagagaacaaaccattccattttatacattgctggcataaactgaagggggaacccaaatgggagagcatctgtcaaggaccttcattccgaggattacatggaaaatcatttggatcttctggtggtccaacaattggtggacaagaatctgatagtggttctgctggtttgacaggaaaacggtctcttggccgtgattctagtaaatcagagagaaagaaagctgcgtcatcatcgtcgacggaatacttaagccgtctgcaagatttaactggaaaacaaattcagcgctgcatagaaaatggtgagaagaaagaaaagtgcaatgaacaagacatggaactagagaataagaggttggacttggaagctaaaaagttaagcattcgtgaaagggaattgaaattagaagaactcagatcggccaaagaacagttgcagatgctgcagtgtactagtgaagacgatgtggatcctgaagtttggactatgatgaaggagcacaaaaaacgcttgcagcagttcatatttagtttttgataaatgtactgttgtttgacatgtcgtactagtattgtcgtatccggtttgagaacaattttctaagttcattttgttatttgttttctcaaacattataaagttgttgtaagcataagtcttgcaagacatgttggttctatttaatgttgtaacgtgtgtactacataataattcagtcgtgtgtgcaaagacctatcattattatatgttgtattcttatgttgtggtttgc

SEQ ID NO: 27780 - DNA, 2253 bp, Zea Mays
cagtcactgttcacacaacagctgctagtagccgtagcccgtaggcgagccagaggcggcccaattcgagagcggttccggcggcgtgggcggcgccgtgcctgagatcggagccccgtggcgcggtgctggcaactggcggcgcgatgtgggcggtccacgggagggagtccacggccgctgcgcttcgcctgctgctgatcgcgatcgcctgcggcctcgtcttcgcgctcctccacctccccctcccggatgaccgtgcgcgaaccgccgaccccggtgggcagcgcggcgctgctgggggcggcggggcccgcctgtcggtgcagcaggggagggttcgagaggccagaaggctgagtgtcgtcaccgaagagacagatgggcaaactgacgaaacggcggcggaagaagatgaaaggatatctaaatctcccccagacaccaaagagaagatctggatgatgcaagatcagctaattttggccaaggcgtacttgcatttcgcttctccccaaggtagtgtacatttagttcgagagctgaaattgaagataaaagagatcgaaagggcaataagccactcaagtggaggtacccatgtacctgggagtgtgttgcaaaaaataaaggcgatggagctgaccctttcaaaggctcagaggacctacccgcattgctctcagatgacgtcaaagctacgtgcaatgatgcataatagtgaagaattggtcagagcacaccaaagtgaatcttcattccttgagcaggttgctgtgaggacattacccaaaggccatcactgcctagcaatgcagcttaccgcagaatacttttcgttagatcccactaaacgtgaattccctaaaagagacaacattcagttgggtggttattatcattatgcgatgttctctgacaatgtgcttgcaagtgctgtggttgtcaactctacaattgctgcatcaaagaagaaaatttagatgcaatgagcatggaagggaggactgcaccatgacttcttcagtagaatcttcttttcattcagcctgtcttatttggcaggatcctggaaggatattattacatattgtaactgacgcgttgaattatcctgcaatgatgatgtggtttctgacaaacccaccaactccatcagtaatccaaatccagagcctagatgatttgaaatggttgcctggtgatttcagttccagattcaagctgaagggggttcgggatccgagatacacttctgcactcaaccacttgcgtttttatttgccagaagtgtttccatctttgagcaaggttctactcttggaccatgatgtggtagtacagaatgacttgtctggattatgggacctagatatgaagggtaaggtaaccggtgctgtcgacacatgcacctcaagtgaaggtttccgccaattggatagccttattgatttttccaatccaagcgtcttcaacgaacttgacccaaaggcttgtgcatttgcatttgggatgaacatatttgacctgaacgaatggcgcaaacagggtttgagtacaacctatcatagatggtttcaactgggcaaaagtgagaagttgtggaaggcaggaagcctgccactgggtcaggtcgtcttctacaaccggacgctgcctctggaccaccggtggcatgttctagggctcggtcatgactccagcatcggaagagatgaactcgagagtgcctctgtcatccactacagtgggaaactcaaaccctggttggagatttctatcccaaagtacagaggctactggaacaggtaccttaactacgataacccgcacttgcagcagtgcaacattcacggatagaggcgatggcgggtgaggtgattcgcaaggtagaactgggatatacgcaacttcgctgtagtaacttattaggagagcaagttgttgtttttttgtttctgttgctagatgccctatttgcaattttgtttgctagtagtcacaatcggtacaaaagcaaaaaaggaagaacaaaatcgagtacacgagctacagtttcactagtgatacactgaaggtttgacagaagtcaagccactagctaacattatcaataactagtgttgcctcggacctggggaagagtgcgaattccacggagctcagttagcgtgcgttggacaagatagatgtaaagttttcgcgataatatcgttctctcttacaaagaaaggggttttactactgccattt

SEQ ID NO: 27781 - DNA, 2416 bp, Zea Mays
tagcccaccaccaccacacgcctcctcacaccgggcccactactttctcgtcctcacacgtcagtgacacaagccaataccccatgtccatgaccccctgcccccaccccagcctacgatctctcacagagtcacagtcactgttcacacaacagctgctagtagccgtagcccgtaggcgagccagaggcggcccaattcgagagcggttccggcggcgtgggcggcgccgtgcctgagatcggagccccgtggcgcggtgctggcaactggcggcgcgatgtgggcggtccacgggagggagtccacggccgctgcgcttcgcctgctgctgatcgcgatcgcctgcggcctcgtcttcgcgctcctccacctccccctcccggatgaccgtgcgcgaaccgccgaccccggtgggcagcgcggcgctgctgggggcggcggggcccgcctgtcggtgcagcaggggagggttcgagaggccagaaggctgagtgtcgtcaccgaagagacagatgggcaaactgacgaaacggcggcggaagaagatgaaaggatatctaaatctcccccagacaccaaagagaagatctggatgatgcaagatcagctaattttggccaaggcgtacttgcatttcgcttctccccaaggtagtgtacatttagttcgagagctgaaattgaagataaaagagatcgaaagggcaataagccactcaagtggaggtacccatgtacctgggagtgtgttgcaaaaaataaaggcgatggagctgaccctttcaaaggctcagaggacctacccgcattgctctcagatgacgtcaaagctacgtgcaatgatgcataatagtgaagaattggtcagagcacaccaaagtgaatcttcattccttgagcaggttgctgtgaggacattacccaaaggccatcactgcctagcaatgcagcttaccgcagaatacttttcgttagatcccactaaacgtgaattccctaaaagagacaacattcagttgggtggttattatcattatgcgatgttctctgacaatgtgcttgcaagtgctgtggttgtcaactctacaattgctgcatcaaagtacaattaaaataatggaacttcaatgtgggaactgctgcgatgcaatgagcatggaagggaggactgcaccatgacttcttcagtagaatcttcttttcattcagcctgtcttatttggcaggatcctggaaggatattattacatattgtaactgacgcgttgaattatcctgcaatgatgatgtggtttctgacaaacccaccaactccatcagtaatccaaatccagagcctagatgatttgaaatggttgcctggtgatttcagttccagattcaagctgaagggggttcgggatccgagatacacttctgcactcaaccacttgcgtttttatttgccagaagtgtttccatctttgagcaaggttctactcttggaccatgatgtggtagtacagaatgacttgtctggattatgggacctagatatgaagggtaaggtaaccggtgctgtcgacacatgcacctcaagtgaaggtttccgccaattggatagccttattgatttttccaatccaagcgtcttcaacgaacttgacccaaaggcttgtgcatttgcatttgggatgaacatatttgacctgaacgaatggcgcaaacagggtttgagtacaacctatcatagatggtttcaactgggcaaaagtgagaagttgtggaaggcaggaagcctgccactgggtcaggtcgtcttctacaaccggacgctgcctctggaccaccggtggcatgttctagggctcggtcatgactccagcatcggaagagatgaactcgagagtgcctctgtcatccactacagtgggaaactcaaaccctggttggagatttctatcccaaagtacagaggctactggaacaggtaccttaactacgataacccgcacttgcagcagtgcaacattcacggatagaggcgatggcgggtgaggtgattcgcaaggtagaactgggatatacgcaacttcgctgtagtaacttattaggagagcaagttgttgtttttttgtttctgttgctagatgccctatttgcaattttgtttgctagtagtcacaatcggtacaaaagcaaaaaaggaagaacaaaatcgagtacacgagctacagtttcactagtgatacactgaaggtttgacagaagtcaagccactagctaacattatcaataactagtgttgcctcggacctggggaagagtgcgaattccacggagctcagttagcgtgcgttggacaagatagatgtaaagttttcgcgataatatcgttctctcttacaaagaaaggggttttactactgccattt

SEQ ID NO: 27782 - DNA, 4886 bp, Zea Mays
acctcgaacgcgatggcggcgccgctcgcccctctcactgcggccgcggtgctccgcctcgggagccgaggcctgcgccaccgcatcctcctcgcttcgctccgcccctgctcctccgcaaccccgccccatcgttccgccctcccggccgctgcacgccgggccccgccgcctcctcgccgtttcgcccacactcttgccgcgtctgcggccacggccatctccgagggtcaggcggatttagtgcctggttcaacaacttcaaccaagggacgcatctaccacgagacgtatggttgccaaatgaatataaatgacatggagattgtgctttctatcatgaaaaatgaaggctatgatgaaattgtccctgatcctgagagtgcagagataatatttatcaacacctgtgccatccgggacaatgcagagcagaaagtctggcagcgtctcaactacttttggtttttgaaaagggaatggaaagctaatgttgctgaaggtagagcaaaatctatgcgtcctccaaagattgctgtcctggggtgcatggcagaacgactgaaggagaaaatactcgattctgataagatggttgatgttgtttgtggacctgatgcatatagggatttgcctaggttgcttcaggaagtcgattacggccacaagggcatgaacacacttctatcactcgaggaaacttatgctgatatcaccccagtaaggatctctgacaattcaattacggcatttgtgtcaatcatgagaggttgcaataatatgtgctcattctgcatagttcccttcactagaggtagggaaaggtctcgcccagtgtcttctattgtccgtgaggttggtgagctatggaaagttggtgtgaaggaggtaatgcttcttggtcagaatgtaaacagctataatgacacttctgaagtagaagagttggagcctggcaaaaattggcaactcagtgaaggattttccagcatgtgcaaggtgaagaatatggggctgcgttttgctgatctcctggatcgattatctttggaataccctgagatgcggttcaggtttacctcaccacacccaaaggatttcccagatgagctactgtatttgatgcgggataggtataacatctgcaatcttattcacttaccagcacaaacaggcagtacagcggcgctggaacgaatgcggaggggttacactcgagaagcatacttagaacttgtccacaaaattcgtgatgtcattcctgatgttgggctaagcagtgatttcataactggcttttgtggagagacagaagacgagcacgccgagacccttagccttgtgagggctgttggatacgacatggcctacatgtttgcatacagcatgagagagaagacccacgctcaccggaactacgaggacgatgtacccgaaggtgtgaaacagaggcggctcatggaactgatcaacactttccgcgagaccacgaagaagaactacgactctcaagtcggcacagtgcagctcgttctcgtggaggggcccaacaagcgtgctcccaaaacggaagtgatagggaagactgatcggggccacaaggtgtcgtttgcccgcgtccctgtcccgcacacgttcgaaggcgaagaagcacgtgagccggcagtcggtgacttcgtcgagccaaatttctgtgcggtgttggtcctcccggaacaaattctgtgcagtgtcgcgaaaagcagcatacgcgcaaattcaaaaccacagattcacagcactacgctgcaaatcaaaacaaaactgaacgactcgagggagccctcgactgtcgaccatctccagccgtctatccgcggtcggacggtccaaacacgcatcaaatcaaacggacgaaaatatccccaatcccctaaaccccgttcgttgcccaccaacgccaccctctgtcatccaccaccatccatggccatggcgtcctccccggcctgccacttccgccacccgccccgcctccgcctcctcctcccgctgtccacctcggccccccacccgtggctctactcctggtcgcacccgcgccagcgcggccgactccgcgcgccgcccgccgcgctcgacctccgtccggagccgtccccgtcgtccgactccgacgatgaggacgccgtcggtgccagccgctcctccggccgctccaccatgtccctcatcctcagccgcctccgccgcgccggctactccggcgaggacccgcgtgccgccgccccaccgcacccgccgcgggggtcggtcgaggacgtcttccgcgccgacgatggcgtgctccccaacgcgcgcggcgggttcgacgccgacgacgaggagcgggcgctcggggacgcccgcttcccgtgggagcgccccatgccgccgcccgaggccgcgccgcggtccgcgcggtcgcccacgtggatggcggagctgacgctccccgccgcggagctcaggcggctgcggcacgccgccatcaggatcaagtccaggaccaaggtgggcggggccggggtcacgcgcgagatcgtggagaagattaaggagaaatggaagacggaggaggtggtcagggtcaaggtctctggcacgccggcgctcaatatgcgcctcttccacgagatactcgagagaaaaacaggaggattagtaatatggagatcagggacttctgtttctctgtaccggggagtagattatgatgaaccagaacccactaagaaatcaaagaagaattcacagtctcttgctatggatttcccaattaaggggtcttctaatccttccttactaccaactgagacagcgaacagtgtacgagacagcaatgtagctttagtttctaatgctgcgaaagaggaactagttgtacaagcaccagaaatcaagtatgaagatgaaattgacaaactgttggatgaacttggcccaagatacactgactggcctggatctgacccgttaccagtagatgcagatttacttcctgcaaacatgccaggttacaagccccctttcagagttctgccatatggtgttcggccatctcttagccgaagggacactaccaatttacgccgtcttgctcggggactgcctcctcactttgctctcggacgaagcagacaactccaaggcttagctaatgctatggtaaagttgtgggagaaaagttctattgctaaaattgctttgaagagaggagtacagcttaccaccagtgagaggatggctgaagatattaaaaaattaacaggtggtgtgatgctttcaaggaacaatgaatttatagtcttctacagagggaaggatttcttgtcctcagaacttgcagaggtgctactagagagggaaagattagcaaagtcacttcaagatgaagaagaagcacggcgaaaggcagcgtcttatttttcaagtgctgagacatatgcacagcccactgtagctggtactctaggagagactctggaggctaactctaaatatggaactaaacatgatgagaatcatgcagacaaaatggcaagaactattgaagctgcaagacatgctgacctcgtaagaaagctagagtggaagctttcacttgcacagaaaaagatggagaaagccgaaagggtactaggaaaggttgagacagccctgaggccaaccgaagattccagacctcctgaaacaataacagatgaagagagattcatgttccggaagcttggtctaaggatgaaggcatttctgctccttggaagaagaggagtttttgacggcacaattgagaacatgcacttgcactggaagtacagggagctggtgaagatactagtgaaagcgaagtcttttgcagacgtgaagaggatagcactgtcgctggaagccgagagcgggggaatcctagtttcagtcgacaaagtctccaaaggctatgccattgttgtgttccgagggaagaactacagacgcccttcctcgctcagacctagaaatctcctgtcaaagcggaaggctttggccagatccatcgagctccagagacatcaggccctgagtcgtcatttcgcaaagctaaacaggaaggtggagcggcttaaggcagaactggtccagatggaagacgtgaaggagcaaggagacgaggagctgtacgccaaactggatgccgcctattcgagcgacgacgaagacatggaggatgaggacgacgaggcctacctcaagcgctttgacaatgaggtcgccggtgctaccgccgacgacgatggcagcgacgactacacctccgccgccgacgaggccgattaccccgactcagacgacgaagctggtgattgctccgaagacgaaggcgaggacgacgaagatgaggcggctgccggagtctctgacgctggcttccacggcgaagtagtaggtttcagttccgacaccgacagacgaaaccacgacgtaaatgagtactagaacagtgctggttgtttgatgcatcggcgtcagcgcttcacgtggggttcgtcaggcttcgctggctggaatgcgcgtggtgtaggtggaaggccctacgctgcttggcggtgccggtgctgctgggggcgcatgaacgatgaatcctgcggctgacgccctcgtttccggcctcgggcccaatgcatcgagccaggaaggtgtccgctcctcaccgcgagagcaggcagttcgactttgcgcgtaccgtacgcaaccttccgtgttcctttgcatggtgactggtgaggtaatgccaaaacatcacagagcggtgagcactgcactttgtacgaaacgcgcaggacaatccactgtccatacccataagacataaaatacgtactccttct

SEQ ID NO: 27783 - DNA, 4887 bp, Zea Mays
ctgcgatccattgtcgagcttcgaggaatcgacggtcaagctttggcgaccaagtgatcgaactcttcgagcgggtatgaatgagtatggttgtgggtggggccaagaacatcaaattcacattggagcaacatatgttctttgcaatattagtttggtaatttgaggtggcagacgatattactccaatcaagattgagaacttcgattgatctctgagagagtggtgtccggttcgagtttagtgcctggttcaacaacttcaaccaagggacgcatctaccacgagacgtatggttgccaaatgaatataaatgacatggagattgtgctttctatcatgaaaaatgaaggctatgatgaaattgtccctgatcctgagagtgcagagataatatttatcaacacctgtgccatccgggacaatgcagagcagaaagtctggcagcgtctcaactacttttggtttttgaaaagggaatggaaagctaatgttgctgaaggtagagcaaaatctatgcgtcctccaaagattgctgtcctggggtgcatggcagaacgactgaaggagaaaatactcgattctgataagatggttgatgttgtttgtggacctgatgcatatagggatttgcctaggttgcttcaggaagtcgattacggccacaagggcatgaacacacttctatcactcgaggaaacttatgctgatatcaccccagtaaggatctctgacaattcaattacggcatttgtgtcaatcatgagaggttgcaataatatgtgctcattctgcatagttcccttcactagaggtagggaaaggtctcgcccagtgtcttctattgtccgtgaggttggtgagctatggaaagttggtgtgaaggaggtaatgcttcttggtcagaatgtaaacagctataatgacacttctgaagtagaagagttggagcctggcaaaaattggcaactcagtgaaggattttccagcatgtgcaaggtgaagaatatggggctgcgttttgctgatctcctggatcgattatctttggaataccctgagatgcggttcaggtttacctcaccacacccaaaggatttcccagatgagctactgtatttgatgcgggataggtataacatctgcaatcttattcacttaccagcacaaacaggcagtacagcggcgctggaacgaatgcggaggggttacactcgagaagcatacttagaacttgtccacaaaattcgtgatgtcattcctgatgttgggctaagcagtgatttcataactggcttttgtggagagacagaagacgagcacgccgagacccttagccttgtgagggctgttggatacgacatggcctacatgtttgcatacagcatgagagagaagacccacgctcaccggaactacgaggacgatgtacccgaaggtgtgaaacagaggcggctcatggaactgatcaacactttccgcgagaccacgaagaagaactacgactctcaagtcggcacagtgcagctcgttctcgtggaggggcccaacaagcgtgctcccaaaacggaagtgatagggaagactgatcggggccacaaggtgtcgtttgcccgcgtccctgtcccgcacacgttcgaaggcgaagaagcacgtgagccggcagtcggtgacttcgtcgagccaaatttctgtgcggtgttggtcctcccggaacaaattctgtgcagtgtcgcgaaaagcagcatacgcgcaaattcaaaaccacagattcacagcactacgctgcaaatcaaaacaaaactgaacgactcgagggagccctcgactgtcgaccatctccagccgtctatccgcggtcggacggtccaaacacgcatcaaatcaaacggacgaaaatatccccaatcccctaaaccccgttcgttgcccaccaacgccaccctctgtcatccaccaccatccatggccatggcgtcctccccggcctgccacttccgccacccgccccgcctccgcctcctcctcccgctgtccacctcggccccccacccgtggctctactcctggtcgcacccgcgccagcgcggccgactccgcgcgccgcccgccgcgctcgacctccgtccggagccgtccccgtcgtccgactccgacgatgaggacgccgtcggtgccagccgctcctccggccgctccaccatgtccctcatcctcagccgcctccgccgcgccggctactccggcgaggacccgcgtgccgccgccccaccgcacccgccgcgggggtcggtcgaggacgtcttccgcgccgacgatggcgtgctccccaacgcgcgcggcgggttcgacgccgacgacgaggagcgggcgctcggggacgcccgcttcccgtgggagcgccccatgccgccgcccgaggccgcgccgcggtccgcgcggtcgcccacgtggatggcggagctgacgctccccgccgcggagctcaggcggctgcggcacgccgccatcaggatcaagtccaggaccaaggtgggcggggccggggtcacgcgcgagatcgtggagaagattaaggagaaatggaagacggaggaggtggtcagggtcaaggtctctggcacgccggcgctcaatatgcgcctcttccacgagatactcgagagaaaaacaggaggattagtaatatggagatcagggacttctgtttctctgtaccggggagtagattatgatgaaccagaacccactaagaaatcaaagaagaattcacagtctcttgctatggatttcccaattaaggggtcttctaatccttccttactaccaactgagacagcgaacagtgtacgagacagcaatgtagctttagtttctaatgctgcgaaagaggaactagttgtacaagcaccagaaatcaagtatgaagatgaaattgacaaactgttggatgaacttggcccaagatacactgactggcctggatctgacccgttaccagtagatgcagatttacttcctgcaaacatgccaggttacaagccccctttcagagttctgccatatggtgttcggccatctcttagccgaagggacactaccaatttacgccgtcttgctcggggactgcctcctcactttgctctcggacgaagcagacaactccaaggcttagctaatgctatggtaaagttgtgggagaaaagttctattgctaaaattgctttgaagagaggagtacagcttaccaccagtgagaggatggctgaagatattaaaaaattaacaggtggtgtgatgctttcaaggaacaatgaatttatagtcttctacagagggaaggatttcttgtcctcagaacttgcagaggtgctactagagagggaaagattagcaaagtcacttcaagatgaagaagaagcacggcgaaaggcagcgtcttatttttcaagtgctgagacatatgcacagcccactgtagctggtactctaggagagactctggaggctaactctaaatatggaactaaacatgatgagaatcatgcagacaaaatggcaagaactattgaagctgcaagacatgctgacctcgtaagaaagctagagtggaagctttcacttgcacagaaaaagatggagaaagccgaaagggtactaggaaaggttgagacagccctgaggccaaccgaagattccagacctcctgaaacaataacagatgaagagagattcatgttccggaagcttggtctaaggatgaaggcatttctgctccttggaagaagaggagtttttgacggcacaattgagaacatgcacttgcactggaagtacagggagctggtgaagatactagtgaaagcgaagtcttttgcagacgtgaagaggatagcactgtcgctggaagccgagagcgggggaatcctagtttcagtcgacaaagtctccaaaggctatgccattgttgtgttccgagggaagaactacagacgcccttcctcgctcagacctagaaatctcctgtcaaagcggaaggctttggccagatccatcgagctccagagacatcaggccctgagtcgtcatttcgcaaagctaaacaggaaggtggagcggcttaaggcagaactggtccagatggaagacgtgaaggagcaaggagacgaggagctgtacgccaaactggatgccgcctattcgagcgacgacgaagacatggaggatgaggacgacgaggcctacctcaagcgctttgacaatgaggtcgccggtgctaccgccgacgacgatggcagcgacgactacacctccgccgccgacgaggccgattaccccgactcagacgacgaagctggtgattgctccgaagacgaaggcgaggacgacgaagatgaggcggctgccggagtctctgacgctggcttccacggcgaagtagtaggtttcagttccgacaccgacagacgaaaccacgacgtaaatgagtactagaacagtgctggttgtttgatgcatcggcgtcagcgcttcacgtggggttcgtcaggcttcgctggctggaatgcgcgtggtgtaggtggaaggccctacgctgcttggcggtgccggtgctgctgggggcgcatgaacgatgaatcctgcggctgacgccctcgtttccggcctcgggcccaatgcatcgagccaggaaggtgtccgctcctcaccgcgagagcaggcagttcgactttgcgcgtaccgtacgcaaccttccgtgttcctttgcatggtgactggtgaggtaatgccaaaacatcacagagcggtgagcactgcactttgtacgaaacgcgcaggacaatccactgtccatacccataagacataaaatacgtactccttct

SEQ ID NO: 27784 - DNA, 1961 bp, Zea Mays
acctcgaacgcgatggcggcgccgctcgcccctctcactgcggccgcggtgctccgcctcgggagccgaggcctgcgccaccgcatcctcctcgcttcgctccgcccctgctcctccgcaaccccgccccatcgttccgccctcccggccgctgcacgccgggccccgccgcctcctcgccgtttcgcccacactcttgccgcgtctgcggccacggccatctccgagggtcaggcggatttagtgcctggttcaacaacttcaaccaagggacgcatctaccacgagacgtatggttgccaaatgaatataaatgacatggagattgtgctttctatcatgaaaaatgaaggctatgatgaaattgtccctgatcctgagagtgcagagataatatttatcaacacctgtgccatccgggacaatgcagagcagaaagtctggcagcgtctcaactacttttggtttttgaaaagggaatggaaagctaatgttgctgaaggtagagcaaaatctatgcgtcctccaaagattgctgtcctggggtgcatggcagaacgactgaaggagaaaatactcgattctgataagatggttgatgttgtttgtggacctgatgcatatagggatttgcctaggttgcttcaggaagtcgattacggccacaagggcatgaacacacttctatcactcgaggaaacttatgctgatatcaccccagtaaggatctctgacaattcaattacggcatttgtgtcaatcatgagaggttgcaataatatgtgctcattctgcatagttcccttcactagaggtagggaaaggtctcgcccagtgtcttctattgtccgtgaggttggtgagctatggaaagttggtgtgaaggaggtaatgcttcttggtcagaatgtaaacagctataatgacacttctgaagtagaagagttggagcctggcaaaaattggcaactcagtgaaggattttccagcatgtgcaaggtgaagaatatggggctgcgttttgctgatctcctggatcgattatctttggaataccctgagatgcggttcagcacaaacaggcagtacagcggcgctggaacgaatgcggaggggttacactcgagaagcatacttagaacttgtccacaaaattcgtgatgtcattcctgatgttgggctaagcagtgatttcataactggcttttgtggagagacagaagacgagcacgccgagacccttagccttgtgagggctgttggatacgacatggcctacatgtttgcatacagcatgagagagaagacccacgctcaccggaactacgaggacgatgtacccgaaggtgtgaaacagaggcggctcatggaactgatcaacactttccgcgagaccacgaagaagaactacgactctcaagtcggcacagtgcagctcgttctcgtggaggggcccaacaagcgtgctcccaaaacggaagtgatagggaagactgatcggggccacaaggtgtcgtttgcccgcgtccctgtcccgcacacgttcgaaggcgaagaagcacgtgagccggcagtcggtgacttcgtcgaggtgagaattctcaggtcgtcgacagcaacgttgttcggggagccgattgcacgcacaagcctgagcgcgttccacagaaatgtttcacccggagcgcaggctgctgctgcgtgagtagcggttgaatttttggttgtggattgaaatatgtagtgatattttaaatgactagagtttttgatatagaggagaaactgagaacgtgcatgtcagcctcatgagccttggtcatttacttttttgataaggttgtattgccatgtaaaggtcaaacaatgttgacaaagttttttgcttgttactatgaagtatgaacgtcagcttgagatggctttttacagcagggataatgacccagactgactatgtc

SEQ ID NO: 27785 - DNA, 2149 bp, Zea Mays
atcagggaagcctatcatgccaggacgaactgaggtattttggcggtgacctgcaaatcatctcgatggaaggtagtattatgccatcataatactaccttaaagtgaggagacgtaacgacgagctcgctttcacacagatgatcaatatggtcaaggtgcggcacaacaatgtggttccaaccatggccttgggagtgcagcagctgaagaaggagctgggacgatcaaggaaggttccattcgagttcgatgagatccacgagttccttgaccggttctacatgtcaaggattggcatccacatgctgatagggcagcatgtggctttgcatgaccctaaaccggagcctggtgtcataggcatcatcaatacaagattatccccaatccaggtggctcaagctgcttgtgaagatgcatgttctgtctgtttaagggaatatgtatcaactcctgatattaacatttatggcgatccaaattttacatttccaactctctccgtgcggtgcaagaacggtatatgaactctgataaagatgttcccccagttagaattacagttgctgatggagaagtggatgtcactatcaaggttagcgatgaaggtggcgggataccaagaagcagcctcccaagaatttttcacgtatctgtacagcactgcaaagaatcctcctgagctagatagacctaatactgaaggggtaactatggagtatcacatctgttggagagaatggccttcaagagcacagtgaatcggacccacttacggttagttcgtgaggtagaagcaattggaggaaatgtctctgcatcagcttcctgtgaacaaatgagctatacctatgatgcattgaagagctatacaccagaaatggttgaagttctcattgacaatgtgaggaatccagcattccttgattgggaggtcaaagagcagacccatgatagattagcttgtattgttgagatggagagaatgcaagtttgaatggctctgtgccacttgatgtacatgagagattggataagaagctttgtgcatatggccaacgacgccttcggcaggagagtcgccaaacttcttggcgatgtctttcatgtgttgcttttagttcttttaaagactcctctgagtgttgtatctgaccgagaacaattatttcgtgatgattggggtaattgggctgcccggtgtaggcaagtcaaccatcatgaacgagctttattaatatgatgcaagctacctggtttggtggtaatgcttatgtgattggtgattctgcaaagcataagcagaagtggcacgtctactatgccaccactgagcacccctaaggagcttgttgttactcttgagatgtgcatgactaggctggacaagaagagagcttatgtcttcttcaagacctctattgatggttacacatcttgtgctaaggatatgaccaagccttcagtgattgtcatagccttctatttattatttcttctgaattcgagtttcaagacaaagaacatatttaagaatttgaccagaagtcaagcatcaaccatgtcgagattagcgtgcatgatatggttagttcttgtttgctaagcataactctgaccagtggcatcgtcaaggagtgcgtcgtgaccagtggtgctggcagcaaggccatggcactcagggtccatgggtcgtgggtgtggcttgttcagcgcctactattcgcgggagtcggcgaggtgcctgctgaacttggtggaagtggagtacaattatgatgctgacatcgacctcgtgttcatcgacctgcccgtgctagagcaggagcggtaccggtggacactggagattgtggtgtaggccatgacgcgtgggcgtcgacgtcagcgcttgtcttcgcgtctgagccactctgagttggagaccattgccatttgtgatgtgcatgagagatgtattgtggcgtcttgttgtataattggtatggagagagtatgttttgctatgtccgtatttgcatactctacatgctctgaatgttgtataacactggacaataaatgatgatgtcccttcaataggaatctcatctctaaacaattaataggaatctgatcttctttactttgatcctgtattattaac

SEQ ID NO: 27786 - DNA, 2468 bp, Zea Mays
gagttgctatcagggaagcctatcatgccaggacgaactgagggcagcatgtggctttgcatgaccctaaaccggagcctggtgtcataggcatcatcaatacaagattatccccaatccaggtggctcaagctgcttgtgaagatgcatgttctgtctgtttaagggaatatgtatcaactcctgatattaacatttatggcgatccaaattttacatttccatacgtcacattacacctacacctgatgttatttgaattggtgaagaactctctccgtgcggtgcaagaacggtatatgaactctgataaagatgttcccccagttagaattacagttgctgatggagaagtggatgtcactatcaaggttagcgatgaaggtggcgggataccaagaagcagcctcccaagaatttttcacgtatctgtacagcactgcaaagaatcctcctgagctagatagacctaatactgaaggggtaactatggagtatcacatctgttggagagaatggccttcaagagcacagtgaatcggacccacttacggttagttcgtgaggtagaagcaattggaggaaatgtctctgcatcagcttcctgtgaacaaatgagctatacctatgatgcattgaagagctatacaccagaaatggttgaagttctcattgacaatgtgaggaatccagcattccttgattgggaggtcaaagagcagacccatgatagattagcttgtattgttgagatggagagaatgcaagtttgaatggctctgtgccacttgatgtacatgagagattggataagaagctttgtgcatatggccaacgacgccttcggcaggagagtcgccaaacttcttggcgatgtctttcatgtgttgcttttagttcttttaaagactcctctgagtgttgtatctgaccgagaacaattatttcgtgatgattggggtaattgggctgcccggtgtaggcaagtcaaccatcatgaacgagctttattaatatgatgcaagctacctgctgctttccagtgacaaaaacgattccaagaaaccacttcttgtcttcctccactggctgtctgtcatcttgctctaaaacaatcgcagtcctgcaagttgttgctgctgctcctacccctgcctctgcaattgggtttgagggatatgagaagcgcctcgagatcagcttctatgaggcacctgtcttcgctgaccccaacggaaggggattgtgtgcactcttgcgtccctagatttactctatttctgaccatgcacggtgcaccgttgtctctgagctatcaaacgaggactttgactcttatgtcttatctgagtcaagcctgtttgtctacccatacaagattctgatcaagacctgtgggactacaaagcttctgctcggtattctgaggatccttgagcttgctaaagagctctcattgccacttgttgcagctaaatactcccgtgggacattcatattccctgatgcacaaccttccccacacaagaactttgatgatgaggttaccttcctaaatcacttcttcgatggcctcaggtttggtggtaatgcttatgtgattggtgattctgcaaagcataagcagaagtggcacgtctactatgccaccactgagcacccctaaggagcttgttgttactcttgagatgtgcatgactaggctggacaagaagagagcttatgtcttcttcaagacctctattgatggttacacatcttgtgctaaggatatgaccaagccttcagtgattgtcatagccttctatttattatttcttctgaattcgagtttcaagacaaagaacatatttaagaatttgaccagaagtcaagcatcaaccatgtcgagattagcgtgcatgatatggttagttcttgtttgctaagcataactctgaccagtggcatcgtcaaggagtgcgtcgtgaccagtggtgctggcagcaaggccatggcactcagggtccatgggtcgtgggtgtggcttgttcagcgcctactattcgcgggagtcggcgaggtgcctgctgaacttggtggaagtggagtacaattatgatgctgacatcgacctcgtgttcatcgacctgcccgtgctagagcaggagcggtaccggtggacactggagattgtggtgtaggccatgacgcgtgggcgtcgacgtcagcgcttgtcttcgcgtctgagccactctgagttggagaccattgccatttgtgatgtgcatgagagatgtattgtggcgtcttgttgtataattggtatggagagagtatgttttgctatgtccgtatttgcatactctacatgctctgaatgttgtataacactggacaataaatgatgatgtcccttcaataggaatctcatctctaaacaattaataggaatctgatcttctttactttgatcctgtattattaac

SEQ ID NO: 27787 - DNA, 2630 bp, Zea Mays
atggtgctgctgttgatctatggagtgccggttgcattcttgctgagttgctatcagggaagcctatcatgccaggacgaactgagatgatcaatatggtcaaggtgcggcacaacaatgtggttccaaccatggccttgggagtgcagcagctgaagaaggagctgggacgatcaaggaaggttccattcgagttcgatgagatccacgagttccttgaccggttctacatgtcaaggattggcatccacatgctgatagggcagcatgtggctttgcatgaccctaaaccggagcctggtgtcataggcatcatcaatacaagattatccccaatccaggtggctcaagctgcttgtgaagatgcatgttctgtctgtttaagggaatatgtatcaactcctgatattaacatttatggcgatccaaattttacatttccaactctctccgtgcggtgcaagaacggtatatgaactctgataaagatgttcccccagttagaattacagttgctgatggagaagtggatgtcactatcaaggttagcgatgaaggtggcgggataccaagaagcagcctcccaagaatttttcacgtatctgtacagcactgcaaagaatcctcctgagctagatagacctaatactgaaggggtaactatggagtatcacatctgttggagagaatggccttcaagagcacagtgaatcggacccacttacggttagttcgtgaggtagaagcaattggaggaaatgtctctgcatcagcttcctgtgaacaaatgagctatacctatgatgcattgaagagctatacaccagaaatggttgaagttctcattgacaatgtgaggaatccagcattccttgattgggaggtcaaagagcagacccatgatagattagcttgtattgttgagatggagagaatgcaagtttgaatggctctgtgccacttgatgtacatgagagattggataagaagctttgtgcatatggccaacgacgccttcggcaggagagtcgccaaacttcttggcgatgtctttcatgtgttgcttttagttcttttaaagactcctctgagtgttgtatctgaccgagaacaattatttcgtgatgattggggtaattgggctgcccggtgtaggcaagtcaaccatcatgaacgagctttattaatatgatgcaagctacctgtgacaaaaacgattccaagaaaccacttcttgtcttcctccactggctgtctgtcatcttgctctaaaacaatcgcagtcctgcaagttgttgctgctgctcctacccctgcctctgcaattgggtttgagggatatgagaagcgcctcgagatcagcttctatgaggcacctgtcttcgctgaccccaacggaaggggattgtgtgcactcttgcgtccctagatttactctatttctgaccatgcacggtgcaccgttgtctctgagctatcaaacgaggactttgactcttatgtcttatctgagtcaagcctgtttgtctacccatacaagattctgatcaagacctgtgggactacaaagcttctgctcggtattctgaggatccttgagcttgctaaagagctctcattgccacttgttgcagctaaatactcccgtgggacattcatattccctgatgcacaaccttccccacacaagaactttgatgatgaggttaccttcctaaatcacttcttcgatggcctcaggtttggtggtaatgcttatgtgattggtgattctgcaaagcataagcagaagtggcacgtctactatgccaccactgagcacccctaaggagcttgttgttactcttgagatgtgcatgactaggctggacaagaagagagcttatgtcttcttcaagacctctattgatggttacacatcttgtgctaaggatatgaccaagccttcagtgattgtcatagccttctatttattatttcttctgaattcgagtttcaagacaaagaacatatttaagaatttgaccagaagtcaagcatcaaccatgtcgagattagcgtgcatgatatggttagttcttgtttgctaagcataactctgaccagtggcatcgtcaaggagtgcgtcgtgaccagtggtgctggcagcaaggccatggcactcagggtccatgggtcgtgggtgtggcttgttcagcgcctactattcgcgggagtcggcgaggtgcctgctgaacttggtggaagtggagtacaattatgatgctgacatcgacctcgtgttcatcgacctgcccgtgctagagcaggagcggtaccggtggacactggagattgtggtgtaggccatgacgcgtgggcgtcgacgtcagcgcttgtcttcgcgtctgagccactctgagttggagaccattgccatttgtgatgtgcatgagagatgtattgtggcgtcttgttgtataattggtatggagagagtatgttttgctatgtccgtatttgcatactctacatgctctgaatgttgtataacactggacaataaatgatgatgtcccttcaataggaatctcatctctaaacaattaataggaatctgatcttctttactttgatcctgtattattaac

SEQ ID NO: 27788 - DNA, 1004 bp, Zea Mays
aaagaattcgccttgtgcccattctggagtcctgggtctcttgaaacctctaggatgttggaactcatttcttttccattgtgaagtatatttattgatcaaaaattcagaagttggtttaaagacagactgaaccctttttctctcgtttattttccacacaccgacttctggactcttcggttttatcatcttgagtttaagatcatcagagataaccacattcttgtctttagtagtttcggcctgatctgtccgaactaacactcttttgccctcgaaatcaattacattgatagggaacggatctttatcaagcttcattttgctagcttctccaaatgtcaatcgtccatcagctagggccgattgtatctgacgacgaaaataattacactcgttagtagaatgagaaaatgaattatgccatttacaataatctttcttagccaattgctcaggtggtggaatcacatgcccctcccttaatctaatgatgttattctgtaataagatgtcaaacaatttatcacacttggacacatcaaatgtatatttcatttcttcccttttccctggacttggctttaaaaaagcacacgtcatgggcctaccctttggcgcatctacccattcagccacacatacatctgtctcttcatcactgtcattattgggctctaacatgttaaccccctgtttctctttctccctgccattcgtatctctaaatcggctatactgtttattgtccctagcacgactttcatgggtgatagcacgctgcatgacttggtttatgtcagtaaaatcttgcccctctaatttctccctcagataggatgataatcctgcgaaagctaaatcggccagatccttttcccctaaagttaagctataacatttgtttcttgtttctctaaaccttctaatgtattcagaaacagtttcattatatttctgcctaaccatggtaagatgtgatagcctgagttcagtatcac

SEQ ID NO: 27789 - DNA, 196 bp, Zea Mays
ttttttttcatgtccatactagtttttatgagaaagtaaacactctaaattatcacaataatgttgtcccatcgccacagaacgcattagtagaacttgaacacaacagccagccacaacttggtgagttaaggttgtcttgggttttcacaaagtccccctgtgggcagtggtggtaggtggcagcaagtgcacc

SEQ ID NO: 27790 - DNA, 1525 bp, Zea Mays
gttttttttgcccaaaatcatgatatggtttccacgtcatgaaatcgacctaaacttcgttttttttttgccaaattgtccgtgttagcaccgcttgcacaataatggaacaaatgtcaaaaccatcgggggcaaaaggataggagaataaggaaaaaacaatggcggtgctactccgccgcgccgcggcgctcctcgtcgtggctgctgtctgcgcggacggcgcctccacgttctactcctccgaccccaacctcggatccgcccgcgtcgtcttccagacgaattttggtgatattgagtttggcttctttcctcatgttgcacctaagactgtcgaacacattttcaaacttgtgcggcttggatgctacattacaaatcacttcttccgggttgacaagggtttcgttgcacaagttgctgatgttatgtcaggtcgaaccgcccctatgaatgaggagcagaaaaaagaagcggagaaaacaattgttggtgaatttagtagtgtcaagcatgtcaggggaatcctctccatgggaaggtgctttctgttgataactagagcaggccactgtcttctaacatatcatcttaaagccttctggttctgtcctaaaataaacgagcatttagtattttttctacgtacttgaaaacttcaacaatgattattaagttgtttatttatttggaaaaagtttaaggtcactacttgtggttttccatacttttatttgtagttatgtacatatccagaggaatgcaatgtatgttgaaataacaaagctctggaaaacatttttattagtttcctttgcatgtaagctaacagtttctgtttctcataacatgtaaatgttttcattccttccacaaggcactctgatccagacagtgctggctcttccttttctattcttctgggcaattcaccgcatcttgatggccagtatgctgtatttgggagggtcactaaaggtgacgatacattgactaaactagagaggcttccaacccggagagaaggcatttttgtaatgccgatcgagcgtatcaacatcctatcaacttactattatgatattgatctagagagctgtgaagcagaaaaatctattctccggaggagactttctgaatcagcatcagaagttgagcgatggagaagaaaatgctttgcttaatggtggaataaggactgcatattccgtttcatgatgctggatggtttcctgaggctggatatggacgacggtgtggaaatgtgtatgccgcgtgttcttatgctatcactgtaatacttgagtagatgttagatgggtcctaaggttccacatggatcttgtttgtaacacatgagcagatgagttgttacaataaaccttcaattcgtttagttttgtcttcggcttccccaattgtagtttgaggctgcgctgcacctgatggcatttttagtttgaatcatgtctttgttctcttgggaaaaaaaagcccttggcaaagactacgaagatgacat

SEQ ID NO: 27791 - DNA, 3453 bp, Zea Mays
ggttcaaatccagcccccggtgcatcatcagattggaggcgactaaggatccaagccaatatcacggaccacaacatcaagtgtatgaggcagggcaaagaggccaacaggttttcctcatttttattagatcctttcttagcgatcttggatctccactctccaggactccagggtttgccgtttgcttgacgatcacacgtatcaaaaagggttctcaagtattattgtccttcttgcttgctttcacatttggggtgttctgctataatttacgttgattatttttcccttgcaatttggcatgcatacaaacatttgctctctatttttctatccaacataattcatgatttaaataaaggaactatttcttaaaagtcttctatttagtttcatcctttggaaaacaactctgctactaatgtgctgccccagaccccagttttacttctatttgacctgccagtgaaagcatttggagattttcttttaatccaccgtgaagcaaattcatggctaaatgctgcaacgtttagtctgtagcagtgtcctacttcttcctacttattaattagttgatggctacttccgtatgagttaacaacttatatgtgagagggcgaacgagacagagttgaaaaccctgcatccatccaatctggacatacataaaagttgtcataaagaaaggcacttgtccaggaaaaatgttttattgactgtcctgctgttcctttccccgctaaataatgtatcaagttaaaacttagctgagataatgtcaacttaagcttttccatgtcggcatatgtgcttcccacaatcttcggatggtcttttttttaaaaaaatctttggcctgcttcatcaagaactagatttgatcatgttcttctctgtgttgatgaattatctacagtttagctataaacacatctgaaatgttagtctattgaaggatacttggatactgaagccatgcatctttaaattgttaacttttctttttgtggtttagtatggatgaataaaaggggaaaaagcaaaagggaacaagcatcctctgatttttattttgatgatgcaatcttagaaaccctacctgaactgaacacctcttttggcattttaaaagtgctgcaaaggaaacaagcatcctcttgcttttgtatctttagtatgttgtcggcatatgtacgctattatgtccttttttggttaaatatctattattcatgggtttgctgttcacatgaatcgcatatagctatcacctttgctgcattcaggttgatgctatgctccaagaattagaaaaggagattgatgatgtggatgcacaaattggaaatcgttggcaactgcttgataaggaccatgatggcaaagtgacccctgaagaggtggcggcggcgacagcttatctcaaggacaccatagggaaagaaggcgtgcaagagctcatcagcaacctttctaaagacacagaaggaaaaaatccttgttgaagatattgtgaagctagcatcccaaatagagaacaatgaagaggaagaggaagcacggtagatgggagagtatatggaaacatcacactcgttcagcagtcaaaactcatgtattgaaaggcaatacatccatttcttgtgtctcttgactgactttgatagtgacttccaattagcaaggtagattttctgtagaaaggctcatgctgacatgcatttagttagccgtcgtgttgtgatttggtaggtaaattgcaaccaaaatttagaccggttgcatggacgtggataatacagatcaattgtatttgttatgctactatgcaatcccgaaatattggatctgtttcaaattctcaagtaatcattgatggatgctatttattgaccataaagcttacgaaatcattattgttttagctgattttatcgtgactattggaatgaaaccctaaccctcatatggtgggctgggcttctatattaatagactgagttgggcctggcccattacaaatagagtgttgaaatggtaaatgtacaggggagactccataaaccctaatacagttctaacacccccgcagtcgcaactctatcctgtacagatgttgagactggagtgaaagtttaaaaatacactcgacgataaccctttggtgaagatgttggcgaactgcagcgtggtggggacgctgagaacccgaacgtcaccggcggcgacacgctcggggacgaagtgcagatcgatctccacgtgcttcgtgcgctgatgctgcacgggattggtggagaagtagactgcgctgaagttgtcgcagtagacttggtaactaaaaggggaaaaaagggggaaaatgccaaaagaggtgttcagttcaagtttagtttctaagattgcatcatcaaaataaacagctttagattgtcctttgcttttctatctcacagtttagtttttggcaacaggctgatgtgtgctttcattatagggaactacgtatgtttatggaactttctttaaaccatatatttcttagcatgagaatgaaatcgaccggaatctccttgagccgagagctcgagccaccgacacggttgtcctttattttcagaaggctgcttcagcaggacaaagtactttctcagaaatatgttttaaaatatgttgctgcccagtcaccttctcagaaatcaaggcaacgccttcatcaggaatcacagcagccgccacaataacagcaaccacaagtgcaggtgtagcaggcgcaaccacaaaaacaagcagcacctgttatgcgcagagaatcatctattgctgctcggcaagcagcaatggcacatcaatctcaggagactaaacctgttcaatcttcgcccaagatcaagcgtcaaacaccagcgagatctggttcagtggcatccacagcctccggtagctgcatccgcaccaaaacctggtggtagtccaaagaaaggtgaggtcaaacctgctgtcgacccagttcaaactccaaccacaggtgccgattcaacgaaacccgagcctagcgccccatcactccctggagccgaaggggtggacaagatggccatcgatgaggccagtggtgacgccccagaggtagcagaagagcttgaccctgcgctcgaagaggagatgtcgatggaggagatgatccgtgtgacgcgcgccaagctaaggaggcgcacgaccaccgaagttcctgctgggaattagttgttagcggcacgggcaacgaacgcctgcaattgtaacatcatacacttcaatctggtcactccttgagtatcttcaggatgtcacatccagccgcaattttcagccggcagggaaacaagaacaactgtttttctatcattctctgtgtacatgtatctgtttgagtccctggtatacactgcagttagtctggcagaa

SEQ ID NO: 27792 - DNA, 4007 bp, Zea Mays
tccgatcccacctcccgatcctgccgcccggactccccacgaccctacctttcttccttccccgatttcaccgccgccagctgtccaatcccgccgcccagcccccgcccccagaggttggaggtgcgagcgatagccccggcgcccccactgccattacccccgccgcgatgctcgcgttcgtgaggcgtcacgcgcacatcgtgcaacccaacccccttcctccatcgcggcagaacgacatcctccaactccggcggcctccatttccccatcctcttcaacgcgcggcacaacgacctcctcctcccccaccggcggcctccaccagaccaccaccccaccggtcgtcgacctcaaccgtccgttgacctcaaccgtccaccagaccacctcacctcctccaattcccgcgcccgcgcctgatatggaaggtccgccggaggactcgggcgtcgaggccatggcggagcagcaccccttctcccccctgcctcgcgcgcggcggccgagatggtgctggctgggttgttcgagatgatggtccttcccgccctccctgctatcctcgccccaaatcgacgagaatcatgcagcccaaatctgaggtggaggcgtctgcactgtcgatggaggtgtcaagtctgcagtggtgtctgtagatgggaaggcatggtgtgcagcggcagcggccaggtggtgtcgctgagcctgcccttttacgggctcactggcacgctctccacggccttcgggaacctcacattcctgcgtatgctgaacctgagctccaattcattccgcggggaggtcctagcgaccatcgttcgccttgcgcatctgcatgcgctagacctgagctacaacgccttctccgaattctagagctgcgattcctgaggccatggagcagcaaacaatatcaattgccaaagctgccattacaataatactcattttagggacttcatttcttgcagctgccaatccaattgcaggatgctatgccgctcttaagatgctcatgacatttcccaatgcaacaaaatatctgaaaacaattataagctttggtaaggttgatcctgggcacaaggaaaaagttgaacagatatgtagtgcattttaagtgcttgatggttgcgtggaagaggtggggggctaccgcgtcggctacgacatcaagctctccggcaccgagtcccctaggtcggtcacggggctcgagggcgtctgcgtccgtgtgctatttgcctgggtgctcatcaccggcgtcgaggcggccgatggagaggtcactgtccacatcgggccaatcaggaagtcgttccccgccgttgggttcaaatccagcccctggtgcatcatcggattggcgacgagtgctcgacggttgcgtggaagaggtgggaggctaccacgtcggctacgacatcaagctctccagcaccgagtcccctaggtcggtcacggggctcgagggcgtccgcgtccgtgtgctgtttgcctgggtgcccatcaccggcgtcgaggcggtcgacggagaggtcactgtccacatcgggccaatcaggaagtcgttccccgccgttgggttcaaatccagcccccggtgcatcatcagattggaggcgtggtcacttgtcatggggtggagactaaggatccaagccaatatcacggaccacaacatcaagtgtatgaggcagggcaaagaggccaacaggtgcagggtttgccgtttgcttgacgatcacacgtatcaaaaagggttctcaagtattattggtaaagtatcacaattagatatagcttgaagttgcattttacgcgttgagctatcacattgtagactaacttgtacagttttcttttgcagtccttcttgcttgctttcacatttggggtgttctgctataatttacgttgattatttttcccttgcaatttggcatgcatacaaacatttgctctctatttttctatccaacataattcatgatttaaataaaggaactatttcttaaaagtcttctatttagtttcatcctttggaaaacaactctgctactaatgtgctgccccagaccccagttttacttctatttgacctgccagtgaaagcatttggagattttcttttaatccaccgtgaagcaaattcatggctaaatgctgcaacgtttagtctgtagcagtgtcctacttcttcctacttattaattagttgatggctacttccgtatgagttaacaacttatatgtgagagggcgaacgagacagagttgaaaaccctgcatccatccaatctggacatacataaaagttgtcataaagaaaggcacttgtccaggaaaaatgttttattgactgtcctgctgttcctttccccgctaaataatgtatcaagttaaaacttagctgagataatgtcaacttaagcttttccatgtcggcatatgtgcttcccacaatcttcggatggtcttttttttaaaaaaatctttggcctgcttcatcaagaactagatttgatcatgttcttctctgtgttgatgaattatctacagtttagctataaacacatctgaaatgttagtctattgaaggatacttggatactgaagccatgcatctttaaattgttaacttttctttttgtggtttagtatggatgaataaaaggggaaaaagcaaaagggaacaagcatcctctgatttttattttgatgatgcaatcttagaaaccctacctgaactgaacacctcttttggcattttaaaagtgctgcaaaggaaacaagcatcctcttgcttttgtatctttagtatgttgtcggcatatgtacgctattatgtccttttttggttaaatatctattattcatgggtttgctgttcacatgaatcgcatatagctatcacctttgctgcattcaggttgatgctatgctccaagaattagaaaaggagattgatgatgtggatgcacaaattggaaatcgttggcaactgcttgataaggaccatgatggcaaagtgacccctgaagaggtggcggcggcgacagcttatctcaaggacaccatagggaaagaaggcgtgcaagagctcatcagcaacctttctaaagacacagaaggaaaaaatccttgttgaagatattgtgaagctagcatcccaaatagagaacaatgaagaggaagaggaagcacggtagatgggagagtatatggaaacatcacactcgttcagcagtcaaaactcatgtattgaaaggaatcacagcagccgccacaataacagcaaccacaagtgcaggtgtagcaggcgcaaccacaaaaacaagcagcacctgttatgcgcagagaatcatctattgctgctcggcaagcagcaatggcacatcaatctcaggagactaaacctgttcaatcttcgcccaagatcaagcgtcaaacaccagcgagatctggttcagtggcatccacagcctccggtagctgcatccgcaccaaaacctggtggtagtccaaagaaaggtgaggtcaaacctgctgtcgacccagttcaaactccaaccacaggtgccgattcaacgaaacccgagcctagcgccccatcactccctggagccgaaggggtggacaagatggccatcgatgaggccagtggtgacgccccagaggtagcagaagagcttgaccctgcgctcgaagaggagatgtcgatggaggagatgatccgtgtgacgcgcgccaagctaaggaggcgcacgaccaccgaagttcctgctgggaattagttgttagcggcacgggcaacgaacgcctgcaattgtaacatcatacacttcaatctggtcactccttgagtatcttcaggatgtcacatccagccgcaattttcagccggcagggaaacaagaacaactgtttttctatcattctctgtgtacatgtatctgtttgagtccctggtatacactgcagttagtctggcagaa

SEQ ID NO: 27793 - DNA, 4041 bp, Zea Mays
tccgatcccacctcccgatcctgccgcccggactccccacgaccctacctttcttccttccccgatttcaccgccgccagctgtccaatcccgccgcccagcccccgcccccagaggttggaggtgcgagcgatagccccggcgcccccactgccattacccccgccgcgatgctcgcgttcgtgaggcgtcacgcgcacatcgtgcaacccaacccccttcctccatcgcggcagaacgacatcctccaactccggcggcctccatttccccatcctcttcaacgcgcggcacaacgacctcctcctcccccaccggcggcctccaccagaccaccaccccaccggtcgtcgacctcaaccgtccgttgacctcaaccgtccaccagaccacctcacctcctccaattcccgcgcccgcgcctgatatggaaggtccgccggaggactcgggcgtcgaggccatggcggagcagcaccccttctcccccctgcctcgcgcgcggcggccgagatggtgctggctgggttgttcgagatgatggtccttcccgccctccctgctatcctcgccccaaatcgacgagaatcatgcagcccaaatctgaggtggaggcgtctgcactgtcgatggaggtgtcaagtctgcagtggtgtctgtagatgggaaggcatggtgtgcagcggcagcggccaggtggtgtcgctgagcctgcccttttacgggctcactggcacgctctccacggccttcgggaacctcacattcctgcgtatgctgaacctgagctccaattcattccgcggggaggtcctagcgaccatcgttcgccttgcgcatctgcatgcgctagacctgagctacaacgccttctccgaattctagagctgcgattcctgaggccatggagcagcaaacaatatcaattgccaaagctgccattacaataatactcattttagggacttcatttcttgcagctgccaatccaattgcaggatgctatgccgctcttaagatgctcatgacatttcccaatgcaacaaaatatctgaaaacaattataagctttggtaaggttgatcctgggcacaaggaaaaagttgaacagatatgtagtgcattttaagtgcttgatggttgcgtggaagaggtggggggctaccgcgtcggctacgacatcaagctctccggcaccgagtcccctaggtcggtcacggggctcgagggcgtctgcgtccgtgtgctatttgcctgggtgctcatcaccggcgtcgaggcggccgatggagaggtcactgtccacatcgggccaatcaggaagtcgttccccgccgttgggttcaaatccagcccctggtgcatcatcggattggcgacgtggtcacttgtcatggggtggagactaaggatccaagccaatatcacggaccacaacatcaagtgtatgaggcagggcaaagaggccaacaggtgcaggttttcctcatttttattagatcctttcttagcgatcttggatctccactctccaggactccagggtttgccgtttgcttgacgatcacacgtatcaaaaagggttctcaagtattattggtaaagtatcacaattagatatagcttgaagttgcattttacgcgttgagctatcacattgtagactaacttgtacagttttcttttgcagtccttcttgcttgctttcacatttggggtgttctgctataatttacgttgattatttttcccttgcaatttggcatgcatacaaacatttgctctctatttttctatccaacataattcatgatttaaataaaggaactatttcttaaaagtcttctatttagtttcatcctttggaaaacaactctgctactaatgtgctgccccagaccccagttttacttctatttgacctgccagtgaaagcatttggagattttcttttaatccaccgtgaagcaaattcatggctaaatgctgcaacgtttagtctgtagcagtgtcctacttcttcctacttattaattagttgatggctacttccgtatgagttaacaacttatatgtgagagggcgaacgagacagagttgaaaaccctgcatccatccaatctggacatacataaaagttgtcataaagaaaggcacttgtccaggaaaaatgttttattgactgtcctgctgttcctttccccgctaaataatgtatcaagttaaaacttagctgagataatgtcaacttaagcttttccatgtcggcatatgtgcttcccacaatcttcggatggtcttttttttaaaaaaatctttggcctgcttcatcaagaactagatttgatcatgttcttctctgtgttgatgaattatctacagtttagctataaacacatctgaaatgttagtctattgaaggatacttggatactgaagccatgcatctttaaattgttaacttttctttttgtggtttagtatggatgaataaaaggggaaaaagcaaaagggaacaagcatcctctgatttttattttgatgatgcaatcttagaaaccctacctgaactgaacacctcttttggcattttaaaagtgctgcaaaggaaacaagcatcctcttgcttttgtatctttagtatgttgtcggcatatgtacgctattatgtccttttttggttaaatatctattattcatgggtttgctgttcacatgaatcgcatatagctatcacctttgctgcattcaggttgatgctatgctccaagaattagaaaaggagattgatgatgtggatgcacaaattggaaatcgttggcaactgcttgataaggaccatgatggcaaagtgacccctgaagaggtggcggcggcgacagcttatctcaaggacaccatagggaaagaaggcgtgcaagagctcatcagcaacctttctaaagacacagaaggaaaaaatccttgttgaagatattgtgaagctagcatcccaaatagagaacaatgaagaggaagaggaagcacggtagatgggagagtatatggaaacatcacactcgttcagcagtcaaaactcatgtattgaaagggaactacgtatgtttatggaactttctttaaaccatatatttcttagcatgagaatgaaatcgaccggaatctccttgagccgagagctcgagccaccgacacggttgtcctttattttcagaaggctgcttcagcaggacaaagtactttctcagaaatatgttttaaaatatgttgctgcccagtcaccttctcagaaatcaaggcaacgccttcatcaggaatcacagcagccgccacaataacagcaaccacaagtgcaggtgtagcaggcgcaaccacaaaaacaagcagcacctgttatgcgcagagaatcatctattgctgctcggcaagcagcaatggcacatcaatctcaggagactaaacctgttcaatcttcgcccaagatcaagcgtcaaacaccagcgagatctggttcagtggcatccacagcctccggtagctgcatccgcaccaaaacctggtggtagtccaaagaaaggtgaggtcaaacctgctgtcgacccagttcaaactccaaccacaggtgccgattcaacgaaacccgagcctagcgccccatcactccctggagccgaaggggtggacaagatggccatcgatgaggccagtggtgacgccccagaggtagcagaagagcttgaccctgcgctcgaagaggagatgtcgatggaggagatgatccgtgtgacgcgcgccaagctaaggaggcgcacgaccaccgaagttcctgctgggaattagttgttagcggcacgggcaacgaacgcctgcaattgtaacatcatacacttcaatctggtcactccttgagtatcttcaggatgtcacatccagccgcaattttcagccggcagggaaacaagaacaactgtttttctatcattctctgtgtacatgtatctgtttgagtccctggtatacactgcagttagtctggcagaa

SEQ ID NO: 27794 - DNA, 748 bp, Zea Mays
cctttcttagcgatcttggatctccactctccaggactccagggtttgccgtttgcttgacgatcacacgtatcaaaaagggttctcaagtattattgctatcacctttgctgcattcaggttgatgctatgctccaagaattagaaaaggagattgatgatgtggatgcacaaattggaaatcgttggcaactgcttgataaggaccatgatggcaaagtgacccctgaagaggtggcggcggcgacagcttatctcaaggacaccatagggaaagaaggcgtgcaagagctcatcagcaacctttctaaagacacagaaggaaaaaatccttgttgaagatattgtgaagctagcatcccaaatagagaacaatgaagaggaagaggaagcacggtagatgggagagtatatggaaacatcacactcgttcagcagtcaaaactcatgtattgaaaggcaatacatccatttcttgtgtctcttgactgactttgatagtgacttccaattagcaaggtagattttctgtagaaaggctcatgctgacatgcatttagttagccgtcgtgttgtgatttggtaggtaaattgcaaccaaaatttagaccggttgcatggacgtggataatacagatcaattgtatttgttatgctactatgcaatcccgaaatattggatctgtttcaaattctcaagtaatcattgatggatgctatttattgaccataaagcttacgaaatcat

SEQ ID NO: 27795 - DNA, 759 bp, Zea Mays
gattggaggcggttttcctcatttttattagatcctttcttagcgatcttggatctccactctccaggactccagggtttgccgtttgcttgacgatcacacgtatcaaaaagggttctcaagtattattggttgatgctatgctccaagaattagaaaaggagattgatgatgtggatgcacaaattggaaatcgttggcaactgcttgataaggaccatgatggcaaagtgacccctgaagaggtggcggcggcgacagcttatctcaaggacaccatagggaaagaaggcgtgcaagagctcatcagcaacctttctaaagacacagaaggaaaaaatccttgttgaagatattgtgaagctagcatcccaaatagagaacaatgaagaggaagaggaagcacggtagatgggagagtatatggaaacatcacactcgttcagcagtcaaaactcatgtattgaaaggcaatacatccatttcttgtgtctcttgactgactttgatagtgacttccaattagcaaggtagattttctgtagaaaggctcatgctgacatgcatttagttagccgtcgtgttgtgatttggtaggtaaattgcaaccaaaatttagaccggttgcatggacgtggataatacagatcaattgtatttgttatgctactatgcaatcccgaaatattggatctgtttcaaattctcaagtaatcattgatggatgctatttattgaccataaagcttacgaaatcat

SEQ ID NO: 27796 - DNA, 811 bp, Zea Mays
ccccgccgttgggttcaaatccagcccccggtgcatcatcagattggaggcgactaaggatccaagccaatatcacggaccacaacatcaagtgtatgaggcagggcaaagaggccaacaggtgcagggtttgccgtttgcttgacgatcacacgtatcaaaaagggttctcaagtattattggttgatgctatgctccaagaattagaaaaggagattgatgatgtggatgcacaaattggaaatcgttggcaactgcttgataaggaccatgatggcaaagtgacccctgaagaggtggcggcggcgacagcttatctcaaggacaccatagggaaagaaggcgtgcaagagctcatcagcaacctttctaaagacacagaaggaaaaaatccttgttgaagatattgtgaagctagcatcccaaatagagaacaatgaagaggaagaggaagcacggtagatgggagagtatatggaaacatcacactcgttcagcagtcaaaactcatgtattgaaaggcaatacatccatttcttgtgtctcttgactgactttgatagtgacttccaattagcaaggtagattttctgtagaaaggctcatgctgacatgcatttagttagccgtcgtgttgtgatttggtaggtaaattgcaaccaaaatttagaccggttgcatggacgtggataatacagatcaattgtatttgttatgctactatgcaatcccgaaatattggatctgtttcaaattctcaagtaatcattgatggatgctatttattgaccataaagcttacgaaatcat

SEQ ID NO: 27797 - DNA, 2162 bp, Zea Mays
cacgaccctacctttcttccttccccgatttcaccgccgccagctgtccaatcccgccgcccagcccccgcccccagaggttggaggtgcgagcgatagccccggcgcccccactgccattacccccgccgcgatgctcgcgttcgtgaggcgtcacgcgcacatcgtgcaacccaacccccttcctccatcgcggcagaacgacatcctccaactccggcggcctccatttccccatcctcttcaacgcgcggcacaacgacctcctcctcccccaccggcggcctccaccagaccaccaccccaccggtcgtcgacctcaaccgtccgttgacctcaaccgtccaccagaccacctcacctcctccaattcccgcgcccgcgcctgatatggaaggtccgccggaggactcgggcgtcgaggccatggcggagcagcaccccttctcccccctgcctcgcgcgcggcggccgagatggtgctggctgggttgttcgagatgatggtccttcccgccctccctgctatcctcgccccaaatcgacgagaatcatgcagcccaaatctgaggtggaggcgtctgcactgtcgatggaggtgtcaagtctgcagtggtgtctgtagatgggaaggcatggtgtgcagcggcagcggccaggtggtgtcgctgagcctgcccttttacgggctcactggcacgctctccacggccttcgggaacctcacattcctgcgtatgctgaacctgagctccaattcattccgcggggaggtcctagcgaccatcgttcgccttgcgcatctgcatgcgctagacctgagctacaacgccttctccgatgctcatgacatttcccaatgcaacaaaatatctgaaaaagtgcttgatggttgcgtggaagaggtggggggctaccgcgtcggctacgacatcaagctctccggcaccgagtcccctaggtcggtcacggggctcgagggcgtctgcgtccgtgtgctatttgcctgggtgctcatcaccggcgtcgaggcggccgatggagaggtcactgtccacatcgggccaatcaggaagtcgttccccgccgttgggttcaaatccagcccctggtgcatcatcggattggcgacgagtgctcgacggttgcgtggaagaggtgggaggctaccacgtcggctacgacatcaagctctccagcaccgagtcccctaggtcggtcacggggctcgagggcgtccgcgtccgtgtgctgtttgcctgggtgcccatcaccggcgtcgaggcggtcgacggagaggtcactgtccacatcgggccaatcaggaagtcgttccccgccgttgggttcaaatccagcccccggtgcatcatcagattggaggcgtggtcacttgtcatggggtggagactaaggatccaagccaatatcacggaccacaacatcaagtgtatgaggcagggcaaagaggccaacagggtttgccgtttgcttgacgatcacacgtatcaaaaagggttctcaagtattattggttgatgctatgctccaagaattagaaaaggagattgatgatgtggatgcacaaattggaaatcgttggcaactgcttgataaggaccatgatggcaaagtgacccctgaagaggtggcggcggcgacagcttatctcaaggacaccatagggaaagaaggcgtgcaagagctcatcagcaacctttctaaagacacagaaggaaaaaatccttgttgaagatattgtgaagctagcatcccaaatagagaacaatgaagaggaagaggaagcacggtagatgggagagtatatggaaacatcacactcgttcagcagtcaaaactcatgtattgaaaggcaatacatccatttcttgtgtctcttgactgactttgatagtgacttccaattagcaaggtagattttctgtagaaaggctcatgctgacatgcatttagttagccgtcgtgttgtgatttggtaggtaaattgcaaccaaaatttagaccggttgcatggacgtggataatacagatcaattgtatttgttatgctactatgcaatcccgaaatattggatctgtttcaaattctcaagtaatcattgatggatgctatttattgaccataaagcttacgaaatcat

SEQ ID NO: 27798 - DNA, 3478 bp, Zea Mays
tccgatcccacctcccgatcctgccgcccggactccccacgaccctacctttcttccttccccgatttcaccgccgccagctgtccaatcccgccgcccagcccccgcccccagaggttggaggtgcgagcgatagccccggcgcccccactgccattacccccgccgcgatgctcgcgttcgtgaggcgtcacgcgcacatcgtgcaacccaacccccttcctccatcgcggcagaacgacatcctccaactccggcggcctccatttccccatcctcttcaacgcgcggcacaacgacctcctcctcccccaccggcggcctccaccagaccaccaccccaccggtcgtcgacctcaaccgtccgttgacctcaaccgtccaccagaccacctcacctcctccaattcccgcgcccgcgcctgatatggaaggtccgccggaggactcgggcgtcgaggccatggcggagcagcaccccttctcccccctgcctcgcgcgcggcggccgagatggtgctggctgggttgttcgagatgatggtccttcccgccctccctgctatcctcgccccaaatcgacgagaatcatgcagcccaaatctgaggtggaggcgtctgcactgtcgatggaggtgtcaagtctgcagtggtgtctgtagatgggaaggcatggtgtgcagcggcagcggccaggtggtgtcgctgagcctgcccttttacgggctcactggcacgctctccacggccttcgggaacctcacattcctgcgtatgctgaacctgagctccaattcattccgcggggaggtcctagcgaccatcgttcgccttgcgcatctgcatgcgctagacctgagctacaacgccttctccgaattctagagctgcgattcctgaggccatggagcagcaaacaatatcaattgccaaagctgccattacaataatactcattttagggacttcatttcttgcagctgccaatccaattgcaggatgctatgccgctcttaagatgctcatgacatttcccaatgcaacaaaatatctgaaaacaattataagctttggtaaggttgatcctgggcacaaggaaaaagttgaacagatatgtagtgcattttaagtgcttgatggttgcgtggaagaggtggggggctaccgcgtcggctacgacatcaagctctccggcaccgagtcccctaggtcggtcacggggctcgagggcgtctgcgtccgtgtgctatttgcctgggtgctcatcaccggcgtcgaggcggccgatggagaggtcactgtccacatcgggccaatcaggaagtcgttccccgccgttgggttcaaatccagcccctggtgcatcatcggattggcgacgagtgctcgacggttgcgtggaagaggtgggaggctaccacgtcggctacgacatcaagctctccagcaccgagtcccctaggtcggtcacggggctcgagggcgtccgcgtccgtgtgctgtttgcctgggtgcccatcaccggcgtcgaggcggtcgacggagaggtcactgtccacatcgggccaatcaggaagtcgttccccgccgttgggttcaaatccagcccccggtgcatcatcagattggaggcgtggtcacttgtcatggggtggagactaaggatccaagccaatatcacggaccacaacatcaagtgtatgaggcagggcaaagaggccaacaggtgcagggtttgccgtttgcttgacgatcacacgtatcaaaaagggttctcaagtattattgtccttcttgcttgctttcacatttggggtgttctgctataatttacgttgattatttttcccttgcaatttggcatgcatacaaacatttgctctctatttttctatccaacataattcatgatttaaataaaggaactatttcttaaaagtcttctatttagtttcatcctttggaaaacaactctgctactaatgtgctgccccagaccccagttttacttctatttgacctgccagtgaaagcatttggagattttcttttaatccaccgtgaagcaaattcatggctaaatgctgcaacgtttagtctgtagcagtgtcctacttcttcctacttattaattagttgatggctacttccgtatgagttaacaacttatatgtgagagggcgaacgagacagagttgaaaaccctgcatccatccaatctggacatacataaaagttgtcataaagaaaggcacttgtccaggaaaaatgttttattgactgtcctgctgttcctttccccgctaaataatgtatcaagttaaaacttagctgagataatgtcaacttaagcttttccatgtcggcatatgtgcttcccacaatcttcggatggtcttttttttaaaaaaatctttggcctgcttcatcaagaactagatttgatcatgttcttctctgtgttgatgaattatctacagtttagctataaacacatctgaaatgttagtctattgaaggatacttggatactgaagccatgcatctttaaattgttaacttttctttttgtggtttagtatggatgaataaaaggggaaaaagcaaaagggaacaagcatcctctgatttttattttgatgatgcaatcttagaaaccctacctgaactgaacacctcttttggcattttaaaagtgctgcaaaggaaacaagcatcctcttgcttttgtatctttagtatgttgtcggcatatgtacgctattatgtccttttttggttaaatatctattattcatgggtttgctgttcacatgaatcgcatatagctatcacctttgctgcattcaggttgatgctatgctccaagaattagaaaaggagattgatgatgtggatgcacaaattggaaatcgttggcaactgcttgataaggaccatgatggcaaagtgacccctgaagaggtggcggcggcgacagcttatctcaaggacaccatagggaaagaaggcgtgcaagagctcatcagcaacctttctaaagacacagaaggaaaaaatccttgttgaagatattgtgaagctagcatcccaaatagagaacaatgaagaggaagaggaagcacggtagatgggagagtatatggaaacatcacactcgttcagcagtcaaaactcatgtattgaaaggcaatacatccatttcttgtgtctcttgactgactttgatagtgacttccaattagcaaggtagattttctgtagaaaggctcatgctgacatgcatttagttagccgtcgtgttgtgatttggtaggtaaattgcaaccaaaatttagaccggttgcatggacgtggataatacagatcaattgtatttgttatgctactatgcaatcccgaaatattggatctgtttcaaattctcaagtaatcattgatggatgctatttattgaccataaagcttacgaaatcat

SEQ ID NO: 27799 - DNA, 3316 bp, Zea Mays
tccgatcccacctcccgatcctgccgcccggactccccacgaccctacctttcttccttccccgatttcaccgccgccagctgtccaatcccgccgcccagcccccgcccccagaggttggaggtgcgagcgatagccccggcgcccccactgccattacccccgccgcgatgctcgcgttcgtgaggcgtcacgcgcacatcgtgcaacccaacccccttcctccatcgcggcagaacgacatcctccaactccggcggcctccatttccccatcctcttcaacgcgcggcacaacgacctcctcctcccccaccggcggcctccaccagaccaccaccccaccggtcgtcgacctcaaccgtccgttgacctcaaccgtccaccagaccacctcacctcctccaattcccgcgcccgcgcctgatatggaaggtccgccggaggactcgggcgtcgaggccatggcggagcagcaccccttctcccccctgcctcgcgcgcggcggccgagatggtgctggctgggttgttcgagatgatggtccttcccgccctccctgctatcctcgccccaaatcgacgagaatcatgcagcccaaatctgaggtggaggcgtctgcactgtcgatggaggtgtcaagtctgcagtggtgtctgtagatgggaaggcatggtgtgcagcggcagcggccaggtggtgtcgctgagcctgcccttttacgggctcactggcacgctctccacggccttcgggaacctcacattcctgcgtatgctgaacctgagctccaattcattccgcggggaggtcctagcgaccatcgttcgccttgcgcatctgcatgcgctagacctgagctacaacgccttctccgaattctagagctgcgattcctgaggccatggagcagcaaacaatatcaattgccaaagctgccattacaataatactcattttagggacttcatttcttgcagctgccaatccaattgcaggatgctatgccgctcttaagatgctcatgacatttcccaatgcaacaaaatatctgaaaacaattataagctttggtaaggttgatcctgggcacaaggaaaaagttgaacagatatgtagtgcattttaagtgcttgatggttgcgtggaagaggtggggggctaccgcgtcggctacgacatcaagctctccggcaccgagtcccctaggtcggtcacggggctcgagggcgtctgcgtccgtgtgctatttgcctgggtgctcatcaccggcgtcgaggcggccgatggagaggtcactgtccacatcgggccaatcaggaagtcgttccccgccgttgggttcaaatccagcccctggtgcatcatcggattggcgacgtggtcacttgtcatggggtggagactaaggatccaagccaatatcacggaccacaacatcaagtgtatgaggcagggcaaagaggccaacaggtgcagggtttgccgtttgcttgacgatcacacgtatcaaaaagggttctcaagtattattggtaaagtatcacaattagatatagcttgaagttgcattttacgcgttgagctatcacattgtagactaacttgtacagttttcttttgcagtccttcttgcttgctttcacatttggggtgttctgctataatttacgttgattatttttcccttgcaatttggcatgcatacaaacatttgctctctatttttctatccaacataattcatgatttaaataaaggaactatttcttaaaagtcttctatttagtttcatcctttggaaaacaactctgctactaatgtgctgccccagaccccagttttacttctatttgacctgccagtgaaagcatttggagattttcttttaatccaccgtgaagcaaattcatggctaaatgctgcaacgtttagtctgtagcagtgtcctacttcttcctacttattaattagttgatggctacttccgtatgagttaacaacttatatgtgagagggcgaacgagacagagttgaaaaccctgcatccatccaatctggacatacataaaagttgtcataaagaaaggcacttgtccaggaaaaatgttttattgactgtcctgctgttcctttccccgctaaataatgtatcaagttaaaacttagctgagataatgtcaacttaagcttttccatgtcggcatatgtgcttcccacaatcttcggatggtcttttttttaaaaaaatctttggcctgcttcatcaagaactagatttgatcatgttcttctctgtgttgatgaattatctacagtttagctataaacacatctgaaatgttagtctattgaaggatacttggatactgaagccatgcatctttaaattgttaacttttctttttgtggtttagtatggatgaataaaaggggaaaaagcaaaagggaacaagcatcctctgatttttattttgatgatgcaatcttagaaaccctacctgaactgaacacctcttttggcattttaaaagtgctgcaaaggaaacaagcatcctcttgcttttgtatctttagtatgttgtcggcatatgtacgctattatgtccttttttggttaaatatctattattcatgggtttgctgttcacatgaatcgcatatagctatcacctttgctgcattcaggttgatgctatgctccaagaattagaaaaggagattgatgatgtggatgcacaaattggaaatcgttggcaactgcttgataaggaccatgatggcaaagtgacccctgaagaggtggcggcggcgacagcttatctcaaggacaccatagggaaagaaggcgtgcaagagctcatcagcaacctttctaaagacacagaaggaaaaaatccttgttgaagatattgtgaagctagcatcccaaatagagaacaatgaagaggaagaggaagcacggtagatgggagagtatatggaaacatcacactcgttcagcagtcaaaactcatgtattgaaaggcaatacatccatttcttgtgtctcttgactgactttgatagtgacttccaattagcaaggtagattttctgtagaaaggctcatgctgacatgcatttagttagccgtcgtgttgtgatttggtaggtaaattgcaaccaaaatttagaccggttgcatggacgtggataatacagatcaattgtatttgttatgctactatgcaatcccgaaatattggatctgtttcaaattctcaagtaatcattgatggatgctatttattgaccataaagcttacgaaatcat

SEQ ID NO: 27800 - DNA, 3423 bp, Zea Mays
gtccgatcccacctcccgatcctgccgcccggactccccacgaccctacctttcttccttccccgatttcaccgccgccagctgtccaatcccgccgcccagcccccgcccccagaggttggaggtgcgagcgatagccccggcgcccccactgccattacccccgccgcgatgctcgcgttcgtgaggcgtcacgcgcacatcgtgcaacccaacccccttcctccatcgcggcagaacgacatcctccaactccggcggcctccatttccccatcctcttcaacgcgcggcacaacgacctcctcctcccccaccggcggcctccaccagaccaccaccccaccggtcgtcgacctcaaccgtccgttgacctcaaccgtccaccagaccacctcacctcctccaattcccgcgcccgcgcctgatatggaaggtccgccggaggactcgggcgtcgaggccatggcggagcagcaccccttctcccccctgcctcgcgcgcggcggccgagatggtgctggctgggttgttcgagatgatggtccttcccgccctccctgctatcctcgccccaaatcgacgagaatcatgcagcccaaatctgaggtggaggcgtctgcactgtcgatggaggtgtcaagtctgcagtggtgtctgtagatgggaaggcatggtgtgcagcggcagcggccaggtggtgtcgctgagcctgcccttttacgggctcactggcacgctctccacggccttcgggaacctcacattcctgcgtatgctgaacctgagctccaattcattccgcggggaggtcctagcgaccatcgttcgccttgcgcatctgcatgcgctagacctgagctacaacgccttctccgatgctcatgacatttcccaatgcaacaaaatatctgaaaacaattataagctttggtaaggttgatcctgggcacaaggaaaaagttgaacagatatgtagtgcattttaagtgcttgatggttgcgtggaagaggtggggggctaccgcgtcggctacgacatcaagctctccggcaccgagtcccctaggtcggtcacggggctcgagggcgtctgcgtccgtgtgctatttgcctgggtgctcatcaccggcgtcgaggcggccgatggagaggtcactgtccacatcgggccaatcaggaagtcgttccccgccgttgggttcaaatccagcccctggtgcatcatcggattggcgacgagtgctcgacggttgcgtggaagaggtgggaggctaccacgtcggctacgacatcaagctctccagcaccgagtcccctaggtcggtcacggggctcgagggcgtccgcgtccgtgtgctgtttgcctgggtgcccatcaccggcgtcgaggcggtcgacggagaggtcactgtccacatcgggccaatcaggaagtcgttccccgccgttgggttcaaatccagcccccggtgcatcatcagattggaggcgtggtcacttgtcatggggtggagactaaggatccaagccaatatcacggaccacaacatcaagtgtatgaggcagggcaaagaggccaacagggtttgccgtttgcttgacgatcacacgtatcaaaaagggttctcaagtattattggtaaagtatcacaattagatatagcttgaagttgcattttacgcgttgagctatcacattgtagactaacttgtacagttttcttttgcagtccttcttgcttgctttcacatttggggtgttctgctataatttacgttgattatttttcccttgcaatttggcatgcatacaaacatttgctctctatttttctatccaacataattcatgatttaaataaaggaactatttcttaaaagtcttctatttagtttcatcctttggaaaacaactctgctactaatgtgctgccccagaccccagttttacttctatttgacctgccagtgaaagcatttggagattttcttttaatccaccgtgaagcaaattcatggctaaatgctgcaacgtttagtctgtagcagtgtcctacttcttcctacttattaattagttgatggctacttccgtatgagttaacaacttatatgtgagagggcgaacgagacagagttgaaaaccctgcatccatccaatctggacatacataaaagttgtcataaagaaaggcacttgtccaggaaaaatgttttattgactgtcctgctgttcctttccccgctaaataatgtatcaagttaaaacttagctgagataatgtcaacttaagcttttccatgtcggcatatgtgcttcccacaatcttcggatggtcttttttttaaaaaaatctttggcctgcttcatcaagaactagatttgatcatgttcttctctgtgttgatgaattatctacagtttagctataaacacatctgaaatgttagtctattgaaggatacttggatactgaagccatgcatctttaaattgttaacttttctttttgtggtttagtatggatgaataaaaggggaaaaagcaaaagggaacaagcatcctctgatttttattttgatgatgcaatcttagaaaccctacctgaactgaacacctcttttggcattttaaaagtgctgcaaaggaaacaagcatcctcttgcttttgtatctttagtatgttgtcggcatatgtacgctattatgtccttttttggttaaatatctattattcatgggtttgctgttcacatgaatcgcatatagctatcacctttgctgcattcaggttgatgctatgctccaagaattagaaaaggagattgatgatgtggatgcacaaattggaaatcgttggcaactgcttgataaggaccatgatggcaaagtgacccctgaagaggtggcggcggcgacagcttatctcaaggacaccatagggaaagaaggcgtgcaagagctcatcagcaacctttctaaagacacagaaggaaaaaatccttgttgaagatattgtgaagctagcatcccaaatagagaacaatgaagaggaagaggaagcacggtagatgggagagtatatggaaacatcacactcgttcagcagtcaaaactcatgtattgaaaggcaatacatccatttcttgtgtctcttgactgactttgatagtgacttccaattagcaaggtagattttctgtagaaaggctcatgctgacatgcatttagttagccgtcgtgttgtgatttggtaggtaaattgcaaccaaaatttagaccggttgcatggacgtggataatacagatcaattgtatttgttatgctactatgcaatcccgaaatattggatctgtttcaaattctcaagtaatcattgatggatgctatttattgaccataaagcttacgaaatcat

SEQ ID NO: 27801 - DNA, 2276 bp, Zea Mays
gtccgatcccacctcccgatcctgccgcccggactccccacgaccctacctttcttccttccccgatttcaccgccgccagctgtccaatcccgccgcccagcccccgcccccagaggttggaggtgcgagcgatagccccggcgcccccactgccattacccccgccgcgatgctcgcgttcgtgaggcgtcacgcgcacatcgtgcaacccaacccccttcctccatcgcggcagaacgacatcctccaactccggcggcctccatttccccatcctcttcaacgcgcggcacaacgacctcctcctcccccaccggcggcctccaccagaccaccaccccaccggtcgtcgacctcaaccgtccgttgacctcaaccgtccaccagaccacctcacctcctccaattcccgcgcccgcgcctgatatggaaggtccgccggaggactcgggcgtcgaggccatggcggagcagcaccccttctcccccctgcctcgcgcgcggcggccgagatggtgctggctgggttgttcgagatgatggtccttcccgccctccctgctatcctcgccccaaatcgacgagaatcatgcagcccaaatctgaggtggaggcgtctgcactgtcgatggaggtgtcaagtctgcagtggtgtctgtagatgggaaggcatggtgtgcagcggcagcggccaggtggtgtcgctgagcctgcccttttacgggctcactggcacgctctccacggccttcgggaacctcacattcctgcgtatgctgaacctgagctccaattcattccgcggggaggtcctagcgaccatcgttcgccttgcgcatctgcatgcgctagacctgagctacaacgccttctccgatgctcatgacatttcccaatgcaacaaaatatctgaaaacaattataagctttggtaaggttgatcctgggcacaaggaaaaagttgaacagatatgtagtgcattttaagtgcttgatggttgcgtggaagaggtggggggctaccgcgtcggctacgacatcaagctctccggcaccgagtcccctaggtcggtcacggggctcgagggcgtctgcgtccgtgtgctatttgcctgggtgctcatcaccggcgtcgaggcggccgatggagaggtcactgtccacatcgggccaatcaggaagtcgttccccgccgttgggttcaaatccagcccctggtgcatcatcggattggcgacgagtgctcgacggttgcgtggaagaggtgggaggctaccacgtcggctacgacatcaagctctccagcaccgagtcccctaggtcggtcacggggctcgagggcgtccgcgtccgtgtgctgtttgcctgggtgcccatcaccggcgtcgaggcggtcgacggagaggtcactgtccacatcgggccaatcaggaagtcgttccccgccgttgggttcaaatccagcccccggtgcatcatcagattggaggcgtggtcacttgtcatggggtggagactaaggatccaagccaatatcacggaccacaacatcaagtgtatgaggcagggcaaagaggccaacaggtgcagggtttgccgtttgcttgacgatcacacgtatcaaaaagggttctcaagtattattggttgatgctatgctccaagaattagaaaaggagattgatgatgtggatgcacaaattggaaatcgttggcaactgcttgataaggaccatgatggcaaagtgacccctgaagaggtggcggcggcgacagcttatctcaaggacaccatagggaaagaaggcgtgcaagagctcatcagcaacctttctaaagacacagaaggaaaaaatccttgttgaagatattgtgaagctagcatcccaaatagagaacaatgaagaggaagaggaagcacggtagatgggagagtatatggaaacatcacactcgttcagcagtcaaaactcatgtattgaaaggcaatacatccatttcttgtgtctcttgactgactttgatagtgacttccaattagcaaggtagattttctgtagaaaggctcatgctgacatgcatttagttagccgtcgtgttgtgatttggtaggtaaattgcaaccaaaatttagaccggttgcatggacgtggataatacagatcaattgtatttgttatgctactatgcaatcccgaaatattggatctgtttcaaattctcaagtaatcattgatggatgctatttattgaccataaagcttacgaaatcat

SEQ ID NO: 27802 - DNA, 3478 bp, Zea Mays
atttcaactgttcgatctcgcccaccagccgccggatcccacccctgatcctgccgtccgatcccacctcccgatcctgccgcccggactccccacgaccctacctttcttccttccccgatttcaccgccgccagctgtccaatcccgccgcccagcccccgcccccagaggttggaggtgcgagcgatagccccggcgcccccactgccattacccccgccgcgatgctcgcgttcgtgaggcgtcacgcgcacatcgtgcaacccaacccccttcctccatcgcggcagaacgacatcctccaactccggcggcctccatttccccatcctcttcaacgcgcggcacaacgacctcctcctcccccaccggcggcctccaccagaccaccaccccaccggtcgtcgacctcaaccgtccgttgacctcaaccgtccaccagaccacctcacctcctccaattcccgcgcccgcgcctgatatggaaggtccgccggaggactcgggcgtcgaggccatggcggagcagcaccccttctcccccctgcctcgcgcgcggcggccgagatggtgctggctgggttgttcgagatgatggtccttcccgccctccctgctatcctcgccccaaatcgacgagaatcatgcagcccaaatctgaggtggaggcgtctgcactgtcgatggaggtgtcaagtctgcagtggtgtctgtagatgggaaggcatggtgtgcagcggcagcggccaggtggtgtcgctgagcctgcccttttacgggctcactggcacgctctccacggccttcgggaacctcacattcctgcgtatgctgaacctgagctccaattcattccgcggggaggtcctagcgaccatcgttcgccttgcgcatctgcatgcgctagacctgagctacaacgccttctccgatgctcatgacatttcccaatgcaacaaaatatctgaaaaagtgcttgatggttgcgtggaagaggtggggggctaccgcgtcggctacgacatcaagctctccggcaccgagtcccctaggtcggtcacggggctcgagggcgtctgcgtccgtgtgctatttgcctgggtgctcatcaccggcgtcgaggcggccgatggagaggtcactgtccacatcgggccaatcaggaagtcgttccccgccgttgggttcaaatccagcccctggtgcatcatcggattggcgacgagtgctcgacggttgcgtggaagaggtgggaggctaccacgtcggctacgacatcaagctctccagcaccgagtcccctaggtcggtcacggggctcgagggcgtccgcgtccgtgtgctgtttgcctgggtgcccatcaccggcgtcgaggcggtcgacggagaggtcactgtccacatcgggccaatcaggaagtcgttccccgccgttgggttcaaatccagcccccggtgcatcatcagattggaggcgtggtcacttgtcatggggtggagactaaggatccaagccaatatcacggaccacaacatcaagtgtatgaggcagggcaaagaggccaacaggtgcaggttttcctcatttttattagatcctttcttagcgatcttggatctccactctccaggactccagggtttgccgtttgcttgacgatcacacgtatcaaaaagggttctcaagtattattggtaaagtatcacaattagatatagcttgaagttgcattttacgcgttgagctatcacattgtagactaacttgtacagttttcttttgcagtccttcttgcttgctttcacatttggggtgttctgctataatttacgttgattatttttcccttgcaatttggcatgcatacaaacatttgctctctatttttctatccaacataattcatgatttaaataaaggaactatttcttaaaagtcttctatttagtttcatcctttggaaaacaactctgctactaatgtgctgccccagaccccagttttacttctatttgacctgccagtgaaagcatttggagattttcttttaatccaccgtgaagcaaattcatggctaaatgctgcaacgtttagtctgtagcagtgtcctacttcttcctacttattaattagttgatggctacttccgtatgagttaacaacttatatgtgagagggcgaacgagacagagttgaaaaccctgcatccatccaatctggacatacataaaagttgtcataaagaaaggcacttgtccaggaaaaatgttttattgactgtcctgctgttcctttccccgctaaataatgtatcaagttaaaacttagctgagataatgtcaacttaagcttttccatgtcggcatatgtgcttcccacaatcttcggatggtcttttttttaaaaaaatctttggcctgcttcatcaagaactagatttgatcatgttcttctctgtgttgatgaattatctacagtttagctataaacacatctgaaatgttagtctattgaaggatacttggatactgaagccatgcatctttaaattgttaacttttctttttgtggtttagtatggatgaataaaaggggaaaaagcaaaagggaacaagcatcctctgatttttattttgatgatgcaatcttagaaaccctacctgaactgaacacctcttttggcattttaaaagtgctgcaaaggaaacaagcatcctcttgcttttgtatctttagtatgttgtcggcatatgtacgctattatgtccttttttggttaaatatctattattcatgggtttgctgttcacatgaatcgcatatagctatcacctttgctgcattcaggttgatgctatgctccaagaattagaaaaggagattgatgatgtggatgcacaaattggaaatcgttggcaactgcttgataaggaccatgatggcaaagtgacccctgaagaggtggcggcggcgacagcttatctcaaggacaccatagggaaagaaggcgtgcaagagctcatcagcaacctttctaaagacacagaaggaaaaaatccttgttgaagatattgtgaagctagcatcccaaatagagaacaatgaagaggaagaggaagcacggtagatgggagagtatatggaaacatcacactcgttcagcagtcaaaactcatgtattgaaaggcaatacatccatttcttgtgtctcttgactgactttgatagtgacttccaattagcaaggtagattttctgtagaaaggctcatgctgacatgcatttagttagccgtcgtgttgtgatttggtaggtaaattgcaaccaaaatttagaccggttgcatggacgtggataatacagatcaattgtatttgttatgctactatgcaatcccgaaatattggatctgtttcaaattctcaagtaatcattgatggatgctatttattgaccataaagcttacgaaatcat

SEQ ID NO: 27803 - DNA, 1130 bp, Zea Mays
gtcaacaatactttgttcaacaatgctaatctgatagtagagagaggtgaaaagatagctattattgggcccaatggttgtgggaagagcacactgcttaaacttatgttggggatggagaagccacaaggtggtgaggtgcttcttggggagcataatgtgttgccgaactattttgagcagaatcaggcagaagctcttgatttagagaagaccgtgttagacactgtagcagaagctgcggaagattggatacttgatgatatcaaaggtctccttggccgttgcaacttcagggatgacatgctggatagaaaagttcagtttttaagtggtggagagaaggcaaggcttgcattttgcaagttcatggtgactccatctactctactcatcttggatgaaccgacaaaccatcttgatatcccatcaaaagaaatgcttgaggaggcaatatcagaatatactggcaccgtcataacagtttctcatgaccggtacttcataaaacaaattgtcaacagagtcatcgaagtgaaagatcagactatccaagactatcaaggagattacaattactaccttgagaggaaccttgaagcccgagaaagggaacttgcccgcgaggaagagctcgaggagagagcccccaaagtaaaagccaagtccaagatgtcgaaggcagagaaagccgtcaggaagaagcagaagatgcaggccttccagcagagcaagcagaaatccaagtcgcttaagaactcgaagcggtggaactgagattttttcgtcgttcgtagaggcggcgttggcgttcgtcacaatgcagaatgccatctgagacaccttgcaatgcagataccagtgtttgctactctgcctgctgtgccgtatgctataatagtcgccatatcagcagaagcactgcaaatacatcatcagaaagtagccctagtagcaatgaatgtagaagatcgtgaaaaaaaaaatactgtaactataagcaggaagcgttatgtgaccttgtacataatacatgcactttcggatggaggaacggcttattttttggatgaacggaataatggaatcaaatcgcacagcatttcagaattattatgcccttcaactcc

SEQ ID NO: 27804 - DNA, 2270 bp, Zea Mays
cctcacccacatactctcccctggttgggcctgtgctgtgtggccgctctccctccacccaacccaaccaagaaacagaggcccccgctcaagctccgagagacagagaactccatggccgccatggacctcctctccggcaagctcatacgctccctgcgtctccattcctcactcctcccctctgctccttcctcctcccgcgccgtccccacatcccgccgtctccggcgccgccgccatgcccccctgtactgccgccttaccaccacctcctcctcctcatctgcctccaccaccacaaccaccggggtggaggaagacgtcaaaagccaggacctttcctccctcctcacctcctccgacccttctgccgcgcccgccgtcgggaccaagaagaagcggtcgggcggcagcagcggcgcgtctagcatcccgtccggggtgcggctggagggaatctccaagtcctacaagggcgtgacggtgctcaaggacgtgtcctgggagcgccgctcccaggacgtggacctcgatatggtggacgtcaaggtgcagaagctcatgccagagctcgggttcatgcctgaggacgccgaccgcctcgtcgcctccttcagcggtgggtggaaaatgaggatgtctctaggcaagatacttcttcaggaccctgatttgcttttgcttgatgagcctacgaatcatgtcgatttggataccattgagtggctggagatgtatctcaagacgcaggatgtgccgatggtcattatatctcatgacagggcgttccttgatcagttgtgcacaaagatagtggaaactgaatttggtgtgtccaagacatacaagggtaactattcagagtacattctagcaaaggcggtagcagtggaggcacagtatgctgcgtgggagaagcaacagaaggaaattgaacagacaaaggagctgataaacagacttggtgctggagttaatgcagggcgtgcttccagcgagcagaagaaattggagaagcttgaaaaagaagggttgattgagaaacctttccaaaggaagcagctaaagatcagattccctgagcgtggaagaagtgggagaactgtgttgacgataaacaatcttcaattcggatttgagaataagactttgttcaacaatgctaatctgatagtagagagaggtgaaaagatagctattattgggcccaatggttgtgggaagagcacactgcttaaacttatgttggggatggagaagccacaaggtggtgaggtgcttcttggggagcataatgtgttgccgaactattttgagcagaatcaggcagaagctcttgatttagagaagaccgtgttagacactgtagcagaagctgcggaagattggatacttgatgatatcaaaggtctccttggccgttgcaacttcagggatgacatgctggatagaaaagttcagtttttaagtggtggagagaaggcaaggcttgcattttgcaagttcatggtgactccatctactctactcatcttggatgaaccgacaaaccatcttgatatcccatcaaaagaaatgcttgaggaggcaatatcagaatatactggcaccgtcataacagtttctcatgaccggtacttcataaaacaaattgtcaacagagtcatcgaagtgaaagatcagactatccaagactatcaaggagattacaattactaccttgagaggaaccttgaagcccgagaaagggaacttgcccgcgaggaagagctcgaggagagagcccccaaagtaaaagccaagtccaagatgtcgaaggcagagaaagccgtcaggaagaagcagaagatgcaggccttccagcagagcaagcagaaatccaagtcgcttaagaactcgaagcggtggaactgagattttttcgtcgttcgtagaggcggcgttggcgttcgtcacaatgcagaatgccatctgagacaccttgcaatgcagataccagtgtttgctactctgcctgctgtgccgtatgctataatagtcgccatatcagcagaagcactgcaaatacatcatcagaaagtagccctagtagcaatgaatgtagaagatcgtgaaaaaaaaaatactgtaactataagcaggaagcgttatgtgaccttgtacataatacatgcactttcggatggaggaacggcttattttttggatgaacggaataatggaatcaaatcgcacagcatttcagaattattatgcccttcaactcc

SEQ ID NO: 27805 - DNA, 1647 bp, Zea Mays
ctattaattaacaatttcattagccaaattgtcaagatcccattaacaaaggtatgccatttgagtttgatggtatgtttgatcctttaccttctattgccttcgcaacataaattgcaacttttttggtacatatgatgttgcatacttccagtttccattggtttgaccttgacacgaaatagcaacttcccaattttctgcccccctttctctgaacacaatattaacgcagtggttggctttcatttagtcagttctactcccaagacgacttctagagcgccaagttgatgcttatgttctccgaatgggactaaatatctatgggtttcatcttcctgataatgaaagaggaagtgccttcttttctagggatgatttcagtggagaacaaactaaagaagagaacaagtatatggcattgtgctccacctggagaaccaaggaaaggcagaagcagaaaggacaagcaaccaaacgaatagtgttactgactagtgtgacaagccactgaaaaagaatcagatccatcagattcaagctggtagaatctccgacgcagctgctccattagctgtgcccgtctcagtggctacatggtgtcgaaggtttctatggttagtatcaaagaaacttcagcactacgaataatctctgcagcggaaatcattggtcacaatctacaatgttagattagatgcacctctcgccaggctgaaggacgtaccagttactgaattattttgtgtggatgtcgcgcttgtactcgagaagacgatgcatcaccgggcaccggacgcaccaattccaccgcccgaggcagatgcaagtgaaggcggctcaggactcatcctgtccgccttgctgtatccttcgcttgccatttgctgtacaaagaaaaaaaaaggcgtttctgacagtgactttgaaatcttgtcgcgagcttactagttggctggtgctgtcatgtcaggaaacggatgattgcagattaccgaacattacctgttgggaagggaaaaaacaaacggtgctcttgcatccgacgcgattacaagttggcagcatcttatgccttttggcgatcaagtccacaggagagtgctcattgcatctaaaacggtgaagtgatgggtgctgtggcattcaggctgaggcgaaacctgcgaacctactgtatattcaggtatgttttagccaaccttcagggctcagtgcctatcctatggtaccattcagaatcatagtgcctttagttagttgatggtgctggtggttggaacacaataattacctgatcgccaaggcctgcaactgagccctctcaagattgttaattccatgtaaagttctcctgtggatgttgcattgggtggggggctagttggagacaaaatcttctcctacctttttctcaagaaccctagaaagaaacatttctcaattgtgatttgttggcgcgcgcaaaggggaaagaaaagaataggcaagacgacggcaacttggcagaacagtggcggcaagtgcgctgcagcggtggctcagctgtggtgctccttgagttaatattatgggtcaattttctgtatgtcatcgaaaaatatattcgtcccatatgttatacaaacaaaaaaaaaatctatg

SEQ ID NO: 27806 - DNA, 2019 bp, Zea Mays
cattctggtcccatatctttgatagtgataatgtgcgcagaaatatgcggattagaagtagatgtatgtgtttcaaagcagaatcaatatggtacagttttacctttattattgtttatctgaagttctgaactaagttacttattagtactccctggtccgaaaaggaatgcaattctaggtttggaccaagtttacataaaataacattaacatatgtcttcaaataggtttactgtgaaaaatattccataattaattgaataatatttatttggcatcataaatcaatacttctttgtgtagattttgtaaaatttgaaatcatttgactccccaccaagcaagaattgtattctttttgggatggaaggagtagctgttttcagttcatgctatcttattgagtttaagtacgctgttagatctattaattaacaatttcattagccaaattgtcaagatcccattaacaaaggtatgccatttgagtttgatggtatgtttgatcctttaccttctattgccttcgcaacataaattgcaacttttttggtacatatgatgttgcatacttccagtttccattggtttgaccttgacacgaaatagcaacttcccaattttctgcccccctttctctgaacacaatattaacgcagtggttggctttcatttagtcagttctactcccaagacgacttctagagcgccaagttgatgcttatgttctccgaatgggactaaatatctatgggtttcatcttcctgataatgaaagaggaagtgccttcttttctagggatgatttcagtggagaacaaactaaagaagagaacaagtatatggcattgtgctccacctggagaaccaaggaaaggcagaagcagaaaggacaagcaaccaaacgaatagtgttactgactagtgtgacaagccactgaaaaagaatcagatccatcagattcaagctggtagaatctccgacgcagctgctccattagctgtgcccgtctcagtggctacatggtgtcgaaggtttctatggtcacaatctacaatgttagattagatgcacctctcgccaggctgaaggacgtaccagttactgaattattttgtgtggatgtcgcgcttgtactcgagaagacgatgcatcaccgggcaccggacgcaccaattccaccgcccgaggcagatgcaagtgaaggcggctcaggactcatcctgtccgccttgctgtatccttcgcttgccatttgctgtacaaagaaaaaaaaaggcgtttctgacagtgactttgaaatcttgtcgcgagcttactagttggctggtgctgtcatgtcaggaaacggatgattgcagattaccgaacattacctgttgggaagggaaaaaacaaacggtgctcttgcatccgacgcgattacaagttggcagcatcttatgccttttggcgatcaagtccacaggagagtgctcattgcatctaaaacggtgaagtgatgggtgctgtggcattcaggctgaggcgaaacctgcgaacctactgtatattcaggtatgttttagccaaccttcagggctcagtgcctatcctatggtaccattcagaatcatagtgcctttagttagttgatggtgctggtggttggaacacaataattacctgatcgccaaggcctgcaactgagccctctcaagattgttaattccatgtaaagttctcctgtggatgttgcattgggtggggggctagttggagacaaaatcttctcctacctttttctcaagaaccctagaaagaaacatttctcaattgtgatttgttggcgcgcgcaaaggggaaagaaaagaataggcaagacgacggcaacttggcagaacagtggcggcaagtgcgctgcagcggtggctcagctgtggtgctccttgagttaatattatgggtcaattttctgtatgtcatcgaaaaatatattcgtcccatatgttatacaaacaaaaaaaaaatctatg

SEQ ID NO: 27807 - DNA, 2473 bp, Zea Mays
cattctggtcccatatctttgatagtgataatgtgcgcagaaatatgcggattagaagtagatgtatgtgtttcaaagcagaatcaatatggtacagttttacctttattattgtttatctgaagttctgaactaagttacttattagtactccctggtccgaaaaggaatgcaattctaggtttggaccaagtttacataaaataacattaacatatgtcttcaaataggtttactgtgaaaaatattccataattaattgaataatatttatttggcatcataaatcaatacttctttgtgtagattttgtaaaatttgaaatcatttgactccccaccaagcaagaattgtattctttttgggatggaaggagtagctgttttcagttcatgctatcttattgagtttaagtacgctgttagatctattaattaacaatttcattagccaaattgtcaagatcccattaacaaaggtatgccatttgagtttgatggtatgtttgatcctttaccttctattgccttcgcaacataaattgcaacttttttggtacatatgatgttgcatacttccagtttccattggtttgaccttgacacgaaatagcaacttcccaattttctgcccccctttctctgaacacaatattaacgcagtggttggctttcatttagtcagttctactcccaagacgacttctagagcgccaagttgatgcttatgttctccgaatgggactaaatatctatgggtttcatcttcctgataatgaaagaggaagtgccttcttttctagggatgatttcagtggagaacaaactaaagaagagaacaagtatatggcattgtgctccacctggagaaccaaggaaaggcagaagcagaaaggacaagcaaccaaacgaatagtgttactgactagtgtgacaagccactgaaaaagaatcagatccatcagtacgtttgatggagatgttccttagattatacacaccgttgaaattttttcactaattgtttaaccacagatccctcattcattcatatgcgcggcaggattcaagctggtagaatctccgacgcagctgctccattagctgtgcccgtctcagtggctacatggtgtcgaaggtttctatggttagtatcaaagaaacttcagcactacgaataatctctgcagcggaaatcattggtgggtataataaaagcttcctgtttacacacacatgaaagccagtttagtcacacagctggtatgacgtaaatctgctgtttccgcattttagaaattccctccccaaagcaagatggggggcatataaagttatcgctgccaaggaatttgtcctgccctatgttgttcttgatgcacctacttcattgggtgatgcataaagttgctaatgtcactgctttatggtcacgatgtgtctatattttgttggcttgttgtagtccagtgattctcttactcttttactaattttctcaggtcacaatctacaatgttagattagatgcacctctcgccaggctgaaggacgtaccagttactgaattattttgtgtggatgtcgcgcttgtactcgagaagacgatgcatcaccgggcaccggacgcaccaattccaccgcccgaggcagatgcaagtgaaggcggctcaggactcatcctgtccgccttgctgtatccttcgcttgccatttgctgtacaaagaaaaaaaaaggcgtttctgacagtgactttgaaatcttgtcgcgagcttactagttggctggtgctgtcatgtcaggaaacggatgattgcagattaccgaacattacctgttgggaagggaaaaaacaaacggtgctcttgcatccgacgcgattacaagttggcagcatcttatgccttttggcgatcaagtccacaggagagtgctcattgcatctaaaacggtgaagtgatgggtgctgtggcattcaggctgaggcgaaacctgcgaacctactgtatattcaggtatgttttagccaaccttcagggctcagtgcctatcctatggtaccattcagaatcatagtgcctttagttagttgatggtgctggtggttggaacacaataattacctgatcgccaaggcctgcaactgagccctctcaagattgttaattccatgtaaagttctcctgtggatgttgcattgggtggggggctagttggagacaaaatcttctcctacctttttctcaagaaccctagaaagaaacatttctcaattgtgatttgttggcgcgcgcaaaggggaaagaaaagaataggcaagacgacggcaacttggcagaacagtggcggcaagtgcgctgcagcggtggctcagctgtggtgctccttgagttaatattatgggtcaattttctgtatgtcatcgaaaaatatattcgtcccatatgttatacaaacaaaaaaaaaatctatg

SEQ ID NO: 27808 - DNA, 3122 bp, Zea Mays
cccacatccacatggttcccggaagcagcagccttctccttccaacaagcaggatcaggaggacacgagggtggcaaagatcgcggaggtactaagcgtgttggagcccgttcgggcgagtatctctcaacagctgggtgctggtgctgccggccgtcgctgcgtcgtcgctgcaggttacactagacggcgctgcttggccttcatggagacggagctgagcatcattgcggagtttctcaagacacttagccagcaacatctggatgccgacacgaggagatggatggagcactatgagcttgtcttcagtaaactcgacagcgtcatccaagaagttgatccctcacgccgcacgctgctacgaacgcgattgagaagtgccacgcagtgcatcctaagccgcaacaatagatcgtatccgttctctcctaacataaaacagctttactatcgcagcgaacatccctgcaggtttaagcatcttcttcaagctaatagtcgtcctgaggccgacatcgggcttgcaccaccccaacttggtggtggcagtggcactggcaccaacttaacggcgagtgccgccctccctcttgttggcatcgaccgcccggcgaaaaagctcctcaggtggctcacaccccgggaggagacggacaagagcctgagagtcatgtccattgtcggacctccgggcatgggcaagacgactcttgccatggaagtccacaggcgcaagaaggccgaggacgctactgtttccgttttccagtgcaaccttgtggctcggttctcccgggggccggacagaaacaagcttcttctccaagacatcctctctcaagtttctgatcgagcagcaccagcattgacgtcgtccagccagtcacaacgcaagacaataaagctgcttattcacctcgtctcaaaacacctgcgagataagaggtacttcatcattattgacgatatatgggacacatcagattgggagaagatcaaggatgcatttcctaacaataatcttgatagcagaatattgatcacaacacgcgttataagtttgtcatgggtatgctgctttgattctgatgatgggcttgtgcatcagatgaagcctttgaatcggacagactcggaaaggctgcttctggcaagcgcctttggtccttcgtctgtggatgattatgattgccagcagccattgtgtgatgaaatactgatcagatgtgaaggtgtaccattgttcataatcggtatggcggacttgtttaaagaacaattattgcagcagaaggacgccgaggatcagaggacccttgcagtttacagcagcgagctggagcaaggcccccaacgactaccgaaatatggaacgaagacaatgaagtggcgatgcgctttactattccgcatctggcggacaggaatgtcatcacgcgtgttgctggtgctgactgtaggcactgtccggatgaagaagagggctgccactgtcagtggcacgtcaatcattttatgcagcagttccttgcctccaaatctgcagagatgggtttctatttcaccgccagtagcctcaagaagtacttattactagcaggagcaggagctaacaacaacaggacacagcggaggctaatccttcaccatcctgacccaaatctcccatctctgcttcaacaaattgatctatctcagacacgttccctggctgtgtcaggtgctgtcagcggcatccctatggacaagttcgtcaacttggtggtgctggatctggaaggctgggagaatctcaaggacgatgacctgctgcagatatgcagaagcaagatgtatttcctgacgtacctgagcgtcaggaacactccgacaagcaagatcccgccggagatcaaggagctgtggagtctgcagacattggacgcgagctgcacgcagatcagcgatgagctcccactccaagtgttcaagctaacaagtttgaagcacctggatctgagggggacacgggtcaggaggataagcaagctgcccaacaagcagcagattgtgggctcacgggttcccttgtttacccttctcgttggcggcggcggcggcggtggtggtcctatggaaacagcagcgagagtgacgcccgatgtacggcatctccaagacctcgagatgctggccactgttgacttgaccgagaaccccgtgagcttcctccgggctctcggcgacctaaaatggttaaaggtgctcaagatcacgtggtccttctgccactccaccgacggagagtgccgtgcggcgcttctgtcgtccatcggcaggtggtcccacctccagtccctaaccattcactgcggactcggctgctccatggagttcctgggcaccctctcctatccgcccgagcacctcaggaagctcaagatcaccatttgcagcatcacggcagatgatctcaaggtgcttgccgacctggcccagctgcacaccctggtgctaggcctggacttcgtccccacagaagctgtagtgatcgaggacggtggtttccctctgcttcggaagttcttcgtcaactgcccagtgccatggctcgccttcgagataggagcattgccaaatctcgcatatcttcagctggagttcgctgcgacgctgccaacccagaccagggctccatcgggcatcgccaacatccacaggatcacggacattgctctgtgctacggggaacactacgccaacagccccagcgtcaagatcatagtggaggccgtaaggaaacagatcgtcgagcattgcaacccgatcgacctctacatcaatggcattgagcaagacgatgttcaggcaccagatgacttgacagaagatgcaaatgtgactcagagccgaaccggatccggatcacaatcgcccagggaatgatgaccgtacgacacaatcgcccagggaaagagacaagaagaagaactaggagcatgtcagcatatggcacccactagtgttgattccaaattgaagtgtactcttcgtaatttgaatagttgtttacaacttcatttacattgtcgtaatgctgttttttacaaatcaagtattttctgtgtgtttttctttca

SEQ ID NO: 27809 - DNA, 1591 bp, Zea Mays
atgggcttcctcgacttccccttcgcccctgtcccggactctgccgatgcgcgcaggtttcctcagcaccaggaggtgttgcgctacatccaggccttcgcgcgccgattccaccttgatggcatcatccgcctccgcacagaggtgctcgccgtcagcaaggacaacaacaaggggatcagcggcgactggagggtgaggtggcgccggaacgcagcaggagacgagtccgagcaggagcaggaggaggaggatgttcttttaatagtcttcaagtggccggctatggcgcctgttctcacagaaactgatactaaaacatcaattaaggatcttaccatcagttccgatgagaggtttattgccgtgaataggagcagtggcccatgcagagtgtgggatttgcagtcatctgaagttgtagccagtctgccaagagaagcaggggaaatgtttggattctgcagattttgtaataaggcagacaacagtcatgtcctatttataacagcaatggaaggtgacattaaggtgattatggaaaaatagtatcttggaatactacctcatggacaagaacaggatcaaagaaaataactcgtgaggcaatttcagcgtttgcggtgtcgcccaacggtgctctccttgcaattggaacaatcgaaggaagcgtggtcatagtcgactcaaaagacatgcggacacttgtaacagttaaaaaggcccatcttggtgttgtgactacactgtccttctctcaggattcaagaacattgctgtcaacttcctttgactctactgcaagggtgacgtacgttggttccccgaagagtaatggaacaagtatatggcccatcctactagttatcattcttgcagttttagtgtactactgtatgcagcacaaagaagacattctggcgatgttgccgcgttgagatagatttctgttgagccccaccgctcccctgactgatctactctactggacatattagtagtgttgcttcagagattggacaagttttggacttaggtcaacttcattattttctcaaggatacaacaatacagcaaaaggtgttgagccctttcatgtttgtagtagaaagggtcatgtactcaggttgtccaagttttgtaagttgatgatggccgcaagtgatagtcatctgtgtttatgtttaatcatgccgcacttgtgagttgcaaggagatcgtcccaagagtccaatacagtgagttgcaaggagaacaatctgtgtttggatgaccttttttttgcgttggaacttgcaaatgtcttgttgcccttgctaggtttgctgaactcaatggtgtcatctttggttactatccccaagaccaatactgcgcgtgtactcagcagtgaagtgcactacagtcagacgaaccttctgagttctgagtgtcaaaagggtcaaaggcgtgagcttaacgatcttctgaagctcttcatcgacctcaccaaattttgaagctcaagtaatagtaaacagggccttaaaaggccatgtttgatacagagaaactagataggagtgaaacaaatctgagcaacatataactt

SEQ ID NO: 27810 - DNA, 1388 bp, Zea Mays
ccgaaacggaaccttttattttcccgtcccgcgttctcccccaccgtcccgcgtccgccgtgcctccccaccggcggccaccgctaccggcccacctatctccggcacccggcgctcctcaccctcccttctccacgcgatggcgattcgccgcggcggtagccagtcctacggcttcccgatctactgcgccgcctggctcccgctcgcccacatcctgaagcccgaccgtcccgccgccgaggcgaacgcggatgccccctcaccttcccctccccgcctccgatggttttgctcgggggcggcggtgggaaagggacggacggcgtgccgaacaagctcgtgatggcggcccttcgcgccggcgaagaggcgcgcggcccttctccccgatacggtgtatcgatgggaatcacaggaagagagggctacagacttgtcttggagccagaccaggaagctttagcggagctgaaagaagatggtttgcagttggccatatccttcagtcaagaaggttcaatacttgccattggtggtgaagatgttcttttaatagtcttcaagtggccggctatggcgcctgttctcacagaaactgatactaaaacatcaattaaggatcttaccatcagttccgatgagaggtttattgccgtgaataggagcagtggcccatgcagagtgtgggatttgcagtcatctgaagttgtagccagtctgccaagagaagcaggggaaatgtttggattctgcagattttgtaataaggcagacaacagtcatgtcctatttataacagcaatggaaggtgattatggaaaaatagtatcttggaatactacctcatggacaagaacaggatcaaagaaaataactcgtgaggcaatttcagcgtttgcggtgtcgcccaacggtgctctccttgcaattggaacaatcgaaggaagcgtggtcatagtcgactcaaaagacatgcggacacttgtaacagttaaaaaggcccatcttggtgttgtgactacactgtccttctctcaggattcaagaacattgctgtcaacttcctttgactctactgcaagggtgacgtacgttggttccccgaagagtaatggtttgctgaactcaatggtgtcatctttggttactatccccaagaccaatactgcgcgtgtactcagcagtgaagtgcactacagtcagacgaaccttctgagttctgagtgtcaaaagggtcaaaggcgtgagcttaacgatcttctgaagctcttcatcgacctcaccaaattttgaagctcaagtaatagtaaacagggccttaaaaggccatgtttgatacagagaaactagataggagtgaaacaaatctgagcaacatataactt

SEQ ID NO: 27811 - DNA, 324 bp, Zea Mays
atggcagtcggcgagcaaacggagccaccgggcaccgacacggagcgcagccggaggccagggggcctcctggagtcctgggcgaggccacgagggagcccctggcgccggccagctgcgagccggtccgggcggagccgcggagggggagagcccggaggagcaggagctgctggtggcggattctggtcgaaacagggggcggagcgcgaaggttgcgcatctaccctgagtgctgatctaggagccacagaatcggaggtgattttagtccctctaatctccttcggtatttggactctcaaactagtcctgtcaaactag

SEQ ID NO: 27812 - DNA, 713 bp, Zea Mays
gctgtctgcccttgccatccctgtatccattggttcttcagtgatctagatagagagagaatccaaggaagaattggatctgaccctccgctgtagcttgcgtccaattcctaagaatatggacagtgttagcagtggcggacgatgcgccaaaatcaatgtgttgctaacgcaacgacgaaagaaaattcacaacacagtctatagcaattcatatctacaaaataagtgatgaatatgggaaaatgccttattcagctttgtttcctacccagctctatgaatacctctctcaatctcttcagctcgtgctcaatatttcttatacctcaaatgacatccagcagcaagaaaacgtcaggatgagacacaaagctaatccagcgatcagtaacggaaaccataataatagcttaatcctcacaatcgatgatgacaaccattaagttaatagcttcactatttatgtcgaagtgaataaaatcgaaaaacaaacacaggcacgcatctttatcaataccaacacagcatgagatagcctagattcaaagactaggcacgcattattaacagtactaatacactatgagagagtataattcaattcaaagatcaagattaggaacaatcaattaccaaagatcagaatacagaataataatcgaactaccccacggcatcggaattctgatcagggacagggtggagccacg

SEQ ID NO: 27813 - DNA, 2201 bp, Zea Mays
ggacttcgtgcttattgaccatctatacacagcacgcggtccaaccaacctaccaaaacctagctagatttagaggaaaaaaaaaactgtccccaaccgtgagatggctgagtacggcgagcgctaccagggcaacggcgacccggccacgcccgagggtggctacgcgcagaccgagtacgccgccgccggtggctcgccgcccgccgaccgcaagccctccgtgttctccgaccacgctgacggtcgctcctcccagccccagcatgagactcaatcacatggcagtggttcctccaaatctcgagaaagggaccgagaacgtgataagggaaaggacagggagcgaggcagagaccgtgtccgcgaaaaggagagggaccgagacagggacaaggatcgtgaaagaggtgacagagacagggatcgtgatcgccaccacatggatcgtcgcgagcgcagcgagataagggaacaccgtgatcgttctgatgatcgtgaccgtcaccgcgatgatcgtgaccgtcgcaggagtcatgattctgagaggagaagagatcgtgacagagatggccatcgtaggcatcgctcccgttccccttctatgagtcgtgaccgtgaccgcagatctagatctcgttcacgctctagatcgaagagcaagcgcgtgagtggttttgaccaagcacctacacaacaggcacttcctattgttgctgctggtgttatccctggaggcaaacttggcccacattgtcatcggcttccactggattgagctgactgctgtagctttaatgtcagctgcctggtgtcaccgctcctattcctggggttggggtgcttccaaacttgtataatttggctgcaggacagccacaagccatgacacaacaggctaccaggcatgctcggcgtgtctatgtgggcggacttcctccaactgctaatgagcagaccgttgccatattcttcaatggagttatggctgctattggaggaaacacagctggtccaggtgatgctgttcttaatgtctacataaaccacgacaagaaatttgcttttgtggagatgagatctgtggaggaagcaagcaatgcaatggtcttagatggcataatgtttgagggagcaccggtcaagattagaagaccaacggactataatccttccctagcagctgctctgggcccgagccagccaaatccaaatctcaatctttctgctgttggcttaacacctggctctgctggaggattagaaggtccagaccggatctttgtaggtggtctacaatattacttcactgaggcccaagtgcgggagttgcttgagtcctttggacctctgcgtggatttgatcttgtaaaggatagagaaactggtaactcgaagggatatgccttctgtgtgtaccaggatcttaatgttaccgacattgcctgtgctgctcttaatggcatcaagatgggagacaagactcttactgttaggcgggcaaaccaaggagcttctcagcctaggccagagcaagaaagcatcctgttgcaagcacagcagcaggtgcaaatgcagaaattcgtataccaagttggaggtgccctgccaacaaaagttgtatgcctgacacaggtagtgacagaagatgaactgagagatgatgaggaatatgatgacattgtggaggacatgagggaggaaggacacaaatatggtaacttggtgaaagttgcaattccacggcctgaccccagcggtgctcctgttgctggtgttggaaagatgtggagggctcaaccaaagcaaagacagggatgcatgggcggaaattcggcgggaaccaggtggtggcggtgttctaccctgaggacaagtttgcagctgagcagtacgactgaaaagttttagaacccctattctagagttgcagttgtggcacacaatgtggttgttttgaccttttgtagttaagtttggtgattgatccgctgataagtgatataagtttcgtgctcaagtattatatcagctggtaagagtgatacaagtctcgtgcccaagtttcggtctatcaatcgactgcatgttgccctgttggcttcttgcacactgagtgatgtgatcttgtatgacatatacaacatctaggatctagtagttgctgcattagaatgctcattttaagcggttatattgcc

SEQ ID NO: 27814 - DNA, 2434 bp, Zea Mays
ggacttcgtgcttattgaccatctatacacagcacgcggtccaaccaacctaccaaaacctagctagatttagaggaaaaaaaaaactgtccccaaccgtgagatggctgagtacggcgagcgctaccagggcaacggcgacccggccacgcccgagggtggctacgcgcagaccgagtacgccgccgccggtggctcgccgcccgccgaccgcaagccctccgtgttctccgaccacgctgacggtcgctcctcccagccccagcatgagactcaatcacatggcagtggttcctccaaatctcgagaaagggaccgagaacgtgataagggaaaggacagggagcgaggcagagaccgtgtccgcgaaaaggagagggaccgagacagggacaaggatcgtgaaagaggtgacagagacagggatcgtgatcgccaccacatggatcgtcgcgagcgcagcgagataagggaacaccgtgatcgttctgatgatcgtgaccgtcaccgcgatgatcgtgaccgtcgcaggagtcatgattctgagaggagaagagatcgtgacagagatggccatcgtaggcatcgctcccgttccccttctatgagtcgtgaccgtgaccgcagatctagatctcgttcacgctctagatcgaagagcaagcgcgtgagtggttttgaccaagcacctacacaacaggcacttcctattgttgctgctggtgttatccctggtcagctgcctggtgtcaccgctcctattcctggggttggggtgcttccaaacttgtataatttggctgcaggacagccacaagccatgacacaacaggctaccaggcatgctcggcgtgtctatgtgggcggacttcctccaactgctaatgagcagaccgttgccatattcttcaatggagttatggctgctattggaggaaacacagctggtccaggtgatgctgttcttaatgtctacataaaccacgacaagaaatttgcttttgtggagatgagatctgtggaggaagcaagcaatgcaatggtcttagatggcataatgtttgagggagcaccggtcaagattagaagaccaacggactataatccttccctagcagctgctctgggcccgagccagccaaatccaaatctcaatctttctgctgttggcttaacacctggctctgctggaggattagaaggtccagaccggatctttgtaggtggtctacaatattacttcactgaggcccaagtgcgggagttgcttgagtcctttggacctctgcgtggatttgatcttgtaaaggatagagaaactggtaactcgaagggatatgccttctgtgtgtaccaggatcttaatgttaccgacattgcctgtgctgctcttaatggcatcaagatgggagacaagactcttactgttaggcgggcaaaccaaggagcttctcagcctaggccagagcaagaaagcatcctgttgcaagcacagcagcaggtgcaaatgcagaaattcgtataccaagttggaggtgccctgccaacaaaagttgtatgcctgacacaggtagtgacagaagatgaactgagagatgatgaggaatatgatgacattgtggaggacatgagggaggaaggacacaaatatggtaaaccgcacgagactcatcgacttctattaccctctttgttttaaaagctcctctacgttctgctgtcactaccctcagttactgaattggtttcctttttgtgtttttgtcttgtgtgtcttttttgtagtcccgcataatgccattgcagattgttttgtagtccgaccttatgcaatagtggcaatcgggccttaacccacagaagacactattcttttgactttgattaatcattttattattagcgcgtcttgtctatatatatctactctgctcactaagatttggacaggtaacttggtgaaagttgcaattccacggcctgaccccagcggtgctcctgttgctggtgttggaaagatgtggagggctcaaccaaagcaaagacagggatgcatgggcggaaattcggcgggaaccaggtggtggcggtgttctaccctgaggacaagtttgcagctgagcagtacgactgaaaagttttagaacccctattctagagttgcagttgtggcacacaatgtggttgttttgaccttttgtagttaagtttggtgattgatccgctgataagtgatataagtttcgtgctcaagtattatatcagctggtaagagtgatacaagtctcgtgcccaagtttcggtctatcaatcgactgcatgttgccctgttggcttcttgcacactgagtgatgtgatcttgtatgacatatacaacatctaggatctagtagttgctgcattagaatgctcattttaagcggttatattgcc

SEQ ID NO: 27815 - DNA, 2499 bp, Zea Mays
ggacttcgtgcttattgaccatctatacacagcacgcggtccaaccaacctaccaaaacctagctagatttagaggaaaaaaaaaactgtccccaaccgtgagatggctgagtacggcgagcgctaccagggcaacggcgacccggccacgcccgagggtggctacgcgcagaccgagtacgccgccgccggtggctcgccgcccgccgaccgcaagccctccgtgttctccgaccacgctgacggtcgctcctcccagccccagcatgagactcaatcacatggcagtggttcctccaaatctcgagaaagggaccgagaacgtgataagggaaaggacagggagcgaggcagagaccgtgtccgcgaaaaggagagggaccgagacagggacaaggatcgtgaaagaggtgacagagacagggatcgtgatcgccaccacatggatcgtcgcgagcgcagcgagataagggaacaccgtgatcgttctgatgatcgtgaccgtcaccgcgatgatcgtgaccgtcgcaggagtcatgattctgagaggagaagagatcgtgacagagatggccatcgtaggcatcgctcccgttccccttctatgagtcgtgaccgtgaccgcagatctagatctcgttcacgctctagatcgaagagcaagcgcgtgagtggttttgaccaagcacctacacaacaggcacttcctattgttgctgctggtgttatccctggaggcaaacttggcccacattgtcatcggcttccactggattgagctgactgctgtagctttaatgtcagctgcctggtgtcaccgctcctattcctggggttggggtgcttccaaacttgtataatttggctgcaggacagccacaagccatgacacaacaggctaccaggcatgctcggcgtgtctatgtgggcggacttcctccaactgctaatgagcagaccgttgccatattcttcaatggagttatggctgctattggaggaaacacagctggtccaggtgatgctgttcttaatgtctacataaaccacgacaagaaatttgcttttgtggagatgagatctgtggaggaagcaagcaatgcaatggtcttagatggcataatgtttgagggagcaccggtcaagattagaagaccaacggactataatccttccctagcagctgctctgggcccgagccagccaaatccaaatctcaatctttctgctgttggcttaacacctggctctgctggaggattagaaggtccagaccggatctttgtaggtggtctacaatattacttcactgaggcccaagtgcgggagttgcttgagtcctttggacctctgcgtggatttgatcttgtaaaggatagagaaactggtaactcgaagggatatgccttctgtgtgtaccaggatcttaatgttaccgacattgcctgtgctgctcttaatggcatcaagatgggagacaagactcttactgttaggcgggcaaaccaaggagcttctcagcctaggccagagcaagaaagcatcctgttgcaagcacagcagcaggtgcaaatgcagaaattcgtataccaagttggaggtgccctgccaacaaaagttgtatgcctgacacaggtagtgacagaagatgaactgagagatgatgaggaatatgatgacattgtggaggacatgagggaggaaggacacaaatatggtaaaccgcacgagactcatcgacttctattaccctctttgttttaaaagctcctctacgttctgctgtcactaccctcagttactgaattggtttcctttttgtgtttttgtcttgtgtgtcttttttgtagtcccgcataatgccattgcagattgttttgtagtccgaccttatgcaatagtggcaatcgggccttaacccacagaagacactattcttttgactttgattaatcattttattattagcgcgtcttgtctatatatatctactctgctcactaagatttggacaggtaacttggtgaaagttgcaattccacggcctgaccccagcggtgctcctgttgctggtgttggaaagatgtggagggctcaaccaaagcaaagacagggatgcatgggcggaaattcggcgggaaccaggtggtggcggtgttctaccctgaggacaagtttgcagctgagcagtacgactgaaaagttttagaacccctattctagagttgcagttgtggcacacaatgtggttgttttgaccttttgtagttaagtttggtgattgatccgctgataagtgatataagtttcgtgctcaagtattatatcagctggtaagagtgatacaagtctcgtgcccaagtttcggtctatcaatcgactgcatgttgccctgttggcttcttgcacactgagtgatgtgatcttgtatgacatatacaacatctaggatctagtagttgctgcattagaatgctcattttaagcggttatattgcc

SEQ ID NO: 27816 - DNA, 647 bp, Zea Mays
ataaagcaccctctccttgcgcgaattcggacacggccaccacacatcccttcctctctttctcctcgaggctcgagcattcgtgctgctccgaccccaccgccacaggctcggcggtccggcgatctcgctcaccggcgggaacatggaagaccgcaaagttccagaagaacatcaccaggaggggttctgtgcctgaaaccactgtcaagaagggaaatgactaccctgttggccctctagtgcttgggttcttcatctttgtcgtcattggatcatcgttgtttcagatcatcaggacggcaaccagcggcggggtggcttgagagccggcccacatctaatccccagtatagagagttgcttgttatacatgcatccagctaggattgggtagcagctaaaatgttaaacgtgacaagactgccctgcattccgttcatttggtgggccttgaatctggaactgaaccataaggcagaatcatgtaccttatataaagtgttaaatgggtaactggatctcagtgtttcatttaatctttccccggtgttggattttttgtgtgtgtgattctaagatactatgcctttgttcacctgtgttggcttgtgacaattgaagtttcagtagctgcactcaacata

SEQ ID NO: 27817 - DNA, 643 bp, Zea Mays
ataaagcaccctctccttgcgcgaattcggacacggccaccacacatcccttcctctctttctcctcgaggctcgagcattcgtgctgctccgaccccaccgccacaggctcggcggtccggcgatctcgctcaccggcgggaacatgaccgcaaagttccagaagaacatcaccaggaggggttctgtgcctgaaaccactgtcaagaagggaaatgactaccctgttggccctctagtgcttgggttcttcatctttgtcgtcattggatcatcgttgtttcagatcatcaggacggcaaccagcggcggggtggcttgagagccggcccacatctaatccccagtatagagagttgcttgttatacatgcatccagctaggattgggtagcagctaaaatgttaaacgtgacaagactgccctgcattccgttcatttggtgggccttgaatctggaactgaaccataaggcagaatcatgtaccttatataaagtgttaaatgggtaactggatctcagtgtttcatttaatctttccccggtgttggattttttgtgtgtgtgattctaagatactatgcctttgttcacctgtgttggcttgtgacaattgaagtttcagtagctgcactcaacata

SEQ ID NO: 27818 - DNA, 208 bp, Zea Mays
tgaaagaagaaatggtcatccgaagatcatccaccgcgacattaaggcatctaacattcttcttgacttcaaatttgaagctaaggtatgctctaagtttttcttttctgttctagagttaatagctgactgtttctgttaactgaaaatgtatttgtcacacaatgcttatataaaccacttgattaagttatattatgttaggaca

SEQ ID NO: 27819 - DNA, 2901 bp, Zea Mays
gccggataccggtcgctccttgtcttgattcgttgcgtgattagcatctccgaccgatgaggctcaggcctcagtggcaggggcaaatcgctgctgatccgtttgccgcggtgtttttgctgcccaagctctcagtaacagcagaaacgcgtcccagttgtgcgttttggtggctaacaatttttttttaaaaaaaacgctggcaaccgaaaaaaaaaaactttcccacctgacatcttgcacaggagcagcaaagagcttgctcctcaattttgggagattacacagcagaaagagagacttctatggggtggaggggctcatcatgctcacggagtcgtggtgtggtttgctttgccaaggctttgatcccagatggggatctcgtcgggtgcagacttccaccagcagcccaccccacaggccgtgctgccgccacgcccccatggccgtgcgccgacgctgcagacgtctctctccctggctggttccgcctcgccggagcaggtcgggtcgcctccggacacacaggagccgctgtcgaactccgacgcggggcatgactccgccacagagagcgccagctcacgggagacttggcctggggagcccggcaagagtggtggcggcgacgctcctcccgtggcatcagcaccgataactgcactgaggatagctgataataaggagaaggaggtggttggtaatggcgtcgccgagctgcaggcctttcggagtaggatcccgagtgcaggccggatgactctcagggaggttgcttgggacagggtggacctcgttgctgagaagatgaagggtatgagcgatgagctgctggacgaaaccaaagccgagctgcagtcgattctggaagggactggcggtcagcaccagattcaggagttcatgtacctgcagaagcttcttcagggcagggttgatctcaccctgcccatccttttgatggctcaccatgtgcagctggagatcctggttgccatcaagactgggatacaggcgttcttgcacccgagcgtcgacataccccagatccgcctcgctgagattttcctgtacaagaggtgccgcaacattgcttgccagagtgctgtgcctgctgaggagtgcaagtgtaacatatgcagtaacaggaacgggttttgtaatctctgcatgtgcgtgatctgcaataagtttgattttgaggtcaatacgtgccgctgggttgggtgtgatatctgctcgcactggactcacacagactgtgcaattcgtgatggaaagattgggactgggcagacgattaagaacggcgttggccatgcagagatgcttttccggtgccaggcctgccagaggacatctgaactgtttggatgggttagggatgtctttcagcaatgtgcacccaattgggacagggatgccttgctgcgtgagcttgactatgtttgcaagatattccgtctaagtgaggactcaaaggggaggaaattgttcagaaaatgtgctgagctagttgaaagattgaggggtggttctgctgaatcaatgactcctagaattctgctacaagcgctgcaagagctggacattgattcctccaagaactttgagcaccaagagccagggcggctgatcactccccaggaggcctgcaaccggatcgctgaggtcgtccaggaagcagtgaggaagatggagatggtggccgaagagaaattgcggacgtacaaacgcgcccgcctcgctgtggaggcgtgcgacagggagctggaggagaaggcccgggaggcccaggagctgaaggtggagcggctgcggaagctgcagcaggcggaggagctggagagcatcatccggctgaagcaggcggagtcggagatgttccagctgaaggcgagcgaggcccaggaggaggccgagcggctgcggagcgtcgcgctggcgaagcggaagtcggaggcggcggggcaggactacgcgagcatgtacctcaagcggcgcctcgaggaggccgaggccgagaagcagtacatcttcgagaagatcaagctgcaggagaaccagcatgccacgagcagcagcggcgggggtgcccgcctcggcggcggagctccctccgccggggaaccctcgcaggcgatgatgctgtccaagatccaggacctgctgaagaacgtgcgcagcgtgccgtccggcaagccagatgggcagcgctccaagtagcagtagcgtcgtggggtgggctcggctgggcgggaactgccactccatcggcctgctggttgttactacttgttattagacgtagtagttgttaactagcagtgtagtaagtttacatgatatatatactgcatttttttggggggaacaaaatgttgattacctgcgcagcattgtcctaggtgtgtttagtagcgacttgttttcactgattatgtgatatgtatgaattgtatgtgcaggtgattcaagtgtaaccaaacagcgtagctgctgtacggataagtgctaaggctgtctgtagcggtaggggtactcttctcgtaaccgttctccctataaattcttctatatatccctctacacattaaatatatattttcacctaactaacataaccaacttatttttctattttctttttccttttcgacacgtccgccatgtcgccatgttggaatttattttttgttaagtaaaaaaatatttgtggtttataaattgtgcagaacatacaaacataatttaagttaaatttaattttggaaatccataacaaactttattattgtgcgtcgtctagatttttcttaaacatcgagacatgaatattgaaccaaacttccgttggaagcacacaacgaacagtcgtacgcagcaagccacggttgg

SEQ ID NO: 27820 - DNA, 2606 bp, Zea Mays
cgagatctggggtttcggcggcggcgagctgcgatgtgctgctggattgatggtttgctttgccaaggctttgatcccagatggggatctcgtcgggtgcagacttccaccagcagcccaccccacaggccgtgctgccgccacgcccccatggccgtgcgccgacgctgcagacgtctctctccctggctggttccgcctcgccggagcaggtcgggtcgcctccggacacacaggagccgctgtcgaactccgacgcggggcatgactccgccacagagagcgccagctcacgggagacttggcctggggagcccggcaagagtggtggcggcgacgctcctcccgtggcatcagcaccgataactgcactgaggatagctgataataaggagaaggaggtggttggtaatggcgtcgccgagctgcaggcctttcggagtaggatcccgagtgcaggccggatgactctcagggaggttgcttgggacagggtggacctcgttgctgagaagatgaagggtatgagcgatgagctgctggacgaaaccaaagccgagctgcagtcgattctggaagggactggcggtcagcaccagattcaggagttcatgtacctgcagaagcttcttcagggcagggttgatctcaccctgcccatccttttgatggctcaccatgtgcagctggagatcctggttgccatcaagactgggatacaggcgttcttgcacccgagcgtcgacataccccagatccgcctcgctgagattttcctgtacaagaggtgccgcaacattgcttgccagagtgctgtgcctgctgaggagtgcaagtgtaacatatgcagtaacaggaacgggttttgtaatctctgcatgtgcgtgatctgcaataagtttgattttgaggtcaatacgtgccgctgggttgggtgtgatatctgctcgcactggactcacacagactgtgcaattcgtgatggaaagattgggactgggcagacgattaagaacggcgttggccatgcagagatgcttttccggtgccaggcctgccagaggacatctgaactgtttggatgggttagggatgtctttcagcaatgtgcacccaattgggacagggatgccttgctgcgtgagcttgactatgtttgcaagatattccgtctaagtgaggactcaaaggggaggaaattgttcagaaaatgtgctgagctagttgaaagattgaggggtggttctgctgaatcaatgactcctagaattctgctacaagcgctgcaagagctggacattgattcctccaagaactttgagcaccaagagccagggcggctgatcactccccaggaggcctgcaaccggatcgctgaggtcgtccaggaagcagtgaggaagatggagatggtggccgaagagaaattgcggacgtacaaacgcgcccgcctcgctgtggaggcgtgcgacagggagctggaggagaaggcccgggaggcccaggagctgaaggtggagcggctgcggaagctgcagcaggcggaggagctggagagcatcatccggctgaagcaggcggagtcggagatgttccagctgaaggcgagcgaggcccaggaggaggccgagcggctgcggagcgtcgcgctggcgaagcggaagtcggaggcggcggggcaggactacgcgagcatgtacctcaagcggcgcctcgaggaggccgaggccgagaagcagtacatcttcgagaagatcaagctgcaggagaaccagcatgccacgagcagcagcggcgggggtgcccgcctcggcggcggagctccctccgccggggaaccctcgcaggcgatgatgctgtccaagatccaggacctgctgaagaacgtgcgcagcgtgccgtccggcaagccagatgggcagcgctccaagtagcagtagcgtcgtggggtgggctcggctgggcgggaactgccactccatcggcctgctggttgttactacttgttattagacgtagtagttgttaactagcagtgtagtaagtttacatgatatatatactgcatttttttggggggaacaaaatgttgattacctgcgcagcattgtcctaggtgtgtttagtagcgacttgttttcactgattatgtgatatgtatgaattgtatgtgcaggtgattcaagtgtaaccaaacagcgtagctgctgtacggataagtgctaaggctgtctgtagcggtaggggtactcttctcgtaaccgttctccctataaattcttctatatatccctctacacattaaatatatattttcacctaactaacataaccaacttatttttctattttctttttccttttcgacacgtccgccatgtcgccatgttggaatttattttttgttaagtaaaaaaatatttgtggtttataaattgtgcagaacatacaaacataatttaagttaaatttaattttggaaatccataacaaactttattattgtgcgtcgtctagatttttcttaaacatcgagacatgaatattgaaccaaacttccgttggaagcacacaacgaacagtcgtacgcagcaagccacggttgg

SEQ ID NO: 27821 - DNA, 2685 bp, Zea Mays
cagctttacagctaacatgagacagaggggaaagccgagtcagcagggttcgtcatgtggctggagttatctcagagtttagggtttagggaaattagcagtgattgtttttcactctaatgaaacacttggtttgctttgccaaggctttgatcccagatggggatctcgtcgggtgcagacttccaccagcagcccaccccacaggccgtgctgccgccacgcccccatggccgtgcgccgacgctgcagacgtctctctccctggctggttccgcctcgccggagcaggtcgggtcgcctccggacacacaggagccgctgtcgaactccgacgcggggcatgactccgccacagagagcgccagctcacgggagacttggcctggggagcccggcaagagtggtggcggcgacgctcctcccgtggcatcagcaccgataactgcactgaggatagctgataataaggagaaggaggtggttggtaatggcgtcgccgagctgcaggcctttcggagtaggatcccgagtgcaggccggatgactctcagggaggttgcttgggacagggtggacctcgttgctgagaagatgaagggtatgagcgatgagctgctggacgaaaccaaagccgagctgcagtcgattctggaagggactggcggtcagcaccagattcaggagttcatgtacctgcagaagcttcttcagggcagggttgatctcaccctgcccatccttttgatggctcaccatgtgcagctggagatcctggttgccatcaagactgggatacaggcgttcttgcacccgagcgtcgacataccccagatccgcctcgctgagattttcctgtacaagaggtgccgcaacattgcttgccagagtgctgtgcctgctgaggagtgcaagtgtaacatatgcagtaacaggaacgggttttgtaatctctgcatgtgcgtgatctgcaataagtttgattttgaggtcaatacgtgccgctgggttgggtgtgatatctgctcgcactggactcacacagactgtgcaattcgtgatggaaagattgggactgggcagacgattaagaacggcgttggccatgcagagatgcttttccggtgccaggcctgccagaggacatctgaactgtttggatgggttagggatgtctttcagcaatgtgcacccaattgggacagggatgccttgctgcgtgagcttgactatgtttgcaagatattccgtctaagtgaggactcaaaggggaggaaattgttcagaaaatgtgctgagctagttgaaagattgaggggtggttctgctgaatcaatgactcctagaattctgctacaagcgctgcaagagctggacattgattcctccaagaactttgagcaccaagagccagggcggctgatcactccccaggaggcctgcaaccggatcgctgaggtcgtccaggaagcagtgaggaagatggagatggtggccgaagagaaattgcggacgtacaaacgcgcccgcctcgctgtggaggcgtgcgacagggagctggaggagaaggcccgggaggcccaggagctgaaggtggagcggctgcggaagctgcagcaggcggaggagctggagagcatcatccggctgaagcaggcggagtcggagatgttccagctgaaggcgagcgaggcccaggaggaggccgagcggctgcggagcgtcgcgctggcgaagcggaagtcggaggcggcggggcaggactacgcgagcatgtacctcaagcggcgcctcgaggaggccgaggccgagaagcagtacatcttcgagaagatcaagctgcaggagaaccagcatgccacgagcagcagcggcgggggtgcccgcctcggcggcggagctccctccgccggggaaccctcgcaggcgatgatgctgtccaagatccaggacctgctgaagaacgtgcgcagcgtgccgtccggcaagccagatgggcagcgctccaagtagcagtagcgtcgtggggtgggctcggctgggcgggaactgccactccatcggcctgctggttgttactacttgttattagacgtagtagttgttaactagcagtgtagtaagtttacatgatatatatactgcatttttttggggggaacaaaatgttgattacctgcgcagcattgtcctaggtgtgtttagtagcgacttgttttcactgattatgtgatatgtatgaattgtatgtgcaggtgattcaagtgtaaccaaacagcgtagctgctgtacggataagtgctaaggctgtctgtagcggtaggggtactcttctcgtaaccgttctccctataaattcttctatatatccctctacacattaaatatatattttcacctaactaacataaccaacttatttttctattttctttttccttttcgacacgtccgccatgtcgccatgttggaatttattttttgttaagtaaaaaaatatttgtggtttataaattgtgcagaacatacaaacataatttaagttaaatttaattttggaaatccataacaaactttattattgtgcgtcgtctagatttttcttaaacatcgagacatgaatattgaaccaaacttccgttggaagcacacaacgaacagtcgtacgcagcaagccacggttgg

SEQ ID NO: 27822 - DNA, 1646 bp, Zea Mays
acaccatcctctcgtgttggctgttgctctgccaatgccacctatggacgcatccgctacactccacctcctccctctcgtcccagtcccagcggccagcgctcatccatccacccccatcctataataaaacctccgaatgcgcctcgcgtgccccgtcctcctcgtcgccggcggagccgcctactatcgcctggagaaggagcgccgcggggagcttttcccactgccgactgccgtctgaccctccgagatcggaagcggcgccggcgccggccggcgatggcgatcccgctcgtgctcgtcgtgctcccgctcggcctgctcttcctcctgtccggcctcatcgtcaacgccatccaggccgtcctatttgtgacgataaggcccttttcgaagagcttctaccgtcggatcaacagattcttggccgagctgctgtggcttcagcttgtctgggtggtggactggtgggcaggtgttaaggtacaactgcatgcagatgaggaaacttacagatcaatgggtaaagagcatgcactcatcatatcaaatcatcggagtgatattgattggctcattggatggatattggcccagcgttcagggtgccttggaagtacacttgctgtcatgaagaagtcatccaagttccttccagttattggctggtcaatgtggtttgcagagtacctctttttggaaaggagctgggccaaggatgaaaagacactaaagtggggtctccaaaggttgaaagacttccctagaccattttggctagctcttttcgtcgagggtactcgctttactccagcaaagcttctcgcagctcaggaatatgcggcctcccagggcttaccggctcctagaaatgtacttattccacgtaccaagggatttgtatctgctgtaagtattatgcgagattttgttccagccatttatgatacaactgtaatagtccctaaagattcccctcaaccaacaatgctgcggattttgaaagggcaatcatcagtgatacatgtccgcatgaaacgtcatgcaatgagtgagatgccaaaatcagatgaggatgtttcaaaatggtgtaaagacatttttgtggcaaaggatgccttactggacaagcatttggcaacaggcactttcgatgaggagattagacctattggccgtccagtgaaatcattgctggtgaccctgttctggtcgtgcctcctgctgtttggcgccatcgagttcttcaagtggacacagcttctgtcgacgtggaggggtgtggcgttcactgccgcagggatggcgcttgtgacgggtgtcatgcatgtcttcatcatgttctcccaggctgagcggtcgagctcagccagggcggcacggaaccgggtcaagaaggaatgaaaaatggagggtggagatgaggaaagggtttgtagggagtttacccccccccccccccccccccgcctttcttttgggcagaaagacatattctggaagcctttcagtagttcatttatcagcaacaattgcatctttcttccattgctgtgcaccttgtatcacctatcagaatgtggtcatatggggattgtacggcagcactgctgtgtgtgttgaaatgttgttccgttctgtga

SEQ ID NO: 27823 - DNA, 898 bp, Zea Mays
cgatgctacctcctgcccaccgcgtgcccctgacccctgcttggcgagttgccggcctccacacgtcaatgtcgccacactctcttcttcgtgattgcctcgctcgcctcctccaccaccggtccaaccaacctcgccacctccctctgcctcccctccctcctcccccaccgcatcacgcagctccaccggttttcacgacttggagcagatctgctacgccaccgccacgtagaccaacttggaggagggatcccatctgaatccgattcccatcccgtccgaatctcccttcccactcgcggacgggatgaccttgtgttgcctctcccgcgcaggcgtcagatctccaggacaagtttgaggccaaccgccatgtggttgttgcacctatcaagatgactttccatatgtaaaacagtcactttttcccttctacatgtacaagcctgactcttagttagttgcctccccttaatgtagacacgagacatgtgtaattacaattagtgccttcttcgcttcaagtctctgatttttgcttctctggagagtatatctaattttagtttctacgagtatttgtcttttgtcatagacacatgtacattgaagtggctggttgggagattgtatcttgcgatcctgccaaccctaatcatgccaaacacttaagaaggaggtattagtatagagagttgagtacctctccaatttcctagcaggtttgtgcaagatttttctccctcctgtaatatccgtcttttcttttaatgtgatttatgacctatttggtggatttttattcttcttttttggctatgactcgggcgaatttcttaaggggttttggtgatggaacatgtgagaagacttcataaccatcaattgaattaat

SEQ ID NO: 27824 - DNA, 1485 bp, Zea Mays
aaatatattagtaggtcttatgaactccatgaattacataagagtgaagaaaagaacagaatttctagaagaatgaaaatgagaacaacggagccttacttcaattgcaaaagggtgcaagaatctcacagatcttgttctcactgattgccagttactaactgatagaagccttgaatttgtagctcgtaactgcaaaaagttagcacgtttgaagatcaatggttgtcagagcatggaatctgttgcactggagcacattgggcgatggtgtccgcgccttttggagctctctctaattttctgccccaggatcgagaacagtgcattcctggagattggtagcggctgctcccttcttaggactcttcatttgattgactgctcaagaataactgatgacgccttgtgccacatagctcaaggctgcaagaacttaacagaactttctattcggcgtggttatgaggttggagacagggcattggtgtctatcgccgagaactgtaaatcgctcagagagttaacgctccagttctgtgagagggtatccgatgcagggctatctgcaatcgcggaaaactgccctctgcataggctaaacttgtgcgggtgccacctaatcaccgataccgggctgacggcagttgccagaggatgccctgatctagtcttcctggatatgagcgtccttcggatcgtaggtgacatagcgcttgcggagataggcgacggctgtccgaagctgagagagatcgcgctctcccactgccctgaggtcaccaacgtcggcctgggccaccttgtgcgagggtgcctgcagctggagtcctgccagatggtctactgccggcggatcaccagctccggggtggcgaccgtcgtctcgggctgcgggaggctgaagaaggtcctcgtggaggagtggaagatcgaaaatgttgtaccagatgttgtatcagaagtgatgaccaaataaagacgagacgaaggaagtggcaagagcttcatcaaatgctgtaccaaattgctgttactcgtcttgtacctcgagtgcttcttcgatttctatgccacgtgttcacgtcctcaagtcagatcgaaaatgttgtaccagatgttgtatcagaagtgatgaccaaataaagacgagacgaagtggcaagagcttcatcaaatgttgtaccaaattgctgttactcgtcttgtaccttgagtgcctcttatgtcacgtgttcacgtcctcgagtcaggcatgtgagatataggaaagaactgtattatcatcaacttaacgtcagaaagttgttagtgctgttcagcagaacatcgctacgtagttcacgagccgttacaaacactcctccgaatatcattacacaacgaatggcaagcactatctcttcacttttttttattttggtggtgtattttctccagaatctctctctctctatatatatctcttttgctttaagttttttt

SEQ ID NO: 27825 - DNA, 2616 bp, Zea Mays
gtggaaacacactatccaactccaagaatgagattcgttcgtgctcctccgatctcctccagagcaagaaaaaactattcgacccctggaagtttcccatacggccacgcctgaatgcccgacctccgtccgatccggtcaaatcctcgccgcccacgcccccgcctccgccggcgatgcggggcgccgacctcatcaacccggcgctccccgacgagctcctcgacgacgtgatccgccgcgtcggctcgggcggggccaagcgcgacctcgacgcctgcgcgctcgtctgccgccgctggcgccgcctggagcgcgcgtcgcgccgctccgcgaggctcgccgcgtccggggagcgcgccgacgaggtggtgcgcctcgtcgccgagcgcttcacggcgctcaccgaggtgtcggtggacgagcgcctcaccgccgcggccgccgcctccgggtccgcccccagatcgtaccgctccggaacgctgcatattcctaaccggatccgacgccggaggagactgcccctcgcatcaaaccttactcttcatatagccccgttcccgttggaccagccagtcagtgatgaaaggacagagcgcagctgtttgactgacgtcggcttgactcatctcgcaaggggttgcagagggcttgagaagttaagtctggtgtggtgttctgccatatcctcaacaggcttggtgaggatagctgagaattgcaagaatttgacttctttggatctccaggcttgctttattggagatccaggacttgttgctattggggaaggatgcaagctgcttaggaaattgaacttgcgatttgttgaaggcaccacagatgaaggcttgattggattagtaaagaactgtggccaatcgctggtctcactttctgttgcaacttgtctttggttgactgatgcatctttacatgctgttggatcccactgccctaacctagaaattctatcggtggaatcagatcgtgttcaaagtgtgggaataatatctattgctaaaggatgccgacaattaaaaaccttgaagctacaatgtattggtactggggatgacgccctagatgctattggttcattctgtcctcttttagagatcttgtcactcaacaacttcgaacgatttacagacaggagccttacttcaattgcaaaagggtgcaagaatctcacagatcttgttctcactgattgccagttactaactgatagaagccttgaatttgtagctcgtaactgcaaaaagttagcacgtttgaagatcaatggttgtcagagcatggaatctgttgcactggagcacattgggcgatggtgtccgcgccttttggagctctctctaattttctgccccaggatcgagaacagtgcattcctggagattggtagcggctgctcccttcttaggactcttcatttgattgactgctcaagaataactgatgacgccttgtgccacatagctcaaggctgcaagaacttaacagaactttctattcggcgtggttatgaggttggagacagggcattggtgtctatcgccgagaactgtaaatcgctcagagagttaacgctccagttctgtgagagggtatccgatgcagggctatctgcaatcgcggaaaactgccctctgcataggctaaacttgtgcgggtgccacctaatcaccgataccgggctgacggcagttgccagaggatgccctgatctagtcttcctggatatgagcgtccttcggatcgtaggtgacatagcgcttgcggagataggcgacggctgtccgaagctgagagagatcgcgctctcccactgccctgaggtcaccaacgtcggcctgggccaccttgtgcgagggtgcctgcagctggagtcctgccagatggtctactgccggcggatcaccagctccggggtggcgaccgtcgtctcgggctgcgggaggctgaagaaggtcctcgtggaggagtggaaggtgagcgagaggacccggcggagggcggggcccgtcctgtcgttcctctgcaccgggctctaatcgaaaatgttgtaccagatgttgtatcagaagtgatgaccaaataaagacgagacgaaggaagtggcaagagcttcatcaaatgctgtaccaaattgctgttactcgtcttgtacctcgagtgcttcttcgatttctatgccacgtgttcacgtcctcaagtcagatcgaaaatgttgtaccagatgttgtatcagaagtgatgaccaaataaagacgagacgaagtggcaagagcttcatcaaatgttgtaccaaattgctgttactcgtcttgtaccttgagtgcctcttatgtcacgtgttcacgtcctcgagtcaggcatgtgagatataggaaagaactgtattatcatcaacttaacgtcagaaagttgttagtgctgttcagcagaacatcgctacgtagttcacgagccgttacaaacactcctccgaatatcattacacaacgaatggcaagcactatctcttcacttttttttattttggtggtgtattttctccagaatctctctctctctatatatatctcttttgctttaagttttttt

SEQ ID NO: 27826 - DNA, 881 bp, Zea Mays
gcggtcaggccaggcccgggaggtgcgccacgacctgaccgacgccgccgcaccaggcgctcgattcccagccgcccccaaaaacccggcgcagatcctagcggtgcggcggccggagctggtgctccagcgcccttcgcggctgcccaggggtggggcgaggctgacgcgcagcgggcgggcgagcgattgcgatggcgtcgctagggcggctcaaatccgccatcttcgatagggaggagaggaagatgcagtaccaatcgcacatccgcgggctcaatgcctatgatcgccataagaagttcatgaaggattatgttcagttttatggccacgagaaaaatgtggatagtagtttgcccatcaaaactgataaagatacgctgagagaaggatacaggttcattctttccgaggaagatgagatggattctacttgggagaaaaggctggtcaaacgttactatgacaagctgtttaaggagtattgcattgctgatatgacccagtataaaaaaggcaagattggactgagatggagaacagaaaaggaggtgatatctggcaaagggcaattcatctgtggtaataggcattgtgatgaaaaacatggtctaggtagttatgaggtcaatttttcttatgttgaagcagaggagcagaaacaagcactagtgaaattggtagcttgcaaaagatgtgcagaaaagcttgcttataagaggcaaaaggagaaagagaatgaaaatgagctccctggtgaaaaggaaattgatttgaaagacagcgacaagagaaagagaaaacatgaggaaagtgaccacagctcagaggacgagaaatatagaagaaagaaaaaaggttgcatatacacgagatag

SEQ ID NO: 27827 - DNA, 1482 bp, Zea Mays
gcggtcaggccaggcccgggaggtgcgccacgacctgaccgacgccgccgcaccaggcgctcgattcccagccgcccccaaaaacccggcgcagatcctagcggtgcggcggccggagctggtgctccagcgcccttcgcggctgcccaggggtggggcgaggctgacgcgcagcgggcgggcgagcgattgcgatggcgtcgctagggcggctcaaatccgccatcttcgatagggaggagaggaagatgcagtaccaatcgcacatccgcgggctcaatgcctatgatcgccataagaagttcatgaaggattatgttttatggccacgagaaaaatgtggatagtagtttgcccatcaaaactgataaagatacgctgagagaaggatacaggttcattctttccgaggaagatgagatggattctacttgggagaaaaggctggtcaaacgttactatgacaagctgtttaaggagtattgcattgctgatatgacccagtataaaaaaggcaagattggactgagatggagaacagaaaaggaggtgatatctggcaaagggcaattcatctgtggtaataggcattgtgatgaaaaacatggtctaggtagttatgaggtcaatttttcttatgttgaagcagaggagcagaaacaagcactagtgaaattggtagcttgcaaaagatgtgcagaaaagcttgcttataagaggcaaaaggagaaagagaatgaaaatgagctccctggtgaaaaggaaattgatttgaaagacagcgacaagagaaagagaaaacatgaggaaagtgaccacagctcagaggacgagaaatatagaagaaagaaaaaaggatttaaggatgccaaaaattctggtagccagagacctgcagatcggtgtggagcatcttcaaagagttcagggaacagtgacgaagccttcgaggagtacctggaaggcatgttcccgtgatcggattcgtagttcttattaaaagaaaaaggtgactgaaggcttcttgatcagcccatgaaaaaaatgatgcacgggtcttggaacaacaccattagcgggtgttggagtagcaagtcagttccagttcgaacctcaacgagtcaacgctctgctgactctacaacgtcatgtaaagtgcgacctgtaattatgcgtgcctgggttgtttcggtgggttttttttctcccattgctttcagagacatggttgacgcctgttagtcaaagaagattgtaatatactaactactactcccttgcccgcactatactgtatgacatttccagcagcgttgctttttcgtccatctctacatcacttctctggctatagagattcagtgtttaccgtatgattagtattctgatgtatgaactgtggttactcggcttcgtatggtattaaaaatttgccaagtttccgtaaaagagtatattgaggaacttggaattatatttata

SEQ ID NO: 27828 - DNA, 1483 bp, Zea Mays
gcggtcaggccaggcccgggaggtgcgccacgacctgaccgacgccgccgcaccaggcgctcgattcccagccgcccccaaaaacccggcgcagatcctagcggtgcggcggccggagctggtgctccagcgcccttcgcggctgcccaggggtggggcgaggctgacgcgcagcgggcgggcgagcgattgcgatggcgtcgctagggcggctcaaatccgccatcttcgatagggaggagaggaagattaccaatcgcacatccgcgggctcaatgcctatgatcgccataagaagttcatgaaggattatgttcagttttatggccacgagaaaaatgtggatagtagtttgcccatcaaaactgataaagatacgctgagagaaggatacaggttcattctttccgaggaagatgagatggattctacttgggagaaaaggctggtcaaacgttactatgacaagctgtttaaggagtattgcattgctgatatgacccagtataaaaaaggcaagattggactgagatggagaacagaaaaggaggtgatatctggcaaagggcaattcatctgtggtaataggcattgtgatgaaaaacatggtctaggtagttatgaggtcaatttttcttatgttgaagcagaggagcagaaacaagcactagtgaaattggtagcttgcaaaagatgtgcagaaaagcttgcttataagaggcaaaaggagaaagagaatgaaaatgagctccctggtgaaaaggaaattgatttgaaagacagcgacaagagaaagagaaaacatgaggaaagtgaccacagctcagaggacgagaaatatagaagaaagaaaaaaggatttaaggatgccaaaaattctggtagccagagacctgcagatcggtgtggagcatcttcaaagagttcagggaacagtgacgaagccttcgaggagtacctggaaggcatgttcccgtgatcggattcgtagttcttattaaaagaaaaaggtgactgaaggcttcttgatcagcccatgaaaaaaatgatgcacgggtcttggaacaacaccattagcgggtgttggagtagcaagtcagttccagttcgaacctcaacgagtcaacgctctgctgactctacaacgtcatgtaaagtgcgacctgtaattatgcgtgcctgggttgtttcggtgggttttttttctcccattgctttcagagacatggttgacgcctgttagtcaaagaagattgtaatatactaactactactcccttgcccgcactatactgtatgacatttccagcagcgttgctttttcgtccatctctacatcacttctctggctatagagattcagtgtttaccgtatgattagtattctgatgtatgaactgtggttactcggcttcgtatggtattaaaaatttgccaagtttccgtaaaagagtatattgaggaacttggaattatatttata

SEQ ID NO: 27829 - DNA, 1445 bp, Zea Mays
gcggtcaggccaggcccgggaggtgcgccacgacctgaccgacgccgccgcaccaggcgctcgattcccagccgcccccaaaaacccggcgcagatcctagcggtgcggcggccggagctggtgctccagcgcccttcgcggctgcccaggggtggggcgaggctgacgcgcagcgggcgggcgagcgattgcgatggcgtcgctagggcggctcaaatccgccatcttcgatagggaggagaggaagatgcagtaccaatcgcacatccgcgggctcaatgcctatgatcgccataagaagttcatgaaggattatgttcagttttatggccacgagaaaaatgtggatagtagtttgcccatcaaaactgataaagatacgctgagagaaggatacaggttcattctttccgaggaagatgagatggattctacttgggagaaaaggctggtcaaacgttactatgacaagctgtttaaggagtattgcattgctgatatgacccagtataaaaaaggcaagattggactgagatggagaacagaaaaggaggtgatatctggcaaagggcaattcatctgtggtaataggcattgtgatgaaaaacatggtctaggtagttatgaggtcaatttttcttatgttgaagcagaggagcagaaacaagcactagtgaaattggtagcttgcaaaagatgtgcagaaaagcttgcttataagaggcaaaaggagaaagagaatgaaaatgagctccctggtgaaaaggaaattgatttgaaagacagcgacaagagaaagagaaaacatgaggaaagtgaccacagctcagaggacgagaaatatagaagaaagaaaaaagatcggtgtggagcatcttcaaagagttcagggaacagtgacgaagccttcgaggagtacctggaaggcatgttcccgtgatcggattcgtagttcttattaaaagaaaaaggtgactgaaggcttcttgatcagcccatgaaaaaaatgatgcacgggtcttggaacaacaccattagcgggtgttggagtagcaagtcagttccagttcgaacctcaacgagtcaacgctctgctgactctacaacgtcatgtaaagtgcgacctgtaattatgcgtgcctgggttgtttcggtgggttttttttctcccattgctttcagagacatggttgacgcctgttagtcaaagaagattgtaatatactaactactactcccttgcccgcactatactgtatgacatttccagcagcgttgctttttcgtccatctctacatcacttctctggctatagagattcagtgtttaccgtatgattagtattctgatgtatgaactgtggttactcggcttcgtatggtattaaaaatttgccaagtttccgtaaaagagtatattgaggaacttggaattatatttata

SEQ ID NO: 27830 - DNA, 262 bp, Zea Mays
gaagaaatcaatcactcttggtgactcccaggagattcattttcagaagcaatccaggtgccactagtgtgggcgcgacccatcacgaggcgatgctggcgagccagccatagcgcgacatctccgtccgcgtcgttaatccctatgggtgtgcaacagcagcggtaagattccttactggtcccatgttcttgctcccctttttctacctactgcagccttggtgtttgatgaaatgtgcgtgtgggcaagggtctgttgc

SEQ ID NO: 27831 - DNA, 2448 bp, Zea Mays
gttcatttcttcatttagtcatttttagaaattgtatacatttttcattctaatttacaaagcttagacatatcttcaatgaattctgtattttttctgtgcatgtattacctacaccttgtgttgtttgtgaccagcaagcacaattgttggtcacttaatgaccaaacaataacaatgtagtgtgttccctgttgtggaatattaaataaagtggaattaatttgtattcacctcacatattgtaatgttattttccttttaattcctagcttctgccatctatttttatgtaatgtatattgagatcttatttttttcctacaatattatatggaccttcactctgcaccagtgtttacacttttactcaaactttttctccattcacaattattcactctcatattccttttgtgtatgaagcttttactctgtgactcccttcaattactacattgattatagtaaataagagcctggaggatttgagtggggatttgataacaaaagagcgtgaaagtaataatgagtcacaacaagcctagaattaataatggagaaaatatgagaacaacgaataccaagttaagatcgagatactgaaaatcaactttcatgagaggaagaagaacgcttgggaagattcaagctcagatgacatttctggtgttatcacacgctttgatggtgttgaccttcaggtttatgaaaccctcactcagtcactctctattatctctatatatgaaacagacaatttggtgctcagtcccagtgatggttaggcttcctgtgcatgtccaatgataaggcagtgtccagtagtttcactgttgactacactatttatagagtgaaagtttgaatatgagtatggtgatgtgtaagctactgtagatagcctaataattgatttcttggttgctcacatagcattattaaagaacatttcaagatgtaaaatcatgcctatggaaagataggttttaagagcaagatgttgaggatgcggagaccttggacgaatacccttccagatttggagtgtaagcaagtttagttcatgcgctgatgctgcaattattggtccggtgacacctcccttactagaactttaggtgactttatcatatcatgattctcttaaaagctaccttgttagaactcatcagtattcgattgttgttagatataactattgaataaacttattattatgccttgaccatttggttttatcatactcttaaaagctacctttagtggatgttttttgaagccacaattatattgaattcatctgtttctatattgtttggcagtcaagtcaatgccacaattatgagatattgaaatcgatggtaatatatgtttttatcgactaatttatgtgtctaaccgcacgcaccacttctacggtcggccttatggcttctccattgggaagaatgtgtgccttcaaaggaaggtgaacttaagagtaaaagcagctaatgagttatagtttaacaaggatagctcagctatcaaaaagctccagactggagtcaataagcttgttactgcagttatagggtgattagtttcacgtctgctacttcctaactggtgcatagataatttaacgccgcttgtgcggcaacctccatctatatgtgacctgcaaaagataaatccttaaatagtaggtcaattgcgaagatttgttagtgatgatccgatgatcaagaaccggagcaccttcaagattggaactgcagggtggtcgggttctcagataagaatgaatcatagaaagttaatgtgtgcatccatggttgtggtcttgacacggcggagcggacctcgctcgggaagctgctgcagccggtagactattgattggaacttttaggtacataagttctccacatgtagatgagtgttatcgtcatagatatggggtcaatccctgttttgttcccatggttgaaagtgatggtcttcattttgttggttgtgacaaaagtcaaaaccggatggagattgtggagcagattgcgggttttgaatttcttttccaaatgtcgtcttcgcgcccaccgcggaggggtggtgaccgaagagatagtggcagaggcgtcccttgtgggctctgctcctatctcgcggtatgaagcctttaacttatgagatgagataggagtctgtgttcttatcccagtataaggtctacaatggcacaatgcttgtaccatctgtttttggggtaacttatttttatcatgcagtgcatgtgacttgaaactttgtgttagcctttattgctttctaccttatggcacctgtagtagtgaactgatgatattcttgtggactctgaagctttgtttgcccagaatggtaattttgttgtattctatttcacacgataaaaccgagttgagcaattgccgttcatcttag

SEQ ID NO: 27832 - DNA, 3672 bp, Zea Mays
attaagatgatgcaagcttggcacaaatgatgggtcgtgaaccaggagataatttccaagacttgataaaagagtatggcgtgtactgaagggtccattcaactacacgactcgtgatgaagttggtataccccgagaatggtaacttctgaccagcatggcataagtctgtttctatatcgacggtatcacttctcggacagaattgcggcctcgatccgcgctctccaggttcccccagattgacgcgtccgcgccgcgcttgcccagatcgatggaatctgcggtctccagatgcgagtccggggctcgctatctgtggaaggcgaggagagacgaagtgacctcgtccatgcctccaccgttggacgagaatatcttctccgatctcaccctcttcgctccaccgcaggagccgctctcgctagagaagaagttgtgcctcgtcatgggcctccacgacggatcaaccaagtgcttatatcctgctttggaatatagttccaagaagaacgccaaggggaacaaacctagaaaagaaagaaacataatttttgaagctttcagaacgcctagagaagctattgaagaaaggaggagaaaatatgagaacaacgaataccaagttaagatcgagatactgaaaatcaactttcatgagaggaagaagaacgcttgggaagattcaagctcagatgacatttctggtgttatcacacgctttgatggtgttgaccttcaggtttatgaaaccctcactcagtcactctctattatctctatatatgaaacagacaatttggtgctcagtcccagtgatggttaggcttcctgtgcatgtccaatgataaggcagtgtccagtagtttcactgttgactacactatttatagagtgaaagtttgaatatgagtatggtgatgtgtaagctactgtagatagcctaataattgatttcttggttgctcacatagcattattaaagaacatttcaagatgtaaaatcatgcctatggaaagataggttttaagagcaagatgttgaggatgcggagaccttggacgaatacccttccagatttggagtgtaagcaagtttagttcatgcgctgatgctgcaattattggtccggtgacacctcccttactagaactttaggtgactttatcatatcatgattctcttaaaagctaccttgttagaactcatcagtattcgattgttgttagatataactattgaataaacttattattatgccttgaccatttggttttatcatactcttaaaagctacctttagtggatgttttttgaagccacaattatattgaattcatctgtttctatattgtttggcagtcaagtcaatgccacaattatgagatattgaaatcgatggtaatatatgtttttatcgactaatttatgtgtctaaccgcacgcaccacttctacggtcggccttatggcttctccattgggaagaatgtgtgccttcaaaggaaggtgaacttaagagtaaaagcagctaatgagttatagtttaacaaggatagctcagctatcaaaaagctccaggtgagctccacattttttttatttatgatgatacaatgatgtgttgttgaccctcaaccagtcgctaatcgtttctttttccctacattttagactggagtcaataagcttgttactgcagttatagggtgattagtttcacgtctgctacttcctaactggtgcatagataatttaacgccgcttgtgcggcaacctccatctatatgtgacctgcaaaagataaatccttaaatagtaggtcaattgcgaagatttgttagtgatgatccgatgatcaagaaccggagcaccttcaaggtacagtttcctttatttgctaaactgtgttaattgttttgttttataaaaatagtgtagtcatggcatatgtatgcatgcgttgtattaggaaaccatgactacgaaacaattatggttaagtccatataacttttctatgtgcttgttatctgttttcttatagtgatcttctaaactttttgtcgaactttactgtagagaaaatagaacttcgatgtaagttacaaataggtgaactagacaaaccattctgctgtagttgacaatcatgatatttgaaaaacgagctcacaactatatttcacacaattgatgctccaaattatttttctgtaattgaaacctaatgtaggaatgtgtaggatatttgctttgcctattagagaaagatttgataggatgtttgctttgcttggttgggaaatatttgataggatgtttgctttaactgataggaaaataccaacattctcatcttcttatggccctgtgcttttactttatgtgctatctaaatatagagtacaatgtaaagctatttttgcagattggaactgcagggtggtcgggttctcagatgtaagctgcacaacattatgctattctccccatcgatattgcacactttaacttgttaccatatttagttcttttgtatgcctttatagtggcttgttaatttacactgctggttcctgcaaccttttacaaattggtaaaaaatgaaaattgacagaggaaaatttgtgctgaagctttattcgttctttggttaagtgattaatgaatgaaaacaaatttgtaaatagtaataaggtttttgttctatcaaacacaatcaagatttgttagcttgcttgctgctgcttagatcaatattggtttctcacatcaactatgctaatgttgaggtgataatcagtccttcactagcataaggatgtatatacagactaatttttgtctccgttgcatggcatttgtgttgttgtataccgctcaagtactgcttatgagattgcttgaactttatcctggaacctcaagggttgtcgttggccaaagctacatctatctttctttcagtgttttgctggaactgataacgttttgagtctgcagaagaatgaatcatagaaagttaatgtgtgcatccatggttgtggtcttgacacggcggagcggacctcgctcgggaagctgctgcagccggtagactattgattggaacttttaggtacataagttctccacatgtagatgagtgttatcgtcatagatatggggtcaatccctgttttgttcccatggttgaaagtgatggtcttcattttgttggttgtgacaaaagtcaaaaccggatggagattgtggagcagattgcgggttttgaatttcttttccaaatgtcgtcttcgcgcccaccgcggaggggtggtgaccgaagagatagtggcagaggcgtcccttgtgggctctgctcctatctcgcggtatgaagcctttaacttatgagatgagataggagtctgtgttcttatcccagtataaggtctacaatggcacaatgcttgtaccatctgtttttggggtaacttatttttatcatgcagtgcatgtgacttgaaactttgtgttagcctttattgctttctaccttatggcacctgtagtagtgaactgatgatattcttgtggactctgaagctttgtttgcccagaatggtaattttgttgtattctatttcacacgataaaaccgagttgagcaattgccgttcatcttag

SEQ ID NO: 27833 - DNA, 3836 bp, Zea Mays
atggctgctatcattggcagaaccgaagagacgttaaatgacgatatagtcctatatctctacattgaaatgcatgacagcatgactgttaggcttattgcctttattttctcctttctccttcatgacttatctatacagagtgcttctgcttctacagattcacaattaaacatacttgataaaagagtatggcgtgtactgaagggtccattcaactacacgactcgtgatgaagttggtataccccgagaatggtaacttctgaccagcatggcataagtctgtttctatatcgacggtatcacttctcggacagaattgcggcctcgatccgcgctctccaggttcccccagattgacgcgtccgcgccgcgcttgcccagatcgatggaatctgcggtctccagatgcgagtccggggctcgctatctgtggaaggcgaggagagacgaagtgacctcgtccatgcctccaccgttggacgagaatatcttctccgatctcaccctcttcgctccaccgcaggagccgctctcgctagagaagaagttgtgcctcgtcatgggcctccacgacggatcaaccaagttccaagaagaacgccaaggggaacaaacctagaaaagaaagaaacataatttttgaagctttcagaacgcctagagaagctattgaaggagaaaatatgagaacaacgaataccaagttaaggtagagctggtcacaaattggaagaggagctgaaggatccatcttggcatccttttaagatgattcaggctatcagataagatcgagatactgaaaatcaactttcatgagaggaagaagaacgcttgggaagattcaagctcagatgacatttctggtgttatcacacgctttgatggtgttgaccttcaggtttatgaaaccctcactcagtcactctctattatctctatatatgaaacagacaatttggtgctcagtcccagtgatggttaggcttcctgtgcatgtccaatgataaggcagtgtccagtagtttcactgttgactacactatttatagagtgaaagtttgaatatgagtatggtgatgtgtaagctactgtagatagcctaataattgatttcttggttgctcacatagcattattaaagaacatttcaagatgtaaaatcatgcctatggaaagataggttttaagagcaagatgttgaggatgcggagaccttggacgaatacccttccagatttggagtgtaagcaagtttagttcatgcgctgatgctgcaattattggtccggtgacacctcccttactagaactttaggtgactttatcatatcatgattctcttaaaagctaccttgttagaactcatcagtattcgattgttgttagatataactattgaataaacttattattatgccttgaccatttggttttatcatactcttaaaagctacctttagtggatgttttttgaagccacaattatattgaattcatctgtttctatattgtttggcagtcaagtcaatgccacaattatgagatattgaaatcgatggtaatatatgtttttatcgactaatttatgtgtctaaccgcacgcaccacttctacggtcggccttatggcttctccattgggaagaatgtgtgccttcaaaggaaggtgaacttaagagtaaaagcagctaatgagttatagtttaacaaggatagctcagctatcaaaaagctccaggtgagctccacattttttttatttatgatgatacaatgatgtgttgttgaccctcaaccagtcgctaatcgtttctttttccctacattttagactggagtcaataagcttgttactgcagttatagggtgattagtttcacgtctgctacttcctaactggtgcatagataatttaacgccgcttgtgcggcaacctccatctatatgtgacctgcaaaagataaatccttaaatagtaggtcaattgcgaagatttgttagtgatgatccgatgatcaagaaccggagcaccttcaaggtacagtttcctttatttgctaaactgtgttaattgttttgttttataaaaatagtgtagtcatggcatatgtatgcatgcgttgtattaggaaaccatgactacgaaacaattatggttaagtccatataacttttctatgtgcttgttatctgttttcttatagtgatcttctaaactttttgtcgaactttactgtagagaaaatagaacttcgatgtaagttacaaataggtgaactagacaaaccattctgctgtagttgacaatcatgatatttgaaaaacgagctcacaactatatttcacacaattgatgctccaaattatttttctgtaattgaaacctaatgtaggaatgtgtaggatatttgctttgcctattagagaaagatttgataggatgtttgctttgcttggttgggaaatatttgataggatgtttgctttaactgataggaaaataccaacattctcatcttcttatggccctgtgcttttactttatgtgctatctaaatatagagtacaatgtaaagctatttttgcagattggaactgcagggtggtcgggttctcagatgtaagctgcacaacattatgctattctccccatcgatattgcacactttaacttgttaccatatttagttcttttgtatgcctttatagtggcttgttaatttacactgctggttcctgcaaccttttacaaattggtaaaaaatgaaaattgacagaggaaaatttgtgctgaagctttattcgttctttggttaagtgattaatgaatgaaaacaaatttgtaaatagtaataaggtttttgttctatcaaacacaatcaagatttgttagcttgcttgctgctgcttagatcaatattggtttctcacatcaactatgctaatgttgaggtgataatcagtccttcactagcataaggatgtatatacagactaatttttgtctccgttgcatggcatttgtgttgttgtataccgctcaagtactgcttatgagattgcttgaactttatcctggaacctcaagggttgtcgttggccaaagctacatctatctttctttcagtgttttgctggaactgataacgttttgagtctgcagaagaatgaatcatagaaagttaatgtgtgcatccatggttgtggtcttgacacggcggagcggacctcgctcgggaagctgctgcagccggtagactattgattggaacttttaggtacataagttctccacatgtagatgagtgttatcgtcatagatatggggtcaatccctgttttgttcccatggttgaaagtgatggtcttcattttgttggttgtgacaaaagtcaaaaccggatggagattgtggagcagattgcgggttttgaatttcttttccaaatgtcgtcttcgcgcccaccgcggaggggtggtgaccgaagagatagtggcagaggcgtcccttgtgggctctgctcctatctcgcggtatgaagcctttaacttatgagatgagataggagtctgtgttcttatcccagtataaggtctacaatggcacaatgcttgtaccatctgtttttggggtaacttatttttatcatgcagtgcatgtgacttgaaactttgtgttagcctttattgctttctaccttatggcacctgtagtagtgaactgatgatattcttgtggactctgaagctttgtttgcccagaatggtaattttgttgtattctatttcacacgataaaaccgagttgagcaattgccgttcatcttag

SEQ ID NO: 27834 - DNA, 800 bp, Zea Mays
gtcaagcatgcattggatgagtgctctcttatacacacccataggccccaccagttagcccgagttagcatcttcaaatcactttgtctctccccacacctctcactctctcactctcatcacttcctcattctctttgaaaaacgaagaacaagaagtgagttatggagaagagggaagtggagctaaaatcaaggacaagatcaagcttagttgaagaaaaagatgaagtgaatctccatttccactctctcacacaagtatgaagctttccggtgccaaatcaatctcaattgtaatctctagtcatttcctggattctattctcatgggaagatgatgtccatccctatcgaatccgttgcggccgccatgcatataataggcaaccagcaaaagggaagacgggtcgccgccatggcgccgccacccctgaaaggcggaaaccaacggttctgtctgtttgggagacccaagctgatgcaagagcacggcatcgcagtccaagagaaaaaaggtcgctgatctttgcaagatcatcgccattgcagatgaaaaatagaatggaaaacaaatcaaacgaaccaacgaacgaaaatggctctcgctgacgaacacgactctctctctctcgaccatcggcaacgacagcaatctgctgccggccggcgtctcgttgtcactcgatcgggcggccctccttcagatagcccccatcatgaccgcgccgacctgcacgcccctccggccggcggccacctgacaaagctccccgcctccaccgccggcgccgccaccac

SEQ ID NO: 27835 - DNA, 1161 bp, Zea Mays
gtcaagcatgcattggatgagtgctctcttatacacacccataggccccaccagttagcccgagttagcatcttcaaatcactttgtctctccccacacctctcactctctcactctcatcacttcctcattctctttgaaaaacgaagaacaagaagtgagttatggagaagagggaagtggagctaaaatcaaggacaagatcaagcttagttgaagaaaaagatgaagtgaatctccatttccactctctcacacaagtatgaagctttccggtgccaaatcaatctcaattgtaatctctagtcatttcctggattctattctcatgggaagatgatgtccatccctatcgaatccgttgcggccgccatgcatataataggcaaccagcaaaagggaagacgggtcgccgccatggcgccgccacccctgaaaggcggaaaccaacggttctgtctgtttgggagacccaagctgatgcaagagcacggcatcgcagtccaagagaaaaaaggtcgctgatgtgagcctctgcccgattctctgtttccttttttccttttcgcgacatggtctcaccccgccgccgggaccgggaccgtcgtcgggcgacgacggaccaccggtgcaactgcctgtgccccgagcattatttgttggctgcggctagctccgcgccagcttttgttaactttacaggaactgtactagctagctaccatctgtagcagcagccagcacccagcaggcaaggatgtgtgcaaaaatggcagaattttaatcacgaggcaaggcaatggttaagcacgcgcacgcacgggcgcacggcggctaaataatccctatccataacgctatcgtctccctctctccctccaatgcagctttgcaagatcatcgccattgcagatgaaaaatagaatggaaaacaaatcaaacgaaccaacgaacgaaaatggctctcgctgacgaacacgactctctctctctcgaccatcggcaacgacagcaatctgctgccggccggcgtctcgttgtcactcgatcgggcggccctccttcagatagcccccatcatgaccgcgccgacctgcacgcccctccggccggcggccacctgacaaagctccccgcctccaccgccggcgccgccaccac

SEQ ID NO: 27836 - DNA, 1959 bp, Zea Mays
gtcaagcatgcattggatgagtgctctcttatacacacccataggccccaccagttagcccgagttagcatcttcaaatcactttgtctctccccacacctctcactctctcactctcatcacttcctcattctctttgaaaaacgaagaacaagaagtgagttatggagaagagggaagtggagctaaaatcaaggacaagatcaagcttagttgaagaaaaagatgaagtgaatctccatttccactctctcacacaagtatgaagctttccggtgccaaatcaatctcaattgtaatctctagtcatttcctggattctattctcatgggaagatgatggtgagtacgtgatcttctacgtatgcctactttctggggtccacttcccactttttcgtttctctcgtggcattcttgaatactatgggctcaatcctgtgtatctcacgcccaaagccatcctagctttctcagcctttacctacctctatgaagctttttcattgatgtagtggctttggccccctcgttcctccacttctttgtcgcttgtacctatactggtgtgaagccctttgggaaggtatacttctaactatgcaccaggcctcagagttgttcccactatattgccccatatttttatggaaagtgggaacacccgcggacgtcttgaatgaacctgcaatagagagaatacagaatatgtctagatgagtttttctttgctttcccttagaggtcaaacatatagatgtcgaggatgggtaacgtgtttcgaagaagaggtgagatgataaaagaaacagagattagggaggggtgtaattctaatatttggagtaccggagacgtggtcgatggagatgactcattggacttgaggagggcaacaaagagagtgggagactgaggtggagcgagtggaagagcatagagcaagagcgaggcacaaagacatagggcggggaatagactaagattaaggtaaggctattattatgccccgtttggttcctttagtcgagggactaaagtttagttaggagactaaagtttagtccatatcctatttggttctagggactaaaactattcaaaacatattaaatgaattataagagcactaaaatactacttagcactctccctccattagtgcaactgaaataaagaaggaccaaaaagtgaaatttatatggttagactaaaacagtttagtctctgttttagttccactgtttgacaatttaggaactaaatgagactaaaatggatggactaatctttagtcaatcaaaccaaacgggccttaataggtattttatcacattgttttcaaggttgccatatcaatattttatttatttagaaaatagtctatcaagagtttcatcctcgtaaaacaatttaatttttcataaaactctcttatatattttttttattaaattgtatgtcgtcatatcatcccgtttgcttgagtgattcactgcagtccatccctatcgaatccgttgcggccgccatgcatataataggcaaccagcaaaagggaagacgggtcgccgccatggcgccgccacccctgaaaggcggaaaccaacggttctgtctgtttgggagacccaagctgatgcaagagcacggcatcgcagtccaagagaaaaaaggtcgctgatctttgcaagatcatcgccattgcagatgaaaaatagaatggaaaacaaatcaaacgaaccaacgaacgaaaatggctctcgctgacgaacacgactctctctctctcgaccatcggcaacgacagcaatctgctgccggccggcgtctcgttgtcactcgatcgggcggccctccttcagatagcccccatcatgaccgcgccgacctgcacgcccctccggccggcggccacctgacaaagctccccgcctccaccgccggcgccgccaccac

SEQ ID NO: 27837 - DNA, 2392 bp, Zea Mays
acagttccatggaacatggtagaccccacttgaccggttaccatggcagaatcaattaccatgacatgaagtgtcaagcatgcattggatgagtgctctcttatacacacccataggccccaccagttagcccgagttagcatcttcaaatcactttgtctctccccacacctctcactctctcactctcatcacttcctcattctctttgaaaaacgaagaacaagaagtgagttatggagaagagggaagtggagctaaaatcaaggacaagatcaagcttagttgaagaaaaagatgaagtgaatctccatttccactctctcacacaagtatgaagctttccggtgccaaatcaatctcaattgtaatctctagtcatttcctggattctattctcatgggaagatgatggtgagtacgtgatcttctacgtatgcctactttctggggtccacttcccactttttcgtttctctcgtggcattcttgaatactatgggctcaatcctgtgtatctcacgcccaaagccatcctagctttctcagcctttacctacctctatgaagctttttcattgatgtagtggctttggccccctcgttcctccacttctttgtcgcttgtacctatactggtgtgaagccctttgggaaggtatacttctaactatgcaccaggcctcagagttgttcccactatattgccccatatttttatggaaagtgggaacacccgcggacgtcttgaatgaacctgcaatagagagaatacagaatatgtctagatgagtttttctttgctttcccttagaggtcaaacatatagatgtcgaggatgggtaacgtgtttcgaagaagaggtgagatgataaaagaaacagagattagggaggggtgtaattctaatatttggagtaccggagacgtggtcgatggagatgactcattggacttgaggagggcaacaaagagagtgggagactgaggtggagcgagtggaagagcatagagcaagagcgaggcacaaagacatagggcggggaatagactaagattaaggtaaggctattattatgccccgtttggttcctttagtcgagggactaaagtttagttaggagactaaagtttagtccatatcctatttggttctagggactaaaactattcaaaacatattaaatgaattataagagcactaaaatactacttagcactctccctccattagtgcaactgaaataaagaaggaccaaaaagtgaaatttatatggttagactaaaacagtttagtctctgttttagttccactgtttgacaatttaggaactaaatgagactaaaatggatggactaatctttagtcaatcaaaccaaacgggccttaataggtattttatcacattgttttcaaggttgccatatcaatattttatttatttagaaaatagtctatcaagagtttcatcctcgtaaaacaatttaatttttcataaaactctcttatatattttttttattaaattgtatgtcgtcatatcatcccgtttgcttgagtgattcactgcagtccatccctatcgaatccgttgcggccgccatgcatataataggcaaccagcaaaagggaagacgggtcgccgccatggcgccgccacccctgaaaggcggaaaccaacggttctgtctgtttgggagacccaagctgatgcaagagcacggcatcgcagtccaagagaaaaaaggtcgctgatgtgagcctctgcccgattctctgtttccttttttccttttcgcgacatggtctcaccccgccgccgggaccgggaccgtcgtcgggcgacgacggaccaccggtgcaactgcctgtgccccgagcattatttgttggctgcggctagctccgcgccagcttttgttaactttacaggaactgtactagctagctaccatctgtagcagcagccagcacccagcaggcaaggatgtgtgcaaaaatggcagaattttaatcacgaggcaaggcaatggttaagcacgcgcacgcacgggcgcacggcggctaaataatccctatccataacgctatcgtctccctctctccctccaatgcagctttgcaagatcatcgccattgcagatgaaaaatagaatggaaaacaaatcaaacgaaccaacgaacgaaaatggctctcgctgacgaacacgactctctctctctcgaccatcggcaacgacagcaatctgctgccggccggcgtctcgttgtcactcgatcgggcggccctccttcagatagcccccatcatgaccgcgccgacctgcacgcccctccggccggcggccacctgacaaagctccccgcctccaccgccggcgccgccaccac

SEQ ID NO: 27838 - DNA, 1719 bp, Zea Mays
attagtcccagatctctctaatagtctagtcccccccaagccgactccgcccggctatcttcccgacgctgtttatccccctatgaactaggatccataacagatggtgtgtcacttcaaaaatagtcagatgtgatgattaatgagataatgctgcttgccccatgagagtggaaacaaaattagaccttactcaaacagtatggaaaagtattaggcctagatcctaaaaggattccacagaattgggcagccactcaatttgctgaagcattgggcagagcatgggccgagtataacaatgacagtgctgttgttttgatggttgtccaacctgaagaaagaaatatgtacgaccagtactgtcttgtcaatcatctgaaggaatcatatggtgtggcaactataaggaaaacattggcacaagtagaggctcaagggcaggttcttacagatggaacacttgtggtagatggtcggacagtggctgttgtgtatttcagagccgggtatgcaccaactgattacccttcggaagcggagtggagagcgaggcttctgatggaacaatcatctgcagtgaagtgcccttcgatagcctaccatttggtaggaacaaaaaagatccagcaagaactagcaaaacctaatgttcttgaaagatttcttgacaacaaggacgacattgccaaactacgcaagagtttcgcagggttgtggagcttggataatgaagagattgtgagatctgcaatacagaaacctaacctgtttgtcctgaagcctcagcgagaaggcggaggtatctttcgttagcacttcgagggatcctgcttggtggacacactgatcaaactccagaaggaacagggggaggcgcttgcggcgtacatactgatgcagaggatttttccaaaagcatctcttactcctctagtcaggggcggtgattgctttgaggaccttacaatctcggagctgggaatatacggagcctacctgcggaacagagacaaggtgatcttgaataaccagtctggctacttgatgcgcaccaaagtttcttcttcaaacgagggcggcgttgctgcagggtttgccgttttggacagcgttctcctgactgatgagtgagacagcagcgaggtggcagagctatgggtgacacctgacctgcattagtgacagtgcccacagtcaactcaaacgatgacaatatcaactgcaatcgtaggggaaactatgaaattgcttacagaattgcggacagtcggagaagatggcagtgttacgttatgatatagtttcatgtttgtatgctggttgaaaatgtagggaaactcttgttttcactagaaaggaacccctggaggggggagtaacggtgtagaaggtttatgttgtcacagttggcatgcattcatcatataggaatagctaggagatggcaccgttatgccaacacagttataacaaatatcaattgtaaattttatgattggttatcgactaagcaaaacaattttataagaaattgttgtgcggcaatatcgtttgactaaatcttagtcagatgctcgaatattgctatggtttgtaaatataatatatcatatttatagattttgttgtaataaaacataaaaatatgtgttctattagttatgtgggtgtggaagtagggttaacagctaagattagtctgcatttggaggattg

SEQ ID NO: 27839 - DNA, 2151 bp, Zea Mays
gccatgtcttggcctttgcagcctggacgaggttgttcccatgggatccagggggaccaatcttggcatatgttaggttctttattttatttgcaaataaattaaagccgagatgtaaaaggcttctagttagggttgcactttcacgtgcatatcaagttagacaacaaggttgttgccatgcacaccattacagctcgaggacgagctgtcttcaaagagtggggaatgtcatggggcggcaacccagctgcctagggcatggaggcccatagggataggctcaggattaggattagtggataaagattagattagataagattgagttacttggggttagattagataagattgagttagttacttgggggccaagtcttcctatctatataaggatgagttgtacctacttaacggggaatcaatgaatgaagaagaattagtcccagatctctctaatagtctagtcccccccaagccgactccgcccggctatcttcccgacgctgtttatccccctatgaactaggatccataacagatggtgtgtcacttcaaaaatagtcagatgtgatgattaatgagataatgctgcttgccccatgagagtggaaacaaaattagaccttactcaaacagtatggaaaagtattaggcctagatcctaaaaggattccacagaattgggcagccactcaatttgctgaagcattgggcagagcatgggccgagtataacaatgacagtgctgttgttttgatggttgtccaacctgaagaaagaaatatgtacgaccagtactgtcttgtcaatcatctgaaggaatcatatggtgtggcaactataaggaaaacattggcacaagtagaggctcaagggcaggttcttacagatggaacacttgtggtagatggtcggacagtggctgttgtgtatttcagagccgggtatgcaccaactgattacccttcggaagcggagtggagagcgaggcttctgatggaacaatcatctgcagtgaagtgcccttcgatagcctaccatttggtaggaacaaaaaagatccagcaagaactagcaaaacctaatgttcttgaaagatttcttgacaacaaggacgacattgccaaactacgcaagagtttcgcagggttgtggagcttggataatgaagagattgtgagatctgcaatacagaaacctaacctgtttgtcctgaagcctcagcgagaaggcggagggaacaacatatatggtcaggatttgcaggacacactgatcaaactccagaaggaacagggggaggcgcttgcggcgtacatactgatgcagaggatttttccaaaagcatctcttactcctctagtcaggggcggtgattgctttgaggaccttacaatctcggagctgggaatatacggagcctacctgcggaacagagacaaggtgatcttgaataaccagtctggctacttgatgcgcaccaaagtttcttcttcaaacgagggcggcgttgctgcagggtttgccgttttggacagcgttctcctgactgatgagtgagacagcagcgaggtggcagagctatgggtgacacctgacctgcattagtgacagtgcccacagtcaactcaaacgatgacaatatcaactgcaatcgtaggggaaactatgaaattgcttacagaattgcggacagtcggagaagatggcagtgttacgttatgatatagtttcatgtttgtatgctggttgaaaatgtagggaaactcttgttttcactagaaaggaacccctggaggggggagtaacggtgtagaaggtttatgttgtcacagttggcatgcattcatcatataggaatagctaggagatggcaccgttatgccaacacagttataacaaatatcaattgtaaattttatgattggttatcgactaagcaaaacaattttataagaaattgttgtgcggcaatatcgtttgactaaatcttagtcagatgctcgaatattgctatggtttgtaaatataatatatcatatttatagattttgttgtaataaaacataaaaatatgtgttctattagttatgtgggtgtggaagtagggttaacagctaagattagtctgcatttggaggattg

SEQ ID NO: 27840 - DNA, 2220 bp, Zea Mays
ggtggcactgtctccactggaactcgcggcagctcaggccgtaggactggtgagctgccatgtcttggcctttgcagcctggacgaggttgttcccatgggatccagggggaccaatcttggcatatgttaggttctttattttatttgcaaataaattaaagccgagatgtaaaaggcttctagttagggttgcactttcacgtgcatatcaagttagacaacaaggttgttgccatgcacaccattacagctcgaggacgagctgtcttcaaagagtggggaatgtcatggggcggcaacccagctgcctagggcatggaggcccatagggataggctcaggattaggattagtggataaagattagattagataagattgagttacttggggttagattagataagattgagttagttacttgggggccaagtcttcctatctatataaggatgagttgtacctacttaacggggaatcaatgaatgaagaagaattagtcccagatctctctaatagtctagtcccccccaagccgactccgcccggctatcttcccgacgctgtttatccccctatgaactaggatccataacagatggtgtgtcacttcaaaaatagtcagatgtgatgattaatgagataatgctgcttgccccatgagagtggaaacaaaattatttgatactgcaggaccttactcaaacagtatggaaaagtattaggcctagatcctaaaaggattccacagaattgggcagccactcaatttgctgaagcattgggcagagcatgggccgagtataacaatgacagtgctgttgttttgatggttgtccaacctgaagaaagaaatatgtacgaccagtactgtcttgtcaatcatctgaaggaatcatatggtgtggcaactataaggaaaacattggcacaagtagaggctcaagggcaggttcttacagatggaacacttgtggtagatggtcggacagtggctgttgtgtatttcagagccgggtatgcaccaactgattacccttcggaagcggagtggagagcgaggcttctgatggaacaatcatctgcagtgaagtgcccttcgatagcctaccatttggtaggaacaaaaaagatccagcaagaactagcaaaacctaatgttcttgaaagatttcttgacaacaaggacgacattgccaaactacgcaagagtttcgcagggttgtggagcttggataatgaagagattgtgagatctgcaatacagaaacctaacctgtttgtcctgaagcctcagcgagaaggcggagggaacaacatatatggtcaggatttgcaggacacactgatcaaactccagaaggaacagggggaggcgcttgcggcgtacatactgatgcagaggatttttccaaaagcatctcttactcctctagtcaggggcggtgattgctttgaggaccttacaatctcggagctgggaatatacggagcctacctgcggaacagagacaaggtgatcttgaataaccagtctggctacttgatgcgcaccaaagtttcttcttcaaacgagggcggcgttgctgcagggtttgccgttttggacagcgttctcctgactgatgagtgagacagcagcgaggtggcagagctatgggtgacacctgacctgcattagtgacagtgcccacagtcaactcaaacgatgacaatatcaactgcaatcgtaggggaaactatgaaattgcttacagaattgcggacagtcggagaagatggcagtgttacgttatgatatagtttcatgtttgtatgctggttgaaaatgtagggaaactcttgttttcactagaaaggaacccctggaggggggagtaacggtgtagaaggtttatgttgtcacagttggcatgcattcatcatataggaatagctaggagatggcaccgttatgccaacacagttataacaaatatcaattgtaaattttatgattggttatcgactaagcaaaacaattttataagaaattgttgtgcggcaatatcgtttgactaaatcttagtcagatgctcgaatattgctatggtttgtaaatataatatatcatatttatagattttgttgtaataaaacataaaaatatgtgttctattagttatgtgggtgtggaagtagggttaacagctaagattagtctgcatttggaggattg

SEQ ID NO: 27841 - DNA, 1825 bp, Zea Mays
tagcccctcccccccccagccaactgtgccacacatgccgtgaggagctcgctcatgccagggcagatctggagaaggcccggcagcggcgtagcgcaagctgtttgccgtcttcaagctgcggcacgcagcttcctggcgtggcttgccgtcttcaggctacgacacgtggctacctagagcggcggcgcggctgcaggttgtggtccgccgttgcctagcacgacgacttgcatcaatattgcttgttgaacagcatgcggcacatggggcgacaatgccttcatcaaggaccttactcaaacagtatggaaaagtattaggcctagatcctaaaaggattccacagaattgggcagccactcaatttgctgaagcattgggcagagcatgggccgagtataacaatgacagtgctgttgttttgatggttgtccaacctgaagaaagaaatatgtacgaccagtactgtcttgtcaatcatctgaaggaatcatatggtgtggcaactataaggaaaacattggcacaagtagaggctcaagggcaggttcttacagatggaacacttgtggtagatggtcggacagtggctgttgtgtatttcagagccgggtatgcaccaactgattacccttcggaagcggagtggagagcgaggcttctgatggaacaatcatctgcagtgaagtgcccttcgatagcctaccatttggtaggaacaaaaaagatccagcaagaactagcaaaacctaatgttcttgaaagatttcttgacaacaaggacgacattgccaaactacgcaagagtttcgcagggttgtggagcttggataatgaagagattgtgagatctgcaatacagaaacctaacctgtttgtcctgaagcctcagcgagaaggcggaggtatctttcgttagcacttcgagggatcctgcttggtggacacactgatcaaactccagaaggaacagggggaggcgcttgcggcgtacatactgatgcagaggatttttccaaaagcatctcttactcctctagtcaggggcggtgattgctttgaggaccttacaatctcggagctgggaatatacggagcctacctgcggaacagagacaaggtgatcttgaataaccagtctggctacttgatgcgcaccaaagtttcttcttcaaacgagggcggcgttgctgcagggtttgccgttttggacagcgttctcctgactgatgagtgagacagcagcgaggtggcagagctatgggtgacacctgacctgcattagtgacagtgcccacagtcaactcaaacgatgacaatatcaactgcaatcgtaggggaaactatgaaattgcttacagaattgcggacagtcggagaagatggcagtgttacgttatgatatagtttcatgtttgtatgctggttgaaaatgtagggaaactcttgttttcactagaaaggaacccctggaggggggagtaacggtgtagaaggtttatgttgtcacagttggcatgcattcatcatataggaatagctaggagatggcaccgttatgccaacacagttataacaaatatcaattgtaaattttatgattggttatcgactaagcaaaacaattttataagaaattgttgtgcggcaatatcgtttgactaaatcttagtcagatgctcgaatattgctatggtttgtaaatataatatatcatatttatagattttgttgtaataaaacataaaaatatgtgttctattagttatgtgggtgtggaagtagggttaacagctaagattagtctgcatttggaggattg

SEQ ID NO: 27842 - DNA, 1830 bp, Zea Mays
atagcccctcccccccccagccaactgtgccacacatgccgtgaggagctcgctcatgccagggcagatctggagaaggcccggcagcggcgtagcgcaagctgtttgccgtcttcaagctgcggcacgcagcttcctggcgtggcttgccgtcttcaggctacgacacgtggctacctagagcggcggcgcggctgcaggttgtggtccgccgttgcctagcacgacgacttgcatcaatattgcttgttgaacagcatgcggcacatggggcgacaatgccttcatcaagtttgatactgcaggaccttactcaaacagtatggaaaagtattaggcctagatcctaaaaggattccacagaattgggcagccactcaatttgctgaagcattgggcagagcatgggccgagtataacaatgacagtgctgttgttttgatggttgtccaacctgaagaaagaaatatgtacgaccagtactgtcttgtcaatcatctgaaggaatcatatggtgtggcaactataaggaaaacattggcacaagtagaggctcaagggcaggttcttacagatggaacacttgtggtagatggtcggacagtggctgttgtgtatttcagagccgggtatgcaccaactgattacccttcggaagcggagtggagagcgaggcttctgatggaacaatcatctgcagtgaagtgcccttcgatagcctaccatttggtaggaacaaaaaagatccagcaagaactagcaaaacctaatgttcttgaaagatttcttgacaacaaggacgacattgccaaactacgcaagagtttcgcagggttgtggagcttggataatgaagagattgtgagatctgcaatacagaaacctaacctgtttgtcctgaagcctcagcgagaaggcggagggaacaacatatatggtcaggatttgcaggacacactgatcaaactccagaaggaacagggggaggcgcttgcggcgtacatactgatgcagaggatttttccaaaagcatctcttactcctctagtcaggggcggtgattgctttgaggaccttacaatctcggagctgggaatatacggagcctacctgcggaacagagacaaggtgatcttgaataaccagtctggctacttgatgcgcaccaaagtttcttcttcaaacgagggcggcgttgctgcagggtttgccgttttggacagcgttctcctgactgatgagtgagacagcagcgaggtggcagagctatgggtgacacctgacctgcattagtgacagtgcccacagtcaactcaaacgatgacaatatcaactgcaatcgtaggggaaactatgaaattgcttacagaattgcggacagtcggagaagatggcagtgttacgttatgatatagtttcatgtttgtatgctggttgaaaatgtagggaaactcttgttttcactagaaaggaacccctggaggggggagtaacggtgtagaaggtttatgttgtcacagttggcatgcattcatcatataggaatagctaggagatggcaccgttatgccaacacagttataacaaatatcaattgtaaattttatgattggttatcgactaagcaaaacaattttataagaaattgttgtgcggcaatatcgtttgactaaatcttagtcagatgctcgaatattgctatggtttgtaaatataatatatcatatttatagattttgttgtaataaaacataaaaatatgtgttctattagttatgtgggtgtggaagtagggttaacagctaagattagtctgcatttggaggattg

SEQ ID NO: 27843 - DNA, 1817 bp, Zea Mays
atagcccctcccccccccagccaactgtgccacacatgccgtgaggagctcgctcatgccagggcagatctggagaaggcccggcagcggcgtagcgcaagctgtttgccgtcttcaagctgcggcacgcagcttcctggcgtggcttgccgtcttcaggctacgacacgtggctacctagagcggcggcgcggctgcaggttgtggtccgccgttgcctagcacgacgacttgcatcaatattgcttgttgaacagcatgcggcacatggggcgacaatgccttcatcaaggaccttactcaaacagtatggaaaagtattaggcctagatcctaaaaggattccacagaattgggcagccactcaatttgctgaagcattgggcagagcatgggccgagtataacaatgacagtgctgttgttttgatggttgtccaacctgaagaaagaaatatgtacgaccagtactgtcttgtcaatcatctgaaggaatcatatggtgtggcaactataaggaaaacattggcacaagtagaggctcaagggcaggttcttacagatggaacacttgtggtagatggtcggacagtggctgttgtgtatttcagagccgggtatgcaccaactgattacccttcggaagcggagtggagagcgaggcttctgatggaacaatcatctgcagtgaagtgcccttcgatagcctaccatttggtaggaacaaaaaagatccagcaagaactagcaaaacctaatgttcttgaaagatttcttgacaacaaggacgacattgccaaactacgcaagagtttcgcagggttgtggagcttggataatgaagagattgtgagatctgcaatacagaaacctaacctgtttgtcctgaagcctcagcgagaaggcggagggaacaacatatatggtcaggatttgcaggacacactgatcaaactccagaaggaacagggggaggcgcttgcggcgtacatactgatgcagaggatttttccaaaagcatctcttactcctctagtcaggggcggtgattgctttgaggaccttacaatctcggagctgggaatatacggagcctacctgcggaacagagacaaggtgatcttgaataaccagtctggctacttgatgcgcaccaaagtttcttcttcaaacgagggcggcgttgctgcagggtttgccgttttggacagcgttctcctgactgatgagtgagacagcagcgaggtggcagagctatgggtgacacctgacctgcattagtgacagtgcccacagtcaactcaaacgatgacaatatcaactgcaatcgtaggggaaactatgaaattgcttacagaattgcggacagtcggagaagatggcagtgttacgttatgatatagtttcatgtttgtatgctggttgaaaatgtagggaaactcttgttttcactagaaaggaacccctggaggggggagtaacggtgtagaaggtttatgttgtcacagttggcatgcattcatcatataggaatagctaggagatggcaccgttatgccaacacagttataacaaatatcaattgtaaattttatgattggttatcgactaagcaaaacaattttataagaaattgttgtgcggcaatatcgtttgactaaatcttagtcagatgctcgaatattgctatggtttgtaaatataatatatcatatttatagattttgttgtaataaaacataaaaatatgtgttctattagttatgtgggtgtggaagtagggttaacagctaagattagtctgcatttggaggattg

SEQ ID NO: 27844 - DNA, 2336 bp, Zea Mays
gcccacatcggactaggaacaaccgaacaggaacccattcccaattcccctctccggccttcgccgccgccaaggcacgaagccagagcgcgacggcataaatcgcgggagcgcccgccttcgaatcggtttcccccacgccatgtcctccccctgcgtctcgcaccaacagcaggtccgtctccgtctccgcgctgccagccgccttcccgccccagacacggcctcgttcgcgccgcccgcgccccggcggcttcgggtggcgcacgcggcgatgagcgccaaggcgcccctcggcgtggcgccggcggaggagggggccgggacgccggggcagcaggccgtgctggggcagatggtggaggatgccgccgtgtggtgcgccgtccacgggctcgtcgtcggagatcgcgccaaccagagatcaggaacggttcctggggttggcctggttcacgctccattctcgctgcttccagcgcgttttccggcatcgttcttcaatcaagcatgcgagctggctcctatcttcaatgagctcgtggatcgtgtcagcttggatggggagttcttgcaagctgctttgtctagaacaaagcaggttgatgaatttacttcaaggctgctagaaattcatgataagatgatgtctataaataagaaagaggatatacgcttaggattgcaccggtctgactatatgctggattctgaaaccaattcactacttcaaattgagctcaatactatcgcatcatcctttcctggccttggctcccttgtcagtgaacttcacagtttgatactgcaggaccttactcaaacagtatggaaaagtattaggcctagatcctaaaaggattccacagaattgggcagccactcaatttgctgaagcattgggcagagcatgggccgagtataacaatgacagtgctgttgttttgatggttgtccaacctgaagaaagaaatatgtacgaccagtactgtcttgtcaatcatctgaaggaatcatatggtgtggcaactataaggaaaacattggcacaagtagaggctcaagggcaggttcttacagatggaacacttgtggtagatggtcggacagtggctgttgtgtatttcagagccgggtatgcaccaactgattacccttcggaagcggagtggagagcgaggcttctgatggaacaatcatctgcagtgaagtgcccttcgatagcctaccatttggtaggaacaaaaaagatccagcaagaactagcaaaacctaatgttcttgaaagatttcttgacaacaaggacgacattgccaaactacgcaagagtttcgcagggttgtggagcttggataatgaagagattgtgagatctgcaatacagaaacctaacctgtttgtcctgaagcctcagcgagaaggcggagggaacaacatatatggtcaggatttgcaggacacactgatcaaactccagaaggaacagggggaggcgcttgcggcgtacatactgatgcagaggatttttccaaaagcatctcttactcctctagtcaggggcggtgattgctttgaggaccttacaatctcggagctgggaatatacggagcctacctgcggaacagagacaaggtgatcttgaataaccagtctggctacttgatgcgcaccaaagtttcttcttcaaacgagggcggcgttgctgcagggtttgccgttttggacagcgttctcctgactgatgagtgagacagcagcgaggtggcagagctatgggtgacacctgacctgcattagtgacagtgcccacagtcaactcaaacgatgacaatatcaactgcaatcgtaggggaaactatgaaattgcttacagaattgcggacagtcggagaagatggcagtgttacgttatgatatagtttcatgtttgtatgctggttgaaaatgtagggaaactcttgttttcactagaaaggaacccctggaggggggagtaacggtgtagaaggtttatgttgtcacagttggcatgcattcatcatataggaatagctaggagatggcaccgttatgccaacacagttataacaaatatcaattgtaaattttatgattggttatcgactaagcaaaacaattttataagaaattgttgtgcggcaatatcgtttgactaaatcttagtcagatgctcgaatattgctatggtttgtaaatataatatatcatatttatagattttgttgtaataaaacataaaaatatgtgttctattagttatgtgggtgtggaagtagggttaacagctaagattagtctgcatttggaggattg

SEQ ID NO: 27845 - DNA, 2401 bp, Zea Mays
ggccggtctagacgaagcaagcgatcgggaggaagcacctggacgcctctgtcccggctggagattgacccgccacatgcccacatcggactaggaacaaccgaacaggaacccattcccaattcccctctccggccttcgccgccgccaaggcacgaagccagagcgcgacggcataaatcgcgggagcgcccgccttcgaatcggtttcccccacgccatgtcctccccctgcgtctcgcaccaacagcaggtccgtctccgtctccgcgctgccagccgccttcccgccccagacacggcctcgttcgcgccgcccgcgccccggcggcttcgggtggcgcacgcggcgatgagcgccaaggcgcccctcggcgtggcgccggcggaggagggggccgggacgccggggcagcaggccgtgctggggcagatggtggaggatgccgccgtgtggtgcgccgtccacgggctcgtcgtcggagatcgcgccaaccagagatcaggaacggttcctggggttggcctggttcacgctccattctcgctgcttccagcgcgttttccggcatcgttcttcaatcaagcatgcgagctggctcctatcttcaatgagctcgtggatcgtgtcagcttggatggggagttcttgcaagctgctttgtctagaacaaagcaggttgatgaatttacttcaaggctgctagaaattcatgataagatgatgtctataaataagaaagaggatatacgcttaggattgcaccggtctgactatatgctggattctgaaaccaattcactacttcaaattgagctcaatactatcgcatcatcctttcctggccttggctcccttgtcagtgaacttcacaggaccttactcaaacagtatggaaaagtattaggcctagatcctaaaaggattccacagaattgggcagccactcaatttgctgaagcattgggcagagcatgggccgagtataacaatgacagtgctgttgttttgatggttgtccaacctgaagaaagaaatatgtacgaccagtactgtcttgtcaatcatctgaaggaatcatatggtgtggcaactataaggaaaacattggcacaagtagaggctcaagggcaggttcttacagatggaacacttgtggtagatggtcggacagtggctgttgtgtatttcagagccgggtatgcaccaactgattacccttcggaagcggagtggagagcgaggcttctgatggaacaatcatctgcagtgaagtgcccttcgatagcctaccatttggtaggaacaaaaaagatccagcaagaactagcaaaacctaatgttcttgaaagatttcttgacaacaaggacgacattgccaaactacgcaagagtttcgcagggttgtggagcttggataatgaagagattgtgagatctgcaatacagaaacctaacctgtttgtcctgaagcctcagcgagaaggcggagggaacaacatatatggtcaggatttgcaggacacactgatcaaactccagaaggaacagggggaggcgcttgcggcgtacatactgatgcagaggatttttccaaaagcatctcttactcctctagtcaggggcggtgattgctttgaggaccttacaatctcggagctgggaatatacggagcctacctgcggaacagagacaaggtgatcttgaataaccagtctggctacttgatgcgcaccaaagtttcttcttcaaacgagggcggcgttgctgcagggtttgccgttttggacagcgttctcctgactgatgagtgagacagcagcgaggtggcagagctatgggtgacacctgacctgcattagtgacagtgcccacagtcaactcaaacgatgacaatatcaactgcaatcgtaggggaaactatgaaattgcttacagaattgcggacagtcggagaagatggcagtgttacgttatgatatagtttcatgtttgtatgctggttgaaaatgtagggaaactcttgttttcactagaaaggaacccctggaggggggagtaacggtgtagaaggtttatgttgtcacagttggcatgcattcatcatataggaatagctaggagatggcaccgttatgccaacacagttataacaaatatcaattgtaaattttatgattggttatcgactaagcaaaacaattttataagaaattgttgtgcggcaatatcgtttgactaaatcttagtcagatgctcgaatattgctatggtttgtaaatataatatatcatatttatagattttgttgtaataaaacataaaaatatgtgttctattagttatgtgggtgtggaagtagggttaacagctaagattagtctgcatttggaggattg

SEQ ID NO: 27846 - DNA, 2026 bp, Zea Mays
ccgaaacaagccggagattgatccgccacatgcccacatcggactaggaccagccgaacaaccattcccaatttctccgccgccaaggcacgaagccggagcacgatggcagccaccacgaatcggtttcccccacgccatgtcctccccctgcatctcgcaccagtgcaccaccagcagagcatacagtgagtagatgagattgtcagctgatttttatcatcacaagattgtcgccttgaattttgaggagaatataactctctgttagtcaggtcatcgaaggccgagctatttttcacattctcagttatataatagtttcaggttaatagcggattatcattttctaatttcagaacaaagcagtttgatgaatttacctcaaggctgctagaaattcatgataagatgatgtctataaatacgaaagaggatatacacttaggattgcaccggtctgactatatgctggattcttaaaccaattcactacttcaaattgagctcaacactatcccatcatcctttcctggccttggctcctttgtcagtgaacttcaaaggttgtacaaaatgatattccaccagaaagcatggaggccatgcgcccggtgcagtagctcctaccaacacggacaagcactccagcgtccaaaatgaataatctttcaaaggatgcacataacatggaagtgtctacaccagtacccacaataaatccggaaggaaatgatgaggacgagactccaaagaacactgtctctagaaatggtggtttcctgcagaatgcagttggccaagacctagtccatcttggcgttgcaagaacagcaagtggtggcccttcggctgtcgcttccggtgttaggactggacaccagcacaacagaatggatcttgattcagcatccagcaacgtggataatttcaaaacatcagaatttacaaaagaaaacgatctccaggagtaggggaaaggagagagtagtatgtatgatgagaggcaacctaagagaaggaagcggccccttatgaataatgagaaaatagatgaattagagaaggctctagtagatgagcctgagatgcacaaaaaccctgttctattgcagagttggtcagagaagttaagtttgtcggtaattttttcactttggggcattctattcttaggtcttaattgctgaatgcattctcatttatggaaaatacggccgtgcttttgtagggcccagagatcacagcatcacaacttaaaactggttgaacatccggaaagctaagcttgctcgcattgcaaaagaaagggcggagaatgctgataaaccatctactccccatctcggtgagtcttcagaaagtgccggggaggacaactatctaccccctgcaggtgtgatgactgctctatccaaaggtggtagcctgttgagcccggacagcactgagcaaacgtcgcagacagagctatccccgaacacgacgatgatggtacgtccattcacgagatccttctcgctggagcccggccgcctcgtatcattagtcgacaacgatgggaaggaggttggcaggggcaagatcttccaagcgccagggaagagcacaacgaagagctgcgtttgcgtggttgatgtcactgagctcaggaccgagaagtggagggagctcccccacccttcggaggcatttgggtggacgttccaggaggcggaggcgaggaatggtggcatcataagggtctcttgggacgccgtcaggttgttccctgtagcgtagcaaggccgattgtataacaagatgagtagagggaaactgtggcctaagtaacattatgttaaaagttgtggttaactgtgttgtattcatgaactaattgttttgagcaattcaggtggttactgattttacatttttactactggtgttagtgtcacctgcaatgtgctgtgagaaaccaatgctgagcattcacccatcctttgtatatcaatgggtaagtggccaggatcgtagcatgaac

SEQ ID NO: 27847 - DNA, 7097 bp, Zea Mays
cttgagatgggctcaaaatgagttcggattgagaatcaaaaagattagaagtgataatggaacggagttcaagaactctcaaatcgaaggctttcttgaggacgagggcatcaagcatgatgtctcttctccctacactccacaccacaatggtgtagtggagaggaagaatagaactctactagacatggcaaggaccatgcttgatgagtacaagactccggaccggttttgggctaaggcgattaacaccgcctgctactccatcaacaggttatatcttcaccgaatcctcaagaagacatcatatgaactcctcactggtaaaaagcccaatgtttcatattttagagtctttggtagcaaatgttttattcttattaaaagaggtagaaaatctaaatttactctgaaggctgtagaaggctttttacttggttatgactcaaacacaagggcatatatagagtcttcaacaaatccactggattagttgaagtttcttgtgacattgtgtttgatgagactaatggctcccaagtggagcaagttgatcttgatgaattagatgatgaagaggctccgtgcatcgcgctaaggaacatgtccattggggatgtgtgtcctaaggaattcgaagagcccacacaagcacaagatcaaccgtcatcttccatgcaagcatctccaccaactcaagatgaggaacaggctcaagacaatgaagatcaggaggatgagccacctcaagaggaggacaatgatcaagggggagatgaagacaaggaagatgagcaggagatacagggtcaacgaccgccacacccaagagtccaccaagggatttaaagagatcaccccgtgaactcaattctcggtgacattcataaggggtaactactcgatctcgagtcgctcatttttgtgaacaatactcttttgtgtcctctattgagccatacagggtggaggatgcattaaaagatttggattgggtgttagcaatgcaagaggagctcaacaacttcacgaggaatgaggtatggcatttagttccacgtcctaatcaaaatgttgtaggtaccaaatgggtattccgcaacaagcaagatgagcatggtgtggtgacaaggaacaaagcccgacttgtggccaagggttattcacaagtcgtaggtttggatttcggtaaaacctatgcaccccgtagctagggcttgagtcaaattcgtatattacttgcctatgctactttaccatggcttcaagctttatcaaatggatgtgaaaagtgccttcctcaatggaccaatcaaggaagaggtctatgttgagcaacctcccagctttgaagatagtgagtaccctaaccatgtttataaactctcaaaggcgctttatgggctcaagcaagccccgagagcatggtatgaatgccttcgagattttcttatcactaatggcttcaaagtcggaaaagccgatcctacactctttactaaaactattgcaaaagatttgtttgtatgccaaatttatgttgatgatatcatatttgggtctactaacaaatctacttgtgaagagtttagtaggatcatgatacagaaattcgagatgtctatgatgggggagttgaagtatttcctaggatttcaagtcaagcaactccaagatggcaccttcatcagccaaacaaaatacatacaagacatacttaccaagtttggaatgaaggatgccaagcccatcaagacacccatgggaacaaatgggcatctcgacctcgacacgagaggtaaatccgtatatcaaaatgtatatcggtcgatgataggatctttactctatttgtgtgcatctcgaccagatattatgctttctgtatgcatgtgtgcaaggttccaagccgatcctaaggaagttcaccttagggtcgtaaaaagaatcatgagatatttagtttacactcctaagtttgtactttggtaccccaagggatccacttttgatttaataggatattcaaatgctgattgggcgggttgtaaaattgataggaagagcacatcagggacttgtcagtttctgcgaagatccctggtgtcttgggcttcaaagaaacaaaactccatagctctttctaccgccgaagccgagtatattgtcgcaggccattgttgtgcgcaattactttggatgaggcaaaccctcagggactatggctacaaattgagcaaagtccctctcctatgtgacaatgagagtgcaattcgcatggcggataatcccgttgaacacagccgcactaagcacatagacattcgatatcactttttgaggtatcaccaacaaagggggatatcgagatagcttatgttagcaccaaagaacaattagctgatatctttaccaagccattagatgagaaaacctttagcaaacttaggaatgagctaaatatacttgattctcggatttttgattgaaactttgcacacatagctcattgatatacctttgatttgctacgactaatgtattttcaagtatattcttacaataagtcatagattgaaagggaaatggagttcttcggcgaagacaaggcttcaactccactctactgatatcacttacccttcgccatcactccacataactctccaaattggtataatctttcactcgtatctacttgtaccaatggggagaaagtaaacagggctcacaaaagtctccgtttttggcgattaatgccaaagggggagaaagtattagcccaaaagcaaaaggaccgcatcaccacctttcgaaaaattttaattgatatatttcaaattggtatgtttaccttcaattggtatattttcaaaactaacatctcaatatatttccaattgatatctattaaaactctcttgaaagctaagaggagaatttcattagggggagttttgtttagtcaaaggaaaagcatttgaaacagggggggaaatttgaaatcttgaaaatgcttcttacaatcttattcatatacctttgactaaaaacattttccaaaagaattttcaaaaacgaaacaagtggtgcaagtgtggtccaaaatgttaaataaaagaaagcaaaccatgcatatctagtgaaagtataatttggtttaattctaagtaacctatgcactcaccttatgcaaactagttcaattctgcacttatatatatttgctttagtttgtgttggcatcaatcaccaaaaagggggagattgaaagggaaatagggttaaccttttcccagtattaattttggtggttgaaatgcccaacacaaatattggactaactagtttgctctagattatatattctacaggtgcataaaggttgaacacaaaccaataaaagaacaaagttagagttcaaaattaaaggagcaaaggaaccaagggtgccctggtgcaccaggaccgtacaactccaaactcgccaccctcgggtttttctgggcgtgctccgctataattcaccggactgtccggtgcaccagcggagcaacggctacttcgcggaacggtcgcctgcaaaagctgaattcgagatgaacagtgcgcaaacagtgcgcggcagagcagagcagccgtcagaggcgcaccggacaatgaacagtacctgtccggtgccactagaagacaaagcctccaacggtcgtctgcgcccgaaccctaacggttggttgggtgacgtggctagcgcacccgacagtgtctggtggcgcaccggcctctccggtgcgcccatcgacagcagcccctccccaacggttgtttggtggttgagggctataaatacccatcaactacgtccactccaaccatccaagcattcaccacacttcattcaatacaagagcaaagtgcaacactccaagacacaaatcaaagccaccgatccaatcaaagtctccaattcaattctagtgctttaggacttaagagaggatcgttcttgtgtttctttgttgctcttgttgcttggttggctttcttctttctctcattcttattctcaaagccttgtaagcgaagcaagagacaccaatcgtgtggtggtccttgcggggtctaagtgacctgagaaatcaaggaagaaagctcactcagtctaagtgaccgtttgagatagggaaagggttgaaagagacccggtctttgtgaccacctcaacgggtactaggttctttagaatcaaacctcggtaaaaaaaatcaccgtgtccatccgttttatttcttagttgatttgttttcccctctctcctggacttgatatttgttctaacgctaaccccggcttttagtgtgtttaaagttataaatttcagtttctgcctatccacccccctctaggtgactttcactaacaaatcaacttgtgaagagtttagtaggatcatgatacaaaaatttgagatgtctatgatgggggagttgaagtatttccttggatttcaaatcaagcaactccaagagggcaccttcatcagccaaacaaagtacattcaagacatgcttaagaagtttgggatgaaggatggcaaacccatcaagacacccatgggaaccaatgggcatctcaacctcgacacgagaggtaaatccgtagatcaaaaggtatactggtcgatgatatgatctttactctatttatgtgcatctcgaccagatattatgctttctgtatgcatgtgtgcaagattttaggccgatcctaaggaagttcaccttagggccgtgaaaagaatcatgagatacttagtttacactcctaagtttgggctttggtaccccaagggatccacctttgatttaataggatattccggtgccgattgggcagggtgtaagattgataggaagagcacattagggacttgtcagtttctaaggagatccctggtgtcatggggttcaaagaaacaaaactcagtagctctttccaccaccgaggctgagtatattgccacaggccattgttgtgcgcaattactttagataaggcaaaccctcagggactatggctacaattgagcaaagtccctctcctatgtgataatgagagtgcaatccgcatggcggataatcccgttgaacacagccgcactaagcacatagacattcggtatcactttctgagggatcaccaacaaagggggatatcaaaatagcttatgtaaacaccaagaatcaattagctgatatctttaccaagccattagatgagaaaacctttagcaaactttggaatgagctaaatatacttgattctcggaattttgaatgaaacattgcacacatagctcatttatatacctttgatcatgtctctttcatttagtacaaatgcatatttcttattatttatgtaccaaggctacgactaatgtgttttcaagtatatttctatactaagtcgtagattgaaagggaaatggagtatttggcgaagacaaggcttccactctaacggtctagccgaaacaagccggagattgatccgccacatgcccacatcggactaggaccagccgaacaaccattcccaatttctccgccgccaaggcacgaagccggagcacgatggcagccaccacgaatcggtttcccccacgccatgtcctccccctgcatctcgcaccagtgcaccaccagcaggtccgtctccgtctccgagctgccggacgccttcccgccccagacacggcctcgttctgaattctatccactggattcttttggtaccaatgtggtatatatctttgttcagagcatacaatgagtagatgagattggcagctgatttttatcatcacaagattgtcgccttgaattttgaggagaatataactctctgttagtcaggtcatcgaaggccgagctatttttcacattctcagttatataatagtttcaggttaatagcggattatcattttctaatttcagaacaaagcagtttgatgaatttacctcaaggctgctagaaattcatgataagatgatgtctataaatacgaaagaggtgagtaaactgtttcttatcggcctctgtgtctcagttttgacctttagtaaatgcttctttcaaactttctcttgtttttagccagccactaatatgtgcttgatacacttttaggatatacacttaggattgcaccggtctgactatatgctggattcttaaaccaattcactacttcaaattgagctcaacactatcccatcatcctttcctggccttggctcctttgtcagtgaacttcaaagtttcaggttgtacaaaatgatattccaccagaaagcatggatgccatgcgcccggtgcagtagctcctaccaacacggacaagcactccagcgtccaaaatgaataatcttccaaaggttgaacatccggaaagctaagcttgctcgcattgcaaaagaaagggcggagaatgctgataaaccatctactccccatcccggtgagtcttcagaaagtgccggggaggacaactatctaccccctgcaggtgtgatgactgctctatccaaaggtggtagcctgttgagcccggacagcactgagcaaacgtcgcaggcagagctatccccgaacacgacgatgatggtacgtccattcacgagatccttctcgctggagcccggccgcctcgtatcattagtcgacaacgatgggaaggaggttggcaggggcaagatcttccaagcgccagggaagagcacaacgaagagctgcgtttgcgtggttgatgtcactgagctcaggaccgagaagtggagggagctcccccacccttcggaggcatttgggtggacgttccaggaggcggaggcgaggaatggtggcatcataagggtctcttgggacgccgtcaggttgttccctgtagcgtagaaggccgattgtataacaagatgagtagagggaaactgtggcctaagtaacattatgttaaaagttgtggttaactgtgttgtattcatgaactaattgttttgagcaattcaggtggttactgattttacattttt

SEQ ID NO: 27848 - DNA, 3340 bp, Zea Mays
ctgccactcctgctcacctccgccgaccgccatatcctcctctacatccaccgccgctgccgtataggtcccgtcccctcgtcgccgcggctgcgctggtggggagcggagcggacggacggagatccgcccgcctcgggctccgctacgccggctgaagatgatagccatggtgtctgctgttgaagagcttagttggttaacctctaaagaacttggtgagatgctcagggagtcagacaactttgttttgcagtccaagatagaagacggaggtccaaagcaagtggacatggaaaaagttgtgccctcgcttcctcttcatctccttgctgtatgtttggagcttgggcaaggcccggacttgacctatgtgcttcgtggcatccgttttttgcatagtttgtctgatctagcatcccgccatactagactggagcaggttctccttgatgatgtcaaattatccgaacaagtcatggacctgatattctttctactttctattcttgctgaacagaaggagaataacaatgttggtgcttctccgcttgtgcatgcgtcacttgtagcaggtagtcttcatctgttgacaaattacttctcttcccagtggcatgaacttgtccatattctgcttgcacatccaaaggttgatatctttatggacgtggcctttgatagtttgcatgaagatgtgaggctgttaagtatcagattatcatcaatgggcttcggtttctttcctgttggttctttggaatctcgtcttgctcacttcatctgtcaacagtgtgaagcatcattgcaatttctcttgttgttgtgccagcaaaagctatttcgagatcggattttaaaaaataaggaactctctagaaacggaggcatactgtcactttctcacactatactgaagttagttgtccctgaatgtttgaagcaatcaaccgaccttgttgcttctatttccaggctcaaggcaaagatactttctattctgttgcaactttgtgaggctgaaagtgtctcttaccttgatgaagttgccactaatccaaataacatgcggctagggcaaaccttggctctagaggttctaaatttgctgaagatttcatttggaagaaaaataaacattacttctgattctcatgacaagggtaagatttaccccatgggatctgtgcttatcagtgcattgcgtcttgttgatgtcttctctgatgattcgaacttcagatcattctttttgaccaacactgttccatttttaatccagattctagctgctcctcacgatgaatttgtttcgagttggtgcgctgtcaacttaccaacaattgaggaagatgcaagtctagattatgatccttttggtgcatctgaggtggcactattagcttctgataatatgttgactgaagctaaagctaactattcttgcccttttcgccctagcgtgccttcaatggcatatgcacagacaagaacatcatgcgtagtgaaaataatagcaaatttgcatgtttttattccaaacatatgtgaagagcaagaaagggatctttttcttcagaactttcaaaagcacttggcgtctgggagtcctaaactatcagcagatctgccagcttctagtgattttaaggccactaaagtctgtagaaacttaggatttttgtctgattatgctaaaacattggttcctaatttgttaaatggggaagacttggtgttattaagtgattttgctgataagctacaatcttggtgtaaatcacaagttgcagtaaaggttgtacaaaatgatattccaccagaaagcatggatgccatgtgcccggtgcagcagctcttgccaacacggacaagcactccagcctccaaaatgaataaccttccaaaggatgcacagaacatggaagtgtctacaccagtacccccaataaatccggaaggaaatgatgaggacgagactccaaagaacactgtctctagaaatggtggtttcctgcagaatgcagttggccaagacctagtccatcttggcgttgcaagaacaacaagtggtggcccttcggctgtcgcttccggtgttagcactggacaccagcacaacagaatggatcttgatccagcatccagcagcgtggataatttcaaaacaccagaacttacaaaagaaaacggtctcgaggaggatgggaaaggagagagtagtatgtatgatgagaggcaacctaagagaaggaagcggacccttatgaataatgagcaaatagatgaattagagaaggctctagtagatgagcctgagatgcacaaaaatcctgttctattgcagagttggtcagagaagttaagtctgcagggcccagagatcacagcatcacaacttaaaaactggttgaacaaccggaaagctaagcttgctcgcattgcaaaagaaagggcggagaatgctgataaaccatctacttcccatcccggcgagtcttcagaaagtgccggggaggacaactatctaccccctgcaggtgtgatgactgttctatccaaaggtggtagcctgttgagcccggactgcactgagcaaacgtcgcaggcagagctatccccgaacacgacgatgatggtccgtccattcacgagatccttctcgttggaacccggccgcctcgtttcattagtcgacagcgatgggaaggaggttggcaggggcaagatcttccaagcgccagggaagagcacaacggagagccgcgtttgcgtggttgatgtcactgagctcaggaccgagaagtggagggagctcccccacccttcggaggcatttgggtggacgttccaggaggcggaggcgaggaatggtggcatcatcagggtctcttgggacgccgtcaggttgttccctgtagcgtagcaaggccgattgtataacaagatgagtagagggaaactgtggcctaagtaacattatgttaaaagctgtggttaactgtgttgtattcatgaactaattgttttgagcaattcaggtggttactgattttacatttttactactggtgttagtgtcacctgcaatgtgctgtgagaaaccaatgctgagcattcagccatcctttgtatatcaatgggtaagtggccaggatcgtagcatgaacagaaagggcatgtttattgtggtttttatgtgtggagaaagataaatgagttcatagggtttggaatctagaaatccggtttagaatctagaaagtattactaattttgctagtagtgttagtgtcacctgctttgtgcgtcaaaggctatcattgaaaaaaagtgttat

SEQ ID NO: 27849 - DNA, 3402 bp, Zea Mays
ctgccactcctgctcacctccgccgaccgccatatcctcctctacatccaccgccgctgccgtataggtcccgtcccctcgtcgccgcggctgcgctggtggggagcggagcggacggacggagatccgcccgcctcgggctccgctacgccggctgaagatgatagccatggtgtctgctgttgaagagcttagttggttaacctctaaagaacttggtgagatgctcagggagtcagacaactttgttttgcagtccaagatagaagacggaggtccaaagcaagtacttgtggacatggaaaaagttgtgccctcgcttcctcttcatctccttgctgtatgtttggagcttgggcaaggcccggacttgacctatgtgcttcgtggcatccgttttttgcatagtttgtctgatctagcatcccgccatactagactggagcaggttctccttgatgatgtcaaattatccgaacaagtcatggacctgatattctttctactttctattcttgctgaacagaaggagaataacaatgttggtgcttctccgcttgtgcatgcgtcacttgtagcaggtagtcttcatctgttgacaaattacttctcttcccagtggcatgaacttgtccatattctgcttgcacatccaaaggttgatatctttatggacgtggcctttgatagtttgcatgaagatgtgaggctgttaagtatcagattatcatcaatgggcttcggtttctttcctgttggttctttggaatctcgtcttgctcacttcatctgtcaacagtgtgaagcatcattgcaatttctcttgttgttgtgccagcaaaagctatttcgagatcggattttaaaaaataaggaactctctagaaacggaggcatactgtcactttctcacactatactgaagttagttgtccctgaatgtttgaagcaatcaaccgaccttgttgcttctatttccaggctcaaggcaaagatactttctattctgttgcaactttgtgaggctgaaagtgtctcttaccttgatgaagttgccactaatccaaataacatgcggctagggcaaaccttggctctagaggttctaaatttgctgaagatttcatttggaagaaaaataaacattacttctgattctcatgacaagggtaagatttaccccatgggatctgtgcttatcagtgcattgcgtcttgttgatgtcttctctgatgattcgaacttcagatcattctttttgaccaacactgttccatttttaatccagattctagctgctcctcacgatgaatttgtttcgagttggtgcgctgtcaacttaccaacaattgaggaagatgcaagtctagattatgatccttttggtgcatctgaggtggcactattagcttctgataatatgttgactgaagctaaagctaactattcttgcccttttcgccctagcgtgccttcaatggcatatgcacagacaagaacatcatgcgtagtgaaaataatagcaaatttgcatgtttttattccaaacatatgtgaagagcaagaaagggatctttttcttcagaactttcaaaagcacttggcgtctgggagtcctaaactatcagcagatctgccagcttctagtgattttaaggccactaaagtctgtagaaacttaggatttttgtctgattatgctaaaacattggttcctaatttgttaaatggggaagacttggtgttattaagtgattttgctgataagctacaatcttggtgtaaatcacaagttgcagtaaagcaaaatctcatttttatcataataacacaactgcagagcgtgcacactaaatagaggttgtacaaaatgatattccaccagaaagcatggatgccatgtgcccggtgcagcagctcttgccaacacggacaagcactccagcctccaaaatgaataaccttccaaaggatgcacagaacatggaagtgtctacaccagtacccccaataaatccggaaggaaatgatgaggacgagactccaaagaacactgtctctagaaatggtggtttcctgcagaatgcagttggccaagacctagtccatcttggcgttgcaagaacaacaagtggtggcccttcggctgtcgcttccggtgttagcactggacaccagcacaacagaatggatcttgatccagcatccagcagcgtggataatttcaaaacaccagaacttacaaaagaaaacggtctcgaggaggatgggaaaggagagagtagtatgtatgatgagaggcaacctaagagaaggaagcggacccttatgaataatgagcaaatagatgaattagagaaggctctagtagatgagcctgagatgcacaaaaatcctgttctattgcagagttggtcagagaagttaagtctgcagggcccagagatcacagcatcacaacttaaaaactggttgaacaaccggaaagctaagcttgctcgcattgcaaaagaaagggcggagaatgctgataaaccatctacttcccatcccggcgagtcttcagaaagtgccggggaggacaactatctaccccctgcaggtgtgatgactgttctatccaaaggtggtagcctgttgagcccggactgcactgagcaaacgtcgcaggcagagctatccccgaacacgacgatgatggtccgtccattcacgagatccttctcgttggaacccggccgcctcgtttcattagtcgacagcgatgggaaggaggttggcaggggcaagatcttccaagcgccagggaagagcacaacggagagccgcgtttgcgtggttgatgtcactgagctcaggaccgagaagtggagggagctcccccacccttcggaggcatttgggtggacgttccaggaggcggaggcgaggaatggtggcatcatcagggtctcttgggacgccgtcaggttgttccctgtagcgtagcaaggccgattgtataacaagatgagtagagggaaactgtggcctaagtaacattatgttaaaagctgtggttaactgtgttgtattcatgaactaattgttttgagcaattcaggtggttactgattttacatttttactactggtgttagtgtcacctgcaatgtgctgtgagaaaccaatgctgagcattcagccatcctttgtatatcaatgggtaagtggccaggatcgtagcatgaacagaaagggcatgtttattgtggtttttatgtgtggagaaagataaatgagttcatagggtttggaatctagaaatccggtttagaatctagaaagtattactaattttgctagtagtgttagtgtcacctgctttgtgcgtcaaaggctatcattgaaaaaaagtgttat

SEQ ID NO: 27850 - DNA, 3420 bp, Zea Mays
ctgccactcctgctcacctccgccgaccgccatatcctcctctacatccaccgccgctgccgtataggtcccgtcccctcgtcgccgcggctgcgctggtggggagcggagcggacggacggagatccgcccgcctcgggctccgctacgccggctgaagatgatagccatggtgtctgctgttgaagagcttagttggttaacctctaaagaacttggtgagatgctcagggagtcagacaactttgttttgcagtccaagatagaagacggaggtccaaagcaagtacttgtggacatggaaaaagttgtgccctcgcttcctcttcatctccttgctgtatgtttggagcttgggcaaggcccggacttgacctatgtgcttcgtggcatccgttttttgcatagtttgtctgatctagcatcccgccatactagactggagcaggttctccttgatgatgtcaaattatccgaacaagtcatggacctgatattctttctactttctattcttgctgaacagaagctgttgtttttaaattaggagaataacaatgttggtgcttctccgcttgtgcatgcgtcacttgtagcaggtagtcttcatctgttgacaaattacttctcttcccagtggcatgaacttgtccatattctgcttgcacatccaaaggttgatatctttatggacgtggcctttgatagtttgcatgaagatgtgaggctgttaagtatcagattatcatcaatgggcttcggtttctttcctgttggttctttggaatctcgtcttgctcacttcatctgtcaacagtgtgaagcatcattgcaatttctcttgttgttgtgccagcaaaagctatttcgagatcggattttaaaaaataaggaactctctagaaacggaggcatactgtcactttctcacactatactgaagttagttgtccctgaatgtttgaagcaatcaaccgaccttgttgcttctatttccaggctcaaggcaaagatactttctattctgttgcaactttgtgaggctgaaagtgtctcttaccttgatgaagttgccactaatccaaataacatgcggctagggcaaaccttggctctagaggttctaaatttgctgaagatttcatttggaagaaaaataaacattacttctgattctcatgacaagggtaagatttaccccatgggatctgtgcttatcagtgcattgcgtcttgttgatgtcttctctgatgattcgaacttcagatcattctttttgaccaacactgttccatttttaatccagattctagctgctcctcacgatgaatttgtttcgagttggtgcgctgtcaacttaccaacaattgaggaagatgcaagtctagattatgatccttttggtgcatctgaggtggcactattagcttctgataatatgttgactgaagctaaagctaactattcttgcccttttcgccctagcgtgccttcaatggcatatgcacagacaagaacatcatgcgtagtgaaaataatagcaaatttgcatgtttttattccaaacatatgtgaagagcaagaaagggatctttttcttcagaactttcaaaagcacttggcgtctgggagtcctaaactatcagcagatctgccagcttctagtgattttaaggccactaaagtctgtagaaacttaggatttttgtctgattatgctaaaacattggttcctaatttgttaaatggggaagacttggtgttattaagtgattttgctgataagctacaatcttggtgtaaatcacaagttgcagtaaagcaaaatctcatttttatcataataacacaactgcagagcgtgcacactaaatagaggttgtacaaaatgatattccaccagaaagcatggatgccatgtgcccggtgcagcagctcttgccaacacggacaagcactccagcctccaaaatgaataaccttccaaaggatgcacagaacatggaagtgtctacaccagtacccccaataaatccggaaggaaatgatgaggacgagactccaaagaacactgtctctagaaatggtggtttcctgcagaatgcagttggccaagacctagtccatcttggcgttgcaagaacaacaagtggtggcccttcggctgtcgcttccggtgttagcactggacaccagcacaacagaatggatcttgatccagcatccagcagcgtggataatttcaaaacaccagaacttacaaaagaaaacggtctcgaggaggatgggaaaggagagagtagtatgtatgatgagaggcaacctaagagaaggaagcggacccttatgaataatgagcaaatagatgaattagagaaggctctagtagatgagcctgagatgcacaaaaatcctgttctattgcagagttggtcagagaagttaagtctgcagggcccagagatcacagcatcacaacttaaaaactggttgaacaaccggaaagctaagcttgctcgcattgcaaaagaaagggcggagaatgctgataaaccatctacttcccatcccggcgagtcttcagaaagtgccggggaggacaactatctaccccctgcaggtgtgatgactgttctatccaaaggtggtagcctgttgagcccggactgcactgagcaaacgtcgcaggcagagctatccccgaacacgacgatgatggtccgtccattcacgagatccttctcgttggaacccggccgcctcgtttcattagtcgacagcgatgggaaggaggttggcaggggcaagatcttccaagcgccagggaagagcacaacggagagccgcgtttgcgtggttgatgtcactgagctcaggaccgagaagtggagggagctcccccacccttcggaggcatttgggtggacgttccaggaggcggaggcgaggaatggtggcatcatcagggtctcttgggacgccgtcaggttgttccctgtagcgtagcaaggccgattgtataacaagatgagtagagggaaactgtggcctaagtaacattatgttaaaagctgtggttaactgtgttgtattcatgaactaattgttttgagcaattcaggtggttactgattttacatttttactactggtgttagtgtcacctgcaatgtgctgtgagaaaccaatgctgagcattcagccatcctttgtatatcaatgggtaagtggccaggatcgtagcatgaacagaaagggcatgtttattgtggtttttatgtgtggagaaagataaatgagttcatagggtttggaatctagaaatccggtttagaatctagaaagtattactaattttgctagtagtgttagtgtcacctgctttgtgcgtcaaaggctatcattgaaaaaaagtgttat

SEQ ID NO: 27851 - DNA, 3250 bp, Zea Mays
ctgccactcctgctcacctccgccgaccgccatatcctcctctacatccaccgccgctgccgtataggtcccgtcccctcgtcgccgcggctgcgctggtggggagcggagcggacggacggagatccgcccgcctcgggctccgctacgccggctgaagtccaagatagaagacggaggtccaaagcaagtacttgtggacatggaaaaagttgtgccctcgcttcctcttcatctccttgctgtatgtttggagcttgggcaaggcccggacttgacctatgtgcttcgtggcatccgttttttgcatagtttgtctgatctagcatcccgccatactagactggagcaggttctccttgatgatgtcaaattatccgaacaagtcatggacctgatattctttctactttctattcttgctgaacagaaggagaataacaatgttggtgcttctccgcttgtgcatgcgtcacttgtagcaggtagtcttcatctgttgacaaattacttctcttcccagtggcatgaacttgtccatattctgcttgcacatccaaaggttgatatctttatggacgtggcctttgatagtttgcatgaagatgtgaggctgttaagtatcagattatcatcaatgggcttcggtttctttcctgttggttctttggaatctcgtcttgctcacttcatctgtcaacagtgtgaagcatcattgcaatttctcttgttgttgtgccagcaaaagctatttcgagatcggattttaaaaaataaggaactctctagaaacggaggcatactgtcactttctcacactatactgaagttagttgtccctgaatgtttgaagcaatcaaccgaccttgttgcttctatttccaggctcaaggcaaagatactttctattctgttgcaactttgtgaggctgaaagtgtctcttaccttgatgaagttgccactaatccaaataacatgcggctagggcaaaccttggctctagaggttctaaatttgctgaagatttcatttggaagaaaaataaacattacttctgattctcatgacaagggtaagatttaccccatgggatctgtgcttatcagtgcattgcgtcttgttgatgtcttctctgatgattcgaacttcagatcattctttttgaccaacactgttccatttttaatccagattctagctgctcctcacgatgaatttgtttcgagttggtgcgctgtcaacttaccaacaattgaggaagatgcaagtctagattatgatccttttggtgcatctgaggtggcactattagcttctgataatatgttgactgaagctaaagctaactattcttgcccttttcgccctagcgtgccttcaatggcatatgcacagacaagaacatcatgcgtagtgaaaataatagcaaatttgcatgtttttattccaaacatatgtgaagagcaagaaagggatctttttcttcagaactttcaaaagcacttggcgtctgggagtcctaaactatcagcagatctgccagcttctagtgattttaaggccactaaagtctgtagaaacttaggatttttgtctgattatgctaaaacattggttcctaatttgttaaatggggaagacttggtgttattaagtgattttgctgataagctacaatcttggtgtaaatcacaagttgcagtaaaggttgtacaaaatgatattccaccagaaagcatggatgccatgtgcccggtgcagcagctcttgccaacacggacaagcactccagcctccaaaatgaataaccttccaaaggatgcacagaacatggaagtgtctacaccagtacccccaataaatccggaaggaaatgatgaggacgagactccaaagaacactgtctctagaaatggtggtttcctgcagaatgcagttggccaagacctagtccatcttggcgttgcaagaacaacaagtggtggcccttcggctgtcgcttccggtgttagcactggacaccagcacaacagaatggatcttgatccagcatccagcagcgtggataatttcaaaacaccagaacttacaaaagaaaacggtctcgaggaggatgggaaaggagagagtagtatgtatgatgagaggcaacctaagagaaggaagcggacccttatgaataatgagcaaatagatgaattagagaaggctctagtagatgagcctgagatgcacaaaaatcctgttctattgcagagttggtcagagaagttaagtctgcagggcccagagatcacagcatcacaacttaaaaactggttgaacaaccggaaagctaagcttgctcgcattgcaaaagaaagggcggagaatgctgataaaccatctacttcccatcccggcgagtcttcagaaagtgccggggaggacaactatctaccccctgcaggtgtgatgactgttctatccaaaggtggtagcctgttgagcccggactgcactgagcaaacgtcgcaggcagagctatccccgaacacgacgatgatggtccgtccattcacgagatccttctcgttggaacccggccgcctcgtttcattagtcgacagcgatgggaaggaggttggcaggggcaagatcttccaagcgccagggaagagcacaacggagagccgcgtttgcgtggttgatgtcactgagctcaggaccgagaagtggagggagctcccccacccttcggaggcatttgggtggacgttccaggaggcggaggcgaggaatggtggcatcatcagggtctcttgggacgccgtcaggttgttccctgtagcgtagcaaggccgattgtataacaagatgagtagagggaaactgtggcctaagtaacattatgttaaaagctgtggttaactgtgttgtattcatgaactaattgttttgagcaattcaggtggttactgattttacatttttactactggtgttagtgtcacctgcaatgtgctgtgagaaaccaatgctgagcattcagccatcctttgtatatcaatgggtaagtggccaggatcgtagcatgaacagaaagggcatgtttattgtggtttttatgtgtggagaaagataaatgagttcatagggtttggaatctagaaatccggtttagaatctagaaagtattactaattttgctagtagtgttagtgtcacctgctttgtgcgtcaaaggctatcattgaaaaaaagtgttat

SEQ ID NO: 27852 - DNA, 3372 bp, Zea Mays
ctgccactcctgctcacctccgccgaccgccatatcctcctctacatccaccgccgctgccgtataggtcccgtcccctcgtcgccgcggctgcgctggtggggagcggagcggacggacggagatccgcccgcctcgggctccgctacgccggctgaagatgatagccatggtgtctgctgttgaagagcttagttggttaacctctaaagaacttggtgagatgctcagggagtcagacaactttgttttgcagtccaagatagaagacggaggtccaaagcaagtacttgtggacatggaaaaagttgtgccctcgcttcctcttcatctccttgctgtatgtttggagcttgggcaaggcccggacttgacctatgtgcttcgtggcatccgttttttgcatagtttgtctgatctagcatcccgccatactagactggagcaggttctccttgatgatgtcaaattatccgaacaagtcatggacctgatattctttctactttctattcttgctgaacagaaggtctcaatgggttaaaccaaaatgtttttattcattgatgtgtggtccactttgaattatcatctgatactaattctggtaacagctgttgtttttaaattaggagaataacaatgttggtgcttctccgcttgtgcatgcgtcacttgtagcaggttgatatctttatggacgtggcctttgatagtttgcatgaagatgtgaggctgttaagtatcagattatcatcaatgggcttcggtttctttcctgttggttctttggaatctcgtcttgctcacttcatctgtcaacagtgtgaagcatcattgcaatttctcttgttgttgtgccagcaaaagctatttcgagatcggattttaaaaaataaggaactctctagaaacggaggcatactgtcactttctcacactatactgaagttagttgtccctgaatgtttgaagcaatcaaccgaccttgttgcttctatttccaggctcaaggcaaagatactttctattctgttgcaactttgtgaggctgaaagtgtctcttaccttgatgaagttgccactaatccaaataacatgcggctagggcaaaccttggctctagaggttctaaatttgctgaagatttcatttggaagaaaaataaacattacttctgattctcatgacaagggtaagatttaccccatgggatctgtgcttatcagtgcattgcgtcttgttgatgtcttctctgatgattcgaacttcagatcattctttttgaccaacactgttccatttttaatccagattctagctgctcctcacgatgaatttgtttcgagttggtgcgctgtcaacttaccaacaattgaggaagatgcaagtctagattatgatccttttggtgcatctgaggtggcactattagcttctgataatatgttgactgaagctaaagctaactattcttgcccttttcgccctagcgtgccttcaatggcatatgcacagacaagaacatcatgcgtagtgaaaataatagcaaatttgcatgtttttattccaaacatatgtgaagagcaagaaagggatctttttcttcagaactttcaaaagcacttggcgtctgggagtcctaaactatcagcagatctgccagcttctagtgattttaaggccactaaagtctgtagaaacttaggatttttgtctgattatgctaaaacattggttcctaatttgttaaatggggaagacttggtgttattaagtgattttgctgataagctacaatcttggtgtaaatcacaagttgcagtaaaggttgtacaaaatgatattccaccagaaagcatggatgccatgtgcccggtgcagcagctcttgccaacacggacaagcactccagcctccaaaatgaataaccttccaaaggatgcacagaacatggaagtgtctacaccagtacccccaataaatccggaaggaaatgatgaggacgagactccaaagaacactgtctctagaaatggtggtttcctgcagaatgcagttggccaagacctagtccatcttggcgttgcaagaacaacaagtggtggcccttcggctgtcgcttccggtgttagcactggacaccagcacaacagaatggatcttgatccagcatccagcagcgtggataatttcaaaacaccagaacttacaaaagaaaacggtctcgaggaggatgggaaaggagagagtagtatgtatgatgagaggcaacctaagagaaggaagcggacccttatgaataatgagcaaatagatgaattagagaaggctctagtagatgagcctgagatgcacaaaaatcctgttctattgcagagttggtcagagaagttaagtctgcagggcccagagatcacagcatcacaacttaaaaactggttgaacaaccggaaagctaagcttgctcgcattgcaaaagaaagggcggagaatgctgataaaccatctacttcccatcccggcgagtcttcagaaagtgccggggaggacaactatctaccccctgcaggtgtgatgactgttctatccaaaggtggtagcctgttgagcccggactgcactgagcaaacgtcgcaggcagagctatccccgaacacgacgatgatggtccgtccattcacgagatccttctcgttggaacccggccgcctcgtttcattagtcgacagcgatgggaaggaggttggcaggggcaagatcttccaagcgccagggaagagcacaacggagagccgcgtttgcgtggttgatgtcactgagctcaggaccgagaagtggagggagctcccccacccttcggaggcatttgggtggacgttccaggaggcggaggcgaggaatggtggcatcatcagggtctcttgggacgccgtcaggttgttccctgtagcgtagcaaggccgattgtataacaagatgagtagagggaaactgtggcctaagtaacattatgttaaaagctgtggttaactgtgttgtattcatgaactaattgttttgagcaattcaggtggttactgattttacatttttactactggtgttagtgtcacctgcaatgtgctgtgagaaaccaatgctgagcattcagccatcctttgtatatcaatgggtaagtggccaggatcgtagcatgaacagaaagggcatgtttattgtggtttttatgtgtggagaaagataaatgagttcatagggtttggaatctagaaatccggtttagaatctagaaagtattactaattttgctagtagtgttagtgtcacctgctttgtgcgtcaaaggctatcattgaaaaaaagtgttat

SEQ ID NO: 27853 - DNA, 3373 bp, Zea Mays
ctgccactcctgctcacctccgccgaccgccatatcctcctctacatccaccgccgctgccgtataggtcccgtcccctcgtcgccgcggctgcgctggtggggagcggagcggacggacggagatccgcccgcctcgggctccgctacgccggctgaagatgatagccatggtgtctgctgttgaagagcttagttggttaacctctaaagaacttggtgagatgctcagggagtcagacaactttgttttgcagtccaagatagaagacggaggtccaaagcaagtacttgtggacatggaaaaagttgtgccctcgcttcctcttcatctccttgctgtatgtttggagcttgggcaaggcccggacttgacctatgtgcttcgtggcatccgttttttgcatagtttgtctgatctagcatcccgccatactagactggagcaggttctccttgatgatgtcaaattatccgaacaagtcatggacctgatattctttctactttctattcttgctgaacagaagcaggtagtcttcatctgttgacaaattacttctcttcccagtggcatgaacttgtccatattctgcttgcacatccaaaggttgatatctttatggacgtggcctttgatagtttgcatgaagatgtgaggctgttaagtatcagattatcatcaatgggcttcggtttctttcctgttggttctttggaatctcgtcttgctcacttcatctgtcaacagtgtgaagcatcattgcaatttctcttgttgttgtgccagcaaaagctatttcgagatcggattttaaaaaataaggaactctctagaaacggaggcatactgtcactttctcacactatactgaagttagttgtccctgaatgtttgaagcaatcaaccgaccttgttgcttctatttccaggctcaaggcaaagatactttctattctgttgcaactttgtgaggctgaaagtgtctcttaccttgatgaagttgccactaatccaaataacatgcggctagggcaaaccttggctctagaggttctaaatttgctgaagatttcatttggaagaaaaataaacattacttctgattctcatgacaagggtaagatttaccccatgggatctgtgcttatcagtgcattgcgtcttgttgatgtcttctctgatgattcgaacttcagatcattctttttgaccaacactgttccatttttaatccagattctagctgctcctcacgatgaatttgtttcgagttggtgcgctgtcaacttaccaacaattgaggaagatgcaagtctagattatgatccttttggtgcatctgaggtggcactattagcttctgataatatgttgactgaagctaaagctaactattcttgcccttttcgccctagcgtgccttcaatggcatatgcacagacaagaacatcatgcgtagtgaaaataatagcaaatttgcatgtttttattccaaacatatgtgaaggtagactatttctacatgttatgagtttaaatttattcacaacacattgttaaaataagttctgttctgacaacagagcaagaaagggatctttttcttcagaactttcaaaagcacttggcgtctgggagtcctaaactatcagcagatctgccagcttctagtgattttaaggccactaaagtctgtagaaacttaggatttttgtctgattatgctaaaacattggttcctaatttgttaaatggggaagacttggtgttattaagtgattttgctgataagctacaatcttggtgtaaatcacaagttgcagtaaaggttgtacaaaatgatattccaccagaaagcatggatgccatgtgcccggtgcagcagctcttgccaacacggacaagcactccagcctccaaaatgaataaccttccaaaggatgcacagaacatggaagtgtctacaccagtacccccaataaatccggaaggaaatgatgaggacgagactccaaagaacactgtctctagaaatggtggtttcctgcagaatgcagttggccaagacctagtccatcttggcgttgcaagaacaacaagtggtggcccttcggctgtcgcttccggtgttagcactggacaccagcacaacagaatggatcttgatccagcatccagcagcgtggataatttcaaaacaccagaacttacaaaagaaaacggtctcgaggaggatgggaaaggagagagtagtatgtatgatgagaggcaacctaagagaaggaagcggacccttatgaataatgagcaaatagatgaattagagaaggctctagtagatgagcctgagatgcacaaaaatcctgttctattgcagagttggtcagagaagttaagtctgcagggcccagagatcacagcatcacaacttaaaaactggttgaacaaccggaaagctaagcttgctcgcattgcaaaagaaagggcggagaatgctgataaaccatctacttcccatcccggcgagtcttcagaaagtgccggggaggacaactatctaccccctgcaggtgtgatgactgttctatccaaaggtggtagcctgttgagcccggactgcactgagcaaacgtcgcaggcagagctatccccgaacacgacgatgatggtccgtccattcacgagatccttctcgttggaacccggccgcctcgtttcattagtcgacagcgatgggaaggaggttggcaggggcaagatcttccaagcgccagggaagagcacaacggagagccgcgtttgcgtggttgatgtcactgagctcaggaccgagaagtggagggagctcccccacccttcggaggcatttgggtggacgttccaggaggcggaggcgaggaatggtggcatcatcagggtctcttgggacgccgtcaggttgttccctgtagcgtagcaaggccgattgtataacaagatgagtagagggaaactgtggcctaagtaacattatgttaaaagctgtggttaactgtgttgtattcatgaactaattgttttgagcaattcaggtggttactgattttacatttttactactggtgttagtgtcacctgcaatgtgctgtgagaaaccaatgctgagcattcagccatcctttgtatatcaatgggtaagtggccaggatcgtagcatgaacagaaagggcatgtttattgtggtttttatgtgtggagaaagataaatgagttcatagggtttggaatctagaaatccggtttagaatctagaaagtattactaattttgctagtagtgttagtgtcacctgctttgtgcgtcaaaggctatcattgaaaaaaagtgttat

SEQ ID NO: 27854 - DNA, 3058 bp, Zea Mays
ctgccactcctgctcacctccgccgaccgccatatcctcctctacatccaccgccgctgccgtataggtcccgtcccctcgtcgccgcggctgcgctggtggggagcggagcggacggacggagatccgcccgcctcgggctccgctacgccggctgaaggttctccttgatgatgtcaaattatccgaacaagtcatggacctgatattctttctactttctattcttgctgaacagaaggagaataacaatgttggtgcttctccgcttgtgcatgcgtcacttgtagcaggtagtcttcatctgttgacaaattacttctcttcccagtggcatgaacttgtccatattctgcttgcacatccaaaggttgatatctttatggacgtggcctttgatagtttgcatgaagatgtgaggctgttaagtatcagattatcatcaatgggcttcggtttctttcctgttggttctttggaatctcgtcttgctcacttcatctgtcaacagtgtgaagcatcattgcaatttctcttgttgttgtgccagcaaaagctatttcgagatcggattttaaaaaataaggaactctctagaaacggaggcatactgtcactttctcacactatactgaagttagttgtccctgaatgtttgaagcaatcaaccgaccttgttgcttctatttccaggctcaaggcaaagatactttctattctgttgcaactttgtgaggctgaaagtgtctcttaccttgatgaagttgccactaatccaaataacatgcggctagggcaaaccttggctctagaggttctaaatttgctgaagatttcatttggaagaaaaataaacattacttctgattctcatgacaagggtaagatttaccccatgggatctgtgcttatcagtgcattgcgtcttgttgatgtcttctctgatgattcgaacttcagatcattctttttgaccaacactgttccatttttaatccagattctagctgctcctcacgatgaatttgtttcgagttggtgcgctgtcaacttaccaacaattgaggaagatgcaagtctagattatgatccttttggtgcatctgaggtggcactattagcttctgataatatgttgactgaagctaaagctaactattcttgcccttttcgccctagcgtgccttcaatggcatatgcacagacaagaacatcatgcgtagtgaaaataatagcaaatttgcatgtttttattccaaacatatgtgaagagcaagaaagggatctttttcttcagaactttcaaaagcacttggcgtctgggagtcctaaactatcagcagatctgccagcttctagtgattttaaggccactaaagtctgtagaaacttaggatttttgtctgattatgctaaaacattggttcctaatttgttaaatggggaagacttggtgttattaagtgattttgctgataagctacaatcttggtgtaaatcacaagttgcagtaaaggttgtacaaaatgatattccaccagaaagcatggatgccatgtgcccggtgcagcagctcttgccaacacggacaagcactccagcctccaaaatgaataaccttccaaaggatgcacagaacatggaagtgtctacaccagtacccccaataaatccggaaggaaatgatgaggacgagactccaaagaacactgtctctagaaatggtggtttcctgcagaatgcagttggccaagacctagtccatcttggcgttgcaagaacaacaagtggtggcccttcggctgtcgcttccggtgttagcactggacaccagcacaacagaatggatcttgatccagcatccagcagcgtggataatttcaaaacaccagaacttacaaaagaaaacggtctcgaggaggatgggaaaggagagagtagtatgtatgatgagaggcaacctaagagaaggaagcggacccttatgaataatgagcaaatagatgaattagagaaggctctagtagatgagcctgagatgcacaaaaatcctgttctattgcagagttggtcagagaagttaagtctgcagggcccagagatcacagcatcacaacttaaaaactggttgaacaaccggaaagctaagcttgctcgcattgcaaaagaaagggcggagaatgctgataaaccatctacttcccatcccggcgagtcttcagaaagtgccggggaggacaactatctaccccctgcaggtgtgatgactgttctatccaaaggtggtagcctgttgagcccggactgcactgagcaaacgtcgcaggcagagctatccccgaacacgacgatgatggtccgtccattcacgagatccttctcgttggaacccggccgcctcgtttcattagtcgacagcgatgggaaggaggttggcaggggcaagatcttccaagcgccagggaagagcacaacggagagccgcgtttgcgtggttgatgtcactgagctcaggaccgagaagtggagggagctcccccacccttcggaggcatttgggtggacgttccaggaggcggaggcgaggaatggtggcatcatcagggtctcttgggacgccgtcaggttgttccctgtagcgtagcaaggccgattgtataacaagatgagtagagggaaactgtggcctaagtaacattatgttaaaagctgtggttaactgtgttgtattcatgaactaattgttttgagcaattcaggtggttactgattttacatttttactactggtgttagtgtcacctgcaatgtgctgtgagaaaccaatgctgagcattcagccatcctttgtatatcaatgggtaagtggccaggatcgtagcatgaacagaaagggcatgtttattgtggtttttatgtgtggagaaagataaatgagttcatagggtttggaatctagaaatccggtttagaatctagaaagtattactaattttgctagtagtgttagtgtcacctgctttgtgcgtcaaaggctatcattgaaaaaaagtgttat

SEQ ID NO: 27855 - DNA, 3364 bp, Zea Mays
ctgccactcctgctcacctccgccgaccgccatatcctcctctacatccaccgccgctgccgtataggtcccgtcccctcgtcgccgcggctgcgctggtggggagcggagcggacggacggagatccgcccgcctcgggctccgctacgccggctgaagatgatagccatggtgtctgctgttgaagagcttagttggttaacctctaaagaacttggtgagatgctcagggagtcagacaactttgttttgcagtccaagatagaagacggaggtccaaagcaagtacttgtggacatggaaaaagttgtgccctcgcttcctcttcatctccttgctgtatgtttggagcttgggcaaggcccggacttgacctatgtgcttcgtggcatccgttttttgcatagtttgtctgatctagcatcccgccatactagactggagcaggttctccttgatgatgtcaaattatccgaacaagtcatggacctgatattctttctactttctattcttgctgaacagaagctgttgtttttaaattaggagaataacaatgttggtgcttctccgcttgtgcatgcgtcacttgtagcaggtagtcttcatctgttgacaaattacttctcttcccagtggcatgaacttgtccatattctgcttgcacatccaaaggttgatatctttatggacgtggcctttgatagtttgcatgaagatgtgaggctgttaagtatcagattatcatcaatgggcttcggtttctttcctgttggttctttggaatctcgtcttgctcacttcatctgtcaacagtgtgaagcatcattgcaatttctcttgttgttgtgccagcaaaagctatttcgagatcggattttaaaaaataaggaactctctagaaacggaggcatactgtcactttctcacactatactgaagttagttgtccctgaatgtttgaagcaatcaaccgaccttgttgcttctatttccaggctcaaggcaaagatactttctattctgttgcaactttgtgaggctgaaagtgtctcttaccttgatgaagttgccactaatccaaataacatgcggctagggcaaaccttggctctagaggttctaaatttgctgaagatttcatttggaagaaaaataaacattacttctgattctcatgacaagggtaagatttaccccatgggatctgtgcttatcagtgcattgcgtcttgttgatgtcttctctgatgattcgaacttcagatcattctttttgaccaacactgttccatttttaatccagattctagctgctcctcacgatgaatttgtttcgagttggtgcgctgtcaacttaccaacaattgaggaagatgcaagtctagattatgatccttttggtgcatctgaggtggcactattagcttctgataatatgttgactgaagctaaagctaactattcttgcccttttcgccctagcgtgccttcaatggcatatgcacagacaagaacatcatgcgtagtgaaaataatagcaaatttgcatgtttttattccaaacatatgtgaagagcaagaaagggatctttttcttcagaactttcaaaagcacttggcgtctgggagtcctaaactatcagcagatctgccagcttctagtgattttaaggccactaaagtctgtagaaacttaggatttttgtctgattatgctaaaacattggttcctaatttgttaaatggggaagacttggtgttattaagtgattttgctgataagctacaatcttggtgtaaatcacaagttgcagtaaaggttgtacaaaatgatattccaccagaaagcatggatgccatgtgcccggtgcagcagctcttgccaacacggacaagcactccagcctccaaaatgaataaccttccaaaggatgcacagaacatggaagtgtctacaccagtacccccaataaatccggaaggaaatgatgaggacgagactccaaagaacactgtctctagaaatggtggtttcctgcagaatgcagttggccaagacctagtccatcttggcgttgcaagaacaacaagtggtggcccttcggctgtcgcttccggtgttagcactggacaccagcacaacagaatggatcttgatccagcatccagcagcgtggataatttcaaaacaccagaacttacaaaagaaaacggtctcgaggaggatgggaaaggagagagtagtatgtatgatgagaggcaacctaagagaaggaagcggacccttatgaataatgagcaaatagatgaattagagaaggctctagtagatgagcctgagatgcacaaaaatcctgttctattgcagagttggtcagagaagttaagtctgcagggcccagagatcacagcatcacaacttaaaaactggttgaacaaccggaaagctaagcttgctcgcattgcaaaagaaagggcggagaatgctgataaaccatctacttcccatcccggcgagtcttcagaaagtgccggggaggacaactatctaccccctgcaggtgtgatgactgttctatccaaaggtggtagcctgttgagcccggactgcactgagcaaacgtcgcaggcagagctatccccgaacacgacgatgatggtccgtccattcacgagatccttctcgttggaacccggccgcctcgtttcattagtcgacagcgatgggaaggaggttggcaggggcaagatcttccaagcgccagggaagagcacaacggagagccgcgtttgcgtggttgatgtcactgagctcaggaccgagaagtggagggagctcccccacccttcggaggcatttgggtggacgttccaggaggcggaggcgaggaatggtggcatcatcagggtctcttgggacgccgtcaggttgttccctgtagcgtagcaaggccgattgtataacaagatgagtagagggaaactgtggcctaagtaacattatgttaaaagctgtggttaactgtgttgtattcatgaactaattgttttgagcaattcaggtggttactgattttacatttttactactggtgttagtgtcacctgcaatgtgctgtgagaaaccaatgctgagcattcagccatcctttgtatatcaatgggtaagtggccaggatcgtagcatgaacagaaagggcatgtttattgtggtttttatgtgtggagaaagataaatgagttcatagggtttggaatctagaaatccggtttagaatctagaaagtattactaattttgctagtagtgttagtgtcacctgctttgtgcgtcaaaggctatcattgaaaaaaagtgttat

SEQ ID NO: 27856 - DNA, 3297 bp, Zea Mays
atcaaaatatacgacagctctgccactcctgctcacctccgccgaccgccatatcctcctctacatccaccgccgctgccgtataggtcccgtcccctcgtcgccgcggctgcgctggtggggagcggagcggacggacggagatccgcccgcctcgggctccgctacgccggctgaagatgatagccatggtgtctgctgttgaagagcttagttggttaacctctaaagaacttggtgagatgctcagggagtcagacaactttgttttgcagtccaagatagaagacggaggtccaaagcaagtacttgtggacatggaaaaagttgtgccctcgcttcctcttcatctccttgctgtatgtttggagcttgggcaaggcccggacttgacctatgtgcttcgtggcatccgttttttgcatagtttgtctgatctagcatcccgccatactagactggagcaggttctccttgatgatgtcaaattatccgaacaagtcatggacctgatattctttctactttctattcttgctgaacagaaggagaataacaatgttggtgcttctccgcttgtgcatgcgtcacttgtagcaggtagtcttcatctgttgacaaattacttctcttcccagtggcatgaacttgtccatattctgcttgcacatccaaaggttgatatctttatggacgtggcctttgatagtttgcatgaagatgtgaggctgttaagtatcagattatcatcaatgggcttcggtttctttcctgttggttctttggaatctcgtcttgctcacttcatctgtcaacagtgtgaagcatcattgcaatttctcttgttgttgtgccagcaaaagctatttcgagatcggattttaaaaaataaggaactctctagaaacggaggcatactgtcactttctcacactatactgaagttagttgtccctgaatgtttgaagcaatcaaccgaccttgttgcttctatttccaggctcaaggcaaagatactttctattctgttgcaactttgtgaggctgaaagtgtctcttaccttgatgaagttgccactaatccaaataacatgcggctagggcaaaccttggctctagaggttctaaatttgctgaagatttcatttggaagaaaaataaacattacttctgattctcatgacaagggtaagatttaccccatgggatctgtgcttatcagtgcattgcgtcttgttgatgtcttctctgatgattcgaacttcagatcattctttttgaccaacactgttccatttttaatccagattctagctgctcctcacgatgaatttgtttcgagttggtgcgctgtcaacttaccaacaattgaggaagatgcaagtctagattatgatccttttggtgcatctgaggtggcactattagcttctgataatatgttgactgaagctaaagctaactattcttgcccttttcgccctagcgtgccttcaatggcatatgcacagacaagaacatcatgcgtagtgaaaataatagcaaatttgcatgtttttattccaaacatatgtgaagagcaagaaagggatctttttcttcagaactttcaaaagcacttggcgtctgggagtcctaaactatcagcagatctgccagcttctagtgattttaaggccactaaagtctgtagaaacttaggatttttgtctgattatgctaaaacattggttcctaatttgttaaatggggaagacttggtgttattaagtgattttgctgataagctacaatcttggtgtaaatcacaagttgcagtaaaggttgtacaaaatgatattccaccagaaagcatggatgccatgtgcccggtgcagcagctcttgccaacacggacaagcactccagcctccaaaatgaataaccttccaaaggatgcacagaacatggaagtgtctacaccagtacccccaataaatccggaaggaaatgatgaggacgagactccaaagaacactgtctctagaaatggtggtttcctgcagaatgcagttggccaagacctagtccatcttggcgttgcaagaacaacaagtggtggcccttcggctgtcgcttccggtgttagcactggacaccagcacaacagaatggatcttgatccagcatccagcagcgtggataatttcaaaacaccagaacttacaaaagaaaacggtctcgaggaggatgggaaaggagagagtagtatgtatgatgagaggcaacctaagagaaggaagcggacccttatgaataatgagcaaatagatgaattagagaaggctctagtagatgagcctgagatgcacaaaaatcctgttctattgcagagttggtcagagaagttaagtctgcagggcccagagatcacagcatcacaacttaaaaactggttgaacaaccggaaagctaagcttgctcgcattgcaaaagaaagggcggagaatgctgataaaccatctacttcccatcccggcgagtcttcagaaagtgccggggaggacaactatctaccccctgcaggcagagctatccccgaacacgacgatgatggtccgtccattcacgagatccttctcgttggaacccggccgcctcgtttcattagtcgacagcgatgggaaggaggttggcaggggcaagatcttccaagcgccagggaagagcacaacggagagccgcgtttgcgtggttgatgtcactgagctcaggaccgagaagtggagggagctcccccacccttcggaggcatttgggtggacgttccaggaggcggaggcgaggaatggtggcatcatcagggtctcttgggacgccgtcaggttgttccctgtagcgtagcaaggccgattgtataacaagatgagtagagggaaactgtggcctaagtaacattatgttaaaagctgtggttaactgtgttgtattcatgaactaattgttttgagcaattcaggtggttactgattttacatttttactactggtgttagtgtcacctgcaatgtgctgtgagaaaccaatgctgagcattcagccatcctttgtatatcaatgggtaagtggccaggatcgtagcatgaacagaaagggcatgtttattgtggtttttatgtgtggagaaagataaatgagttcatagggtttggaatctagaaatccggtttagaatctagaaagtattactaattttgctagtagtgttagtgtcacctgctttgtgcgtcaaaggctatcattgaaaaaaagtgttat

SEQ ID NO: 27857 - DNA, 928 bp, Zea Mays
gaactgtctcagattcacaaggaaaacggcatctgtgctcacgtcgatctgatgcgctttgacgatgggatcgcgatcgtctcgctcgagtcagcctgtgtgatgcgcttcagtcgagcagaagcagcctctgacaccccgaagcaagggggcagtgccagtgaatctactgcagaggtccccgttctgctgaacccgggctcccttgcgctcatgtctggcgatgcaaggtatctgtggatgcatgagatcaaccggaaaccaggcaggcagctgtgggatggcagggagctcgagcagcgcaggaggacctctgttacgttgagaaaactcctgccttatacggactagatcactggtcatgacagtgaacaaactgttctgcagttacaggacagtaacctttttgtggtggaaaattgtaatatgctgttgctaaagacagccatcattggataatcaaaaggcgcagcctaagaggagtattgttgagtgcctcgagctctatattattggcaggaagctgtagcatttaccatgcatcagatccggggaaaggagagaagatcaggggacggcggcctttgtgagtgcaggaggtgtccggcgaccaacacaaaagcactgcgtccgaagagcgccatcggaaacgcctccgtcgtccagcctccaagctcgccgcagagtatcgtaggtactagtcgtagcactgacgaaatcgtgttttgtgcttaactgctattgctgtctggtgacttgaagtgagaatacttgcagttgtgtccagtgggtcatgtttgaagatttattaattacggtattgtttcaggacttgatctccttgttaattttgtagaagttgtctcctattgattatagatgtccttaacaagtgataattttctattaattacggtattccttgtag

SEQ ID NO: 27858 - DNA, 1160 bp, Zea Mays
gtctgtcctgattagttccatgaacactgccccgatttgtatatggtttcctaaagcgatgagattcggcgacctcccttcgtgggcagtcgaactttctgcacttatccgcgaagctatctgcgtcggcgacgccagtgccggtcttggtgcggaggcgacgaacgaggacgaggatgcgtgccctctgccatcagacttgttgtggcgggagccattttttgatcagatgatcgcgaacagatacagaccaggtgagggcatctgtgctcacgtcgatctgatgcgctttgacgatgggatcgcgatcgtctcgctcgagtcagcctgtgtgatgcgcttcagtcgagcagaagcagcctctgacaccccgaagcaagggggcagtgccagtgaatctactgcagaggtccccgttctgctgaacccgggctcccttgcgctcatgtctggcgatgcaaggtatctgtggatgcatgagatcaaccggaaaccaggcaggcagctgtgggatggcagggagctcgagcagcgcaggaggacctctgttacgttgagaaaactcctgccttatacggactagatcactggtcatgacagtgaacaaactgttctgcagttacaggacagtaacctttttgtggtggaaaattgtaatatgctgttgctaaagacagccatcattggataatcaaaaggcgcagcctaagaggagtattgttgagtgcctcgagctctatattattggcaggaagctgtagcatttaccatgcatcagatccggggaaaggagagaagatcaggggacggcggcctttgtgagtgcaggaggtgtccggcgaccaacacaaaagcactgcgtccgaagagcgccatcggaaacgcctccgtcgtccagcctccaagctcgccgcagagtatcgtaggtactagtcgtagcactgacgaaatcgtgttttgtgcttaactgctattgctgtctggtgacttgaagtgagaatacttgcagttgtgtccagtgggtcatgtttgaagatttattaattacggtattgtttcaggacttgatctccttgttaattttgtagaagttgtctcctattgattatagatgtccttaacaagtgataattttctattaattacggtattccttgtag

SEQ ID NO: 27859 - DNA, 2198 bp, Zea Mays
agccggaagtgagccttcttgggcatacacagaaggcgtaacgagttgaatgaatcttgctgtaccgctctgtgctgcgagactggaagagactccacggagacaccacatggccgccgccggcgacggcggtgagtcccactaccgggaggcgctccgcgaggccttcggtgactcgtcgagcagcgattccgacacacccgccggtgtcagccccggagcaggccgcgggcactggaggtgggaggcggtggctggggtcagggggctgtggctctgcgccgccttcctctccgccgacgagcaggcgcgcctcctcaacgccatccagcgaggtgagtcctcggttgccgggacctcctgtagcattcttgttccccttcttgcgaggagaaaaaggggatttcttttagcttcgtgttttgttcggtttggttccaatcataaattttgaaaggacgttatttgttactggtcgatccatctctccttgtgatagttagaatcatcggatctgattaggcagctgcgatgcagttagtaatgttaggaatcggtgaatcgatcgatccccttttcctctgaccatgtactagttctgattataaagttatctagctatatgtaaccatgttaaattgtaatttgcaataagccttttggtctctaactgatactatacttatctctggattagttaaatattacgtctcccagtagagcagtagcaaactaccctaagcacctatgcagaagtaactcagctctagtttgttgttcctcgagaacagaaataacaatggctcgacgctagtcataaatctgatggcttttctttttgtgcagaaggatggtttattaatgcagacaaccaagtaagtttcttcctctcatcttttccttgcctggccaatgttcatcagcgttaggattttagatacgtctgtcctgattagttccatgaacactgccccgatttgtatatggtttcctaaagtaattcaaactgtacagagaatttgttacatccttgtacgtctagtctgtcgtttttatttaataatgtttaaattccacttgctcctcccttcattataggcgatgagattcggcgacctcccttcgtgggcagtcgaactttctgcacttatccgcgaagctatctgcgtcggcgacgccagtgccggtcttggtgcggaggcgacgaacgaggacgaggatgcgtgccctctgccatcagacttgttgtggcgggagccattttttgatcagatgatcgcgaacagatacagaccagggcatctgtgctcacgtcgatctgatgcgctttgacgatgggatcgcgatcgtctcgctcgagtcagcctgtgtgatgcgcttcagtcgagcagaagcagcctctgacaccccgaagcaagggggcagtgccagtgaatctactgcagaggtccccgttctgctgaacccgggctcccttgcgctcatgtctggcgatgcaaggtatctgtggatgcatgagatcaaccggaaaccaggcaggcagctgtgggatggcagggagctcgagcagcgcaggaggacctctgttacgttgagaaaactcctgccttatacggactagatcactggtcatgacagtgaacaaactgttctgcagttacaggacagtaacctttttgtggtggaaaattgtaatatgctgttgctaaagacagccatcattggataatcaaaaggcgcagcctaagaggagtattgttgagtgcctcgagctctatattattggcaggaagctgtagcatttaccatgcatcagatccggggaaaggagagaagatcaggggacggcggcctttgtgagtgcaggaggtgtccggcgaccaacacaaaagcactgcgtccgaagagcgccatcggaaacgcctccgtcgtccagcctccaagctcgccgcagagtatcgtaggtactagtcgtagcactgacgaaatcgtgttttgtgcttaactgctattgctgtctggtgacttgaagtgagaatacttgcagttgtgtccagtgggtcatgtttgaagatttattaattacggtattgtttcaggacttgatctccttgttaattttgtagaagttgtctcctattgattatagatgtccttaacaagtgataattttctattaattacggtattccttgtag

SEQ ID NO: 27860 - DNA, 1975 bp, Zea Mays
agccggaagtgagccttcttgggcatacacagaaggcgtaacgagttgaatgaatcttgctgtaccgctctgtgctgcgagactggaagagactccacggagacaccacatggccgccgccggcgacggcggtgagtcccactaccgggaggcgctccgcgaggccttcggtgactcgtcgagcagcgattccgacacacccgccggtgtcagccccggagcaggccgcgggcactggaggtgggaggcggtggctggggtcagggggctgtggctctgcgccgccttcctctccgccgacgagcaggcgcgcctcctcaacgccatccagcgaggtgagtcctcggttgccgggacctcctgtagcattcttgttccccttcttgcgaggagaaaaaggggatttcttttagcttcgtgttttgttcggtttggttccaatcataaattttgaaaggacgttatttgttactggtcgatccatctctccttgtgatagttagaatcatcggatctgattaggcagctgcgatgcagttagtaatgttaggaatcggtgaatcgatcgatccccttttcctctgaccatgtactagttctgattataaagttatctagctatatgtaaccatgttaaattgtaatttgcaataagccttttggtctctaactgatactatacttatctctggattagttaaatattacgtctcccagtagagcagtagcaaactaccctaagcacctatgcagaagtaactcagctctagtttgttgttcctcgagaacagaaataacaatggctcgacgctagtcataaatctgatggcttttctttttgtgcagaaggatggtttattaatgcagacaaccaagcgatgagattcggcgacctcccttcgtgggcagtcgaactttctgcacttatccgcgaagctatctgcgtcggcgacgccagtgccggtcttggtgcggaggcgacgaacgaggacgaggatgcgtgccctctgccatcagacttgttgtggcgggagccattttttgatcagatgatcgcgaacagatacagaccagggcatctgtgctcacgtcgatctgatgcgctttgacgatgggatcgcgatcgtctcgctcgagtcagcctgtgtgatgcgcttcagtcgagcagaagcagcctctgacaccccgaagcaagggggcagtgccagtgaatctactgcagaggtccccgttctgctgaacccgggctcccttgcgctcatgtctggcgatgcaaggtatctgtggatgcatgagatcaaccggaaaccaggcaggcagctgtgggatggcagggagctcgagcagcgcaggaggacctctgttacgttgagaaaactcctgccttatacggactagatcactggtcatgacagtgaacaaactgttctgcagttacaggacagtaacctttttgtggtggaaaattgtaatatgctgttgctaaagacagccatcattggataatcaaaaggcgcagcctaagaggagtattgttgagtgcctcgagctctatattattggcaggaagctgtagcatttaccatgcatcagatccggggaaaggagagaagatcaggggacggcggcctttgtgagtgcaggaggtgtccggcgaccaacacaaaagcactgcgtccgaagagcgccatcggaaacgcctccgtcgtccagcctccaagctcgccgcagagtatcgtaggtactagtcgtagcactgacgaaatcgtgttttgtgcttaactgctattgctgtctggtgacttgaagtgagaatacttgcagttgtgtccagtgggtcatgtttgaagatttattaattacggtattgtttcaggacttgatctccttgttaattttgtagaagttgtctcctattgattatagatgtccttaacaagtgataattttctattaattacggtattccttgtag

SEQ ID NO: 27861 - DNA, 2026 bp, Zea Mays
agccggaagtgagccttcttgggcatacacagaaggcgtaacgagttgaatgaatcttgctgtaccgctctgtgctgcgagactggaagagactccacggagacaccacatggccgccgccggcgacggcggtgagtcccactaccgggaggcgctccgcgaggccttcggtgactcgtcgagcagcgattccgacacacccgccggtgtcagccccggagcaggccgcgggcactggaggtgggaggcggtggctggggtcagggggctgtggctctgcgccgccttcctctccgccgacgagcaggcgcgcctcctcaacgccatccagcgaggtgagtcctcggttgccgggacctcctgtagcattcttgttccccttcttgcgaggagaaaaaggggatttcttttagcttcgtgttttgttcggtttggttccaatcataaattttgaaaggacgttatttgttactggtcgatccatctctccttgtgatagttagaatcatcggatctgattaggcagctgcgatgcagttagtaatgttaggaatcggtgaatcgatcgatccccttttcctctgaccatgtactagttctgattataaagttatctagctatatgtaaccatgttaaattgtaatttgcaataagccttttggtctctaactgatactatacttatctctggattagttaaatattacgtctcccagtagagcagtagcaaactaccctaagcacctatgcagaagtaactcagctctagtttgttgttcctcgagaacagaaataacaatggctcgacgctagtcataaatctgatggcttttctttttgtgcagaaggatggtttattaatgcagacaaccaagcgatgagattcggcgacctcccttcgtgggcagtcgaactttctgcacttatccgcgaagctatctgcgtcggcgacgccagtgccggtcttggtgcggaggcgacgaacgaggacgaggatgcgtgccctctgccatcagacttgttgtggcgggagccattttttgatcagatgatcgcgaacagatacagaccagggcatctgtgctcacgtcgatctgatgcgctttgacgatgggatcgcgatcgtctcgctcgagtcagcctgtgtgatgcgcttcagtcgagcagaagcagcctctgacaccccgaagcaagggggcagtgccagtgaatctactgcagaggtccccgttctgctgaacccgggctcccttgcgctcatgtctggcgatgcaaggtatctgtggatgcatgagatcaaccggaaaccaggcaggcagctgtgggatggcagggagctcgagcagcgcaggaggacctctgttacgttgagaaaactcctgccttatacggactagatcactggtcatgacagtgaacaaactgttctgcagttacaggacagtaacctttttgtggtggaaaattgtaatatgctgttgctaaagacagccatcattggataatcaaaaggcgcagcctaagaggagtattgttgagtgcctcgagctctatattattggcaggaagctgtagcatttaccatgcatcagggaatcgtccgccaaacgcctgttgcttcctcctcccgcttcgtcggctagatccggggaaaggagagaagatcaggggacggcggcctttgtgagtgcaggaggtgtccggcgaccaacacaaaagcactgcgtccgaagagcgccatcggaaacgcctccgtcgtccagcctccaagctcgccgcagagtatcgtaggtactagtcgtagcactgacgaaatcgtgttttgtgcttaactgctattgctgtctggtgacttgaagtgagaatacttgcagttgtgtccagtgggtcatgtttgaagatttattaattacggtattgtttcaggacttgatctccttgttaattttgtagaagttgtctcctattgattatagatgtccttaacaagtgataattttctattaattacggtattccttgtag

SEQ ID NO: 27862 - DNA, 1491 bp, Zea Mays
agccggaagtgagccttcttgggcatacacagaaggcgtaacgagttgaatgaatcttgctgtaccgctctgtgctgcgagactggaagagactccacggagacaccacatggccgccgccggcgacggcggtgagtcccactaccgggaggcgctccgcgaggccttcggtgactcgtcgagcagcgattccgacacacccgccggtgtcagccccggagcaggccgcgggcactggaggtgggaggcggtggctggggtcagggggctgtggctctgcgccgccttcctctccgccgacgagcaggcgcgcctcctcaacgccatccagcgaggcgatgagattcggcgacctcccttcgtgggcagtcgaactttctgcacttatccgcgaagctatctgcgtcggcgacgccagtgccggtcttggtgcggaggcgacgaacgaggacgaggatgcgtgccctctgccatcagacttgttgtggcgggagccattttttgatcagatgatcgcgaacagatacagaccaggtgagggcatctgtgctcacgtcgatctgatgcgctttgacgatgggatcgcgatcgtctcgctcgagtcagcctgtgtgatgcgcttcagtcgagcagaagcagcctctgacaccccgaagcaagggggcagtgccagtgaatctactgcagaggtccccgttctgctgaacccgggctcccttgcgctcatgtctggcgatgcaaggtatctgtggatgcatgagatcaaccggaaaccaggcaggcagctgtgggatggcagggagctcgagcagcgcaggaggacctctgttacgttgagaaaactcctgccttatacggactagatcactggtcatgacagtgaacaaactgttctgcagttacaggacagtaacctttttgtggtggaaaattgtaatatgctgttgctaaagacagccatcattggataatcaaaaggcgcagcctaagaggagtattgttgagtgcctcgagctctatattattggcaggaagctgtagcatttaccatgcatcagggaatcgtccgccaaacgcctgttgcttcctcctcccgcttcgtcggctagatccggggaaaggagagaagatcaggggacggcggcctttgtgagtgcaggaggtgtccggcgaccaacacaaaagcactgcgtccgaagagcgccatcggaaacgcctccgtcgtccagcctccaagctcgccgcagagtatcgtaggtactagtcgtagcactgacgaaatcgtgttttgtgcttaactgctattgctgtctggtgacttgaagtgagaatacttgcagttgtgtccagtgggtcatgtttgaagatttattaattacggtattgtttcaggacttgatctccttgttaattttgtagaagttgtctcctattgattatagatgtccttaacaagtgataattttctattaattacggtattccttgtag

SEQ ID NO: 27863 - DNA, 1477 bp, Zea Mays
gtttactcagccggaagtgagccttcttgggcatacacagaaggcgtaacgagttgaatgaatcttgctgtaccgctctgtgctgcgagactggaagagactccacggagacaccacatggccgccgccggcgacggcggtgagtcccactaccgggaggcgctccgcgaggccttcggtgactcgtcgagcagcgattccgacacacccgccggtgtcagccccggagcaggccgcgggcactggaggtgggaggcggtggctggggtcagggggctgtggctctgcgccgccttcctctccgccgacgagcaggcgcgcctcctcaacgccatccagcgagaaggatggtttattaatgcagacaaccaagcgatgagattcggcgacctcccttcgtgggcagtcgaactttctgcacttatccgcgaagctatctgcgtcggcgacgccagtgccggtcttggtgcggaggcgacgaacgaggacgaggatgcgtgccctctgccatcagacttgttgtggcgggagccattttttgatcagatgatcgcgaacagatacagaccaggtgagggcatctgtgctcacgtcgatctgatgcgctttgacgatgggatcgcgatcgtctcgctcgagtcagcctgtgtgatgcgcttcagtcgagcagaagcagcctctgacaccccgaagcaagggggcagtgccagtgaatctactgcagaggtccccgttctgctgaacccgggctcccttgcgctcatgtctggcgatgcaaggtatctgtggatgcatgagatcaaccggaaaccaggcaggcagctgtgggatggcagggagctcgagcagcgcaggaggacctctgttacgttgagaaaactcctgccttatacggactagatcactggtcatgacagtgaacaaactgttctgcagttacaggacagtaacctttttgtggtggaaaattgtaatatgctgttgctaaagacagccatcattggataatcaaaaggcgcagcctaagaggagtattgttgagtgcctcgagctctatattattggcaggaagctgtagcatttaccatgcatcagatccggggaaaggagagaagatcaggggacggcggcctttgtgagtgcaggaggtgtccggcgaccaacacaaaagcactgcgtccgaagagcgccatcggaaacgcctccgtcgtccagcctccaagctcgccgcagagtatcgtaggtactagtcgtagcactgacgaaatcgtgttttgtgcttaactgctattgctgtctggtgacttgaagtgagaatacttgcagttgtgtccagtgggtcatgtttgaagatttattaattacggtattgtttcaggacttgatctccttgttaattttgtagaagttgtctcctattgattatagatgtccttaacaagtgataattttctattaattacggtattccttgtag

SEQ ID NO: 27864 - DNA, 790 bp, Zea Mays
gtccatttggcgttcccagttgccctccacgctcagacgctctacctcgctcgaatcctcgatcccaccggtggcggctgagcggctccaagctcctaagcacgacggcgccactgcggactgcgggcggcagggcgagcaccgaggtctttgtcgttcgtcaggcctttcgccggcgacatgcaccaacctgtgatggcccttggacgccggcgagaaggcgcttggacgtgagcgacaccaggcgataccgcgatacagtgtgtctaggtgccttaaggtgaaaagataggagccaagagctagactactagagttcaggcttcgccacgaaaccccaaacttccccggcgtcatcctcgttctgcgatccaagatgcataagctgaggagaggaaaccgcgacaagctgtagcagttcatgaccataagtggcgccagccatggacgggacgagccagtcgaggcggattggagtttgaatcacggccacacaatacactcatcagttacattattactagtgcaagcacctccactagtagattgggattcgatataaattcaagaagaaaatgaaatggaaggaataacagaactttgtagtgaagaacaagtttatgcacttttgggtctctatcctgaccttgagcagtttagatgaatagtgttatctggtaagcgtgcttatttggatgatagataatcctttgcgagttgcctgaacatttatacatcacattcatcctacacgtaattagtccgtattaaatcctgaaagtgaaatgca

SEQ ID NO: 27865 - DNA, 793 bp, Zea Mays
gtccatttggcgttcccagttgccctccacgctcagacgctctacctcgctcgaatcctcgatcccaccggtggcggctgagcggctccaagctcctaagcacgacggcgccactgcggactgcgggcggcagggcgagcaccgaggtctttgtcgttcgtcaggcctttcgccggcgacatgcaccaacctgtgatggcccttggacgccggcgagaaggcgcttggacgtgagcgacaccaggcgataccgcgatacagtgtgtctaggtgccttaaggtgaaaagataggagccaagagctagactactagagttcaggcttcgccacgaaaccccaaacttccccggcgtcatcctcgttctgcgatccaagatgcataagctgaggagaggaaaccgcgacaagctgtagcagttcatgaccataagtggcgccagcagccatggacgggacgagccagtcgaggcggattggagtttgaatcacggccacacaatacactcatcagttacattattactagtgcaagcacctccactagtagattgggattcgatataaattcaagaagaaaatgaaatggaaggaataacagaactttgtagtgaagaacaagtttatgcacttttgggtctctatcctgaccttgagcagtttagatgaatagtgttatctggtaagcgtgcttatttggatgatagataatcctttgcgagttgcctgaacatttatacatcacattcatcctacacgtaattagtccgtattaaatcctgaaagtgaaatgca

SEQ ID NO: 27866 - DNA, 676 bp, Zea Mays
gtccatttggcgttcccagttgccctccacgctcagacgctctacctcgctcgaatcctcgatcccaccggtggcggctgagcggctccaagctcctaagcacgacggcgccactgcggactgcgggcggcagggcgagcaccgaggtctttgtcgttcgtcaggcctttcgccggcgacatgcaccaacctgtgatggcccttggacgccggcgagaaggcgcttggacgtgagcgacaccaggcgataccgcgatacagtgtgcataagctgaggagaggaaaccgcgacaagctgtagcagttcatgaccataagtggcgccagccatggacgggacgagccagtcgaggcggattggagtttgaatcacggccacacaatacactcatcagttacattattactagtgcaagcacctccactagtagattgggattcgatataaattcaagaagaaaatgaaatggaaggaataacagaactttgtagtgaagaacaagtttatgcacttttgggtctctatcctgaccttgagcagtttagatgaatagtgttatctggtaagcgtgcttatttggatgatagataatcctttgcgagttgcctgaacatttatacatcacattcatcctacacgtaattagtccgtattaaatcctgaaagtgaaatgca

SEQ ID NO: 27867 - DNA, 679 bp, Zea Mays
gtccatttggcgttcccagttgccctccacgctcagacgctctacctcgctcgaatcctcgatcccaccggtggcggctgagcggctccaagctcctaagcacgacggcgccactgcggactgcgggcggcagggcgagcaccgaggtctttgtcgttcgtcaggcctttcgccggcgacatgcaccaacctgtgatggcccttggacgccggcgagaaggcgcttggacgtgagcgacaccaggcgataccgcgatacagtgtgcataagctgaggagaggaaaccgcgacaagctgtagcagttcatgaccataagtggcgccagcagccatggacgggacgagccagtcgaggcggattggagtttgaatcacggccacacaatacactcatcagttacattattactagtgcaagcacctccactagtagattgggattcgatataaattcaagaagaaaatgaaatggaaggaataacagaactttgtagtgaagaacaagtttatgcacttttgggtctctatcctgaccttgagcagtttagatgaatagtgttatctggtaagcgtgcttatttggatgatagataatcctttgcgagttgcctgaacatttatacatcacattcatcctacacgtaattagtccgtattaaatcctgaaagtgaaatgca

SEQ ID NO: 27868 - DNA, 1060 bp, Zea Mays
ccatcacagtacacaatcgatggcccattaggtccatttggcgttcccagttgccctccacgctcagacgctctacctcgctcgaatcctcgatcccaccggtggcggctgagcggctccaagctcctaagcacgacggcgccactgcggactgcggtacgcctgttgctgagctcctacgcgcctgtggacgaccggtcgtggctccgcgcgcgtgcgagacggcgtcgcggcgagcggtgcgccggcgccgtggccgtgcgctcgtccgcagcgggcccgtggtgaggcgacgaggcggctccaccggccgcggctaccgagcgccgagcgggcgcgggcggcacccggcagccgacgagcgctggtgctgactgctcactgctgtgctgcagggcggcagggcgagcaccgaggtctttgtcgttcgtcaggcctttcgccggcgacatgcaccaacctgtgatggcccttggacgccggcgagaaggcgcttggacgtgagcgacaccaggcgataccgcgatacagtgtgtctaggtgccttaaggtgaaaagataggagccaagagctagactactagagttcaggcttcgccacgaaaccccaaacttccccggcgtcatcctcgttctgcgatccaagatgcataagctgaggagaggaaaccgcgacaagctgtagcagttcatgaccataagtggcgccagccatggacgggacgagccagtcgaggcggattggagtttgaatcacggccacacaatacactcatcagttacattattactagtgcaagcacctccactagtagattgggattcgatataaattcaagaagaaaatgaaatggaaggaataacagaactttgtagtgaagaacaagtttatgcacttttgggtctctatcctgaccttgagcagtttagatgaatagtgttatctggtaagcgtgcttatttggatgatagataatcctttgcgagttgcctgaacatttatacatcacattcatcctacacgtaattagtccgtattaaatcctgaaagtgaaatgca

SEQ ID NO: 27869 - DNA, 680 bp, Zea Mays
gtccatttggcgttcccagttgccctccacgctcagacgctctacctcgctcgaatcctcgatcccaccggtggcggctgagcggctccaagctcctaagcacgacggcgccactgcggactgcgggcggcagggcgagcaccgaggtctttgtcgttcgtcaggcctttcgccggcgacatgcaccaacctgtgatggcccttggacgccggcgagaaggcgcttggacgtgagcgacaccaggcgataccgcgatacagtgtgcataagctgaggagaggaaaccgcgacaagctgtagcagttcatgaccataagtggcgccagcctggataaccaattgacgccaagacacaatctctcatcctcgatggtgtctctcccggaatgcgagatttaagtctgctgcgaagaagaagacggctctttgcgccatcgtggaccgtctgagccctatgcgtggactgtccggacgtacgcagaggagtagacgctcctgcgccaggtcgcggaccgtctacgtctccgcagaaagcatcgtcaggtgattcgttctagtgtttggcgcctagatccgcgctaacacgtgtgtttacttgtgtgtccgaacttgtctaatttattggaaattcgaatgaagtctcttctctctctctctcaagaggagagatttgtggtcg

SEQ ID NO: 27870 - DNA, 834 bp, Zea Mays
gtccatttggcgttcccagttgccctccacgctcagacgctctacctcgctcgaatcctcgatcccaccggtggcggctgagcggctccaagctcctaagcacgacggcgccactgcggactgcgggcggcagggcgagcaccgaggtctttgtcgttcgtcaggcctttcgccggcgacatgcaccaacctgtgatggcccttggacgccggcgagaaggcgcttggacgtgagcgacaccaggcgataccgcgatacagtgtgcataagctgaggagaggaaaccgcgacaagctgtagcagttcatgaccataagtggcgccaggtatggttgtttatctgctgttgaaattggaacgttgtgggcggtgtggccattggcaaggtagatagtatttctgtagttaatttgttgcttgaaatcttgctgagattgtgcatcatataatagttcaagatgcctaaacttgctactgatccatgcacgatatgcttgtttggtctactatagatatggaatttagtgcttgccataatattgtagttttaaaatctggtagcaattctggggctctgggtagaaatctattttgttgctttctatgcgggtgctacattaattctgtctcattcttgtgtagttctgtatgcatatacttccgtagaaatcctactagcttcggaatgcaagtaaagtaagtagttatctacgatgatttttgtttagccagtataaatcattttctttcgtgcgtttgaacctgaaacctgaccgtcccttacttatgtcggctagctatgaccgtcatagattaattatttacggcggtta

SEQ ID NO: 27871 - DNA, 948 bp, Zea Mays
gtccatttggcgttcccagttgccctccacgctcagacgctctacctcgctcgaatcctcgatcccaccggtggcggctgagcggctccaagctcctaagcacgacggcgccactgcggactgcgggcggcagggcgagcaccgaggtctttgtcgttcgtcaggcctttcgccggcgacatgcaccaacctgtgatggcccttggacgccggcgagaaggcgcttggacgtgagcgacaccaggcgataccgcgatacagtgtgtctaggtgccttaaggtgaaaagataggagccaagagctagactactagagttcaggcttcgccacgaaaccccaaacttccccggcgtcatcctcgttctgcgatccaagatgcataagctgaggagaggaaaccgcgacaagctgtagcagttcatgaccataagtggcgccaggtatggttgtttatctgctgttgaaattggaacgttgtgggcggtgtggccattggcaaggtagatagtatttctgtagttaatttgttgcttgaaatcttgctgagattgtgcatcatataatagttcaagatgcctaaacttgctactgatccatgcacgatatgcttgtttggtctactatagatatggaatttagtgcttgccataatattgtagttttaaaatctggtagcaattctggggctctgggtagaaatctattttgttgctttctatgcgggtgctacattaattctgtctcattcttgtgtagttctgtatgcatatacttccgtagaaatcctactagcttcggaatgcaagtaaagtaagtagttatctacgatgatttttgtttagccagtataaatcattttctttcgtgcgtttgaacctgaaacctgaccgtcccttacttatgtcggctagctatgaccgtcatagattaattatttacggcggtta

SEQ ID NO: 27872 - DNA, 1104 bp, Zea Mays
ccatcacagtacacaatcgatggcccattaggtccatttggcgttcccagttgccctccacgctcagacgctctacctcgctcgaatcctcgatcccaccggtggcggctgagcggctccaagctcctaagcacgacggcgccactgcggactgcggtacgcctgttgctgagctcctacgcgcctgtggacgaccggtcgtggctccgcgcgcgtgcgagacggcgtcgcggcgagcggtgcgccggcgccgtggccgtgcgctcgtccgcagcgggcccgtggtgaggcgacgaggcggctccaccggccgcggctaccgagcgccgagcgggcgcgggcggcacccggcagccgacgagcgctggtgctgactgctcactgctgtgctgcagggcggcagggcgagcaccgaggtctttgtcgttcgtcaggcctttcgccggcgacatgcaccaacctgtgatggcccttggacgccggcgagaaggcgcttggacgtgagcgacaccaggcgataccgcgatacagtgtgcataagctgaggagaggaaaccgcgacaagctgtagcagttcatgaccataagtggcgccaggtatggttgtttatctgctgttgaaattggaacgttgtgggcggtgtggccattggcaaggtagatagtatttctgtagttaatttgttgcttgaaatcttgctgagattgtgcatcatataatagttcaagatgcctaaacttgctactgatccatgcacgatatgcttgtttggtctactatagatatggaatttagtgcttgccataatattgtagttttaaaatctggtagcaattctggggctctgggtagaaatctattttgttgctttctatgcgggtgctacattaattctgtctcattcttgtgtagttctgtatgcatatacttccgtagaaatcctactagcttcggaatgcaagtaaagtaagtagttatctacgatgatttttgtttagccagtataaatcattttctttcgtgcgtttgaacctgaaacctgaccgtcccttacttatgtcggctagctatgaccgtcatagattaattatttacggcggtta

SEQ ID NO: 27873 - DNA, 716 bp, Zea Mays
gtccatttggcgttcccagttgccctccacgctcagacgctctacctcgctcgaatcctcgatcccaccggtggcggctgagcggctccaagctcctaagcacgacggcgccactgcggactgcgggcggcagggcgagcaccgaggtctttgtcgttcgtcaggcctttcgccggcgacatgcaccaacctgtgatggcccttggacgccggcgagaaggcgcttggacgtgagcgacaccaggcgataccgcgatacagtgtggtaaaattatgttattattcgttgttcgttcgtgcttacattatttactagtttgttatatatcatatatagtttctttgtataacactataacccaaaccaattcgagttaccgtggttagaggcatggtctctcttcctagagactagggatgacagtggatacgggtttgagtaaataaccatagataattatccatcaggtacgagtatagtgaaaatttgtatccgtggtacatatatggatatattaaggtatctatgggtgtatttttcgtggatatggatatccatatccgttactcgataggtatctgacaagtaggccatctctcaatttccaaatcccattcaaccaaccggccaaccctaagtcctaaactaagtaactgagtaggccaactgggcctaggcgactggccaatgcaccgagccccctgctactttatta

SEQ ID NO: 27874 - DNA, 1871 bp, Zea Mays
tcaactgtgcatctttctttaaactgtttctgagtcgcaatggaattgaatgcaatgatattgaagaattattcatcaaagaccaatcactgagtaatgaaaatgtggacaagattgttggatacgcagtgagttatcaccttaagcacaataaaattgaaacctccaactcgaaggataataaacttgtactcacaagtgaaagccttaagcatgggctcaacatgctgcaaagcatgcaaagtgataacaagagctcgaaaaaatcactgaaggatgttgtcacagagaatgaatttgagaaaaggcttttggtggatgttataccacctaatgacattggagttacctttgatgatattggagccttggagaatgtaaaggacacattaaaggagctggtgatgctccctttacaaagacctgaattgttctgcaaagggcagctaacaaagccttgcaagggaatattgcttttcggacctcctggcactgggaaaactatgcttgccaaagcagtagcaactgaagcaggtgctaatttcatcaatatatcaatgtcgagcattacgtcgaagtggtttggtgaaggggagaagtatgtaaaggctgttttctcactagcaagtaaaatagcccccagtgttatatttatcgatgaggtcgatagtatgctaggaaggagagaaaatccaggggagcatgaagcgatgcgcaagatgaagaatgaatttatggtaaattgggatggactgcgcactaaagataaggagcgtgtgcttgttcttggtgctacaaatagaccttttgacctggacgaggctgtgattaggaggttcccccgcaggttaatggtaaacttgcctgatgcatcaaatagagagaaaattctgaaagtaattttggcaaaagaagagctgggatcggatgttgatctcgactcacttgccaatatgactgatggttattcaggaagcgacctgaagaatctgtgtgtgaccgcagcgcattaccccattcgagaaatcctagagaaggaaaagaaggagaagagtttggctaaaacagaaggtaggccagagcccgcattgtatggaagcgagcacatccgtcctcttagcatagacgacttcaaatccgcccatgagcaggtttgcgcgagcgtttcatccgactcggcaaacatgaacgagcttctccaatggaacgacctgtacggtgaaggcgggtcgaggaagaggaaagcgctgagctacttcatgtgacggcgagagacataaaaccagaaggatcacaaccgcgccataaagccagaaggtatcgcagttgcgccatattgtacagccgccatagtacttcccccctccctggccctaaatccagccagggttttcctcctccctcctgggtagccgtggccgcctgtagtccctccctcgtgtaattagaaccgtgtaccgagtcgagttcatttacccactgtttgaggttccagagagttgagatttaaattttaagtggcgccattgcccttcctttcttcctcccctcctaagtattaactttgttgcggccattgttgtcgtgactctggccatagatccttttatgtacatgcgaaatgtaaccaagggatatggaataagaacatgttcatcctgttgtagacagcatggtggtacaggaattctttttatttttcatagttgattggtgatgaactggatcggtgccagcataagaattatgataaggtaccttttctgccgctgaattttttggtgtatgtcgatttgtcgagtggatttagtattgagatgaatgatatgacatcacatggatttttatgcgtctcatgttgttaattgtct

SEQ ID NO: 27875 - DNA, 2882 bp, Zea Mays
aataaaccaacgaattttgttatccggtcccgcaggaaacattggtaaaggcacttgcgaaacattttggtgctagacttcttgtcgtggattcacttttgctacctggggcacctttgaaggatgcagagtcccagaaagatgttgggaaggggtgataaatcaggggataagggaactgctgagaagtttgcaatatatcagaagcatcgttcttcgttggcagacactgttcagttcaggaggcccagctgctccaacttccagtgtgaatgctgatattgtgggaacatccactctgcagtctgcatctctaccgaaacaagaatcctcaacagctacatccaagagctatactttcagagaaggtgatagggtgcgttacgttggtccagctcagctatcctcattgtcacaaaggggaccaagttatggttatcgaggcagagtgatgcttgcttttgaagataatggatcctcaaaaattggagtccgatttgacaagcagatccctgatggtaatgatcttggtggtttgtgcgaggaagatcatggcttcttctgctctgctgaatcacttcgcccagacttttctgctggtgaagaagttgagaggctagctatgaccgagttaatagaggtcatttcagaagagaacaaatctggacctctgattgtgttacttaaggatgtagagaaatcattcactggagttaccgagtcactttcatctttgcggagcaaatttgaatcgcttccatctggtgttcttattataggatcccacactcagatggacagccgcaaagaaaaggcgcatcctggaggttttcttttcacaaagtttgccagtagcagccagacactttttgaccttttcccggatagctttggtagcaggtggttgcatgaaagaagcaaagaaagtccaaaggcaatgaaacatctgaataagcttttcccaaacaagatttcgattcagcttccgcaggatgaagctctacttacagattggaagcagcagttggatcgtgatgttgaaacccttaaagccaaatcaaacattggtagcattcgcacgtttctgagtcgcaatggaattgaatgcaatgatattgaagaattattcatcaaagaccaatcactgagtaatgaaaatgtggacaagattgttggatacgcagtgagttatcaccttaagcacaataaaattgaaacctccaactcgaaggataataaacttgtactcacaagtgaaagccttaagcatgggctcaacatgctgcaaagcatgcaaagtgataacaagagctcgaaaaaatcactgaaggatgttgtcacagagaatgaatttgagaaaaggcttttggtggatgttataccacctaatgacattggagttacctttgatgatattggagccttggagaatgtaaaggacacattaaaggagctggtgatgctccctttacaaagacctgaattgttctgcaaagggcagctaacaaagccttgcaagggaatattgcttttcggacctcctggcactgggaaaactatgcttgccaaagcagtagcaactgaagcagtggtttggtgaaggggagaagtatgtaaaggctgttttctcactagcaagtaaaatagcccccagtgttatatttatcgatgaggtcgatagtatgctaggaaggagagaaaatccaggggagcatgaagcgatgcgcaagatgaagaatgaatttatggtaaattgggatggactgcgcactaaagataaggagcgtgtgcttgttcttggtgctacaaatagaccttttgacctggacgaggctgtgattaggaggttcccccgcaggttaatggtaaacttgcctgatgcatcaaatagagagaaaattctgaaagtaattttggcaaaagaagagctgggatcggatgttgatctcgactcacttgccaatatgactgatggttattcaggaagcgacctgaagaatctgtgtgtgaccgcagcgcattaccccattcgagaaatcctagagaaggaaaagaaggagaagagtttggctaaaacagaaggtaggccagagcccgcattgtatggaagcgagcacatccgtcctcttagcatagacgacttcaaatccgcccatgagcaggtttgcgcgagcgtttcatccgactcggcaaacatgaacgagcttctccaatggaacgacctgtacggtgaaggcgggtcgaggaagaggaaagcgctgagctacttcatgtgacggcgagagacataaaaccagaaggatcacaaccgcgccataaagccagaaggtatcgcagttgcgccatattgtacagccgccatagtacttcccccctccctggccctaaatccagccagggttttcctcctccctcctgggtagccgtggccgcctgtagtccctccctcgtgtaattagaaccgtgtaccgagtcgagttcatttacccactgtttgaggttccagagagttgagatttaaattttaagtggcgccattgcccttcctttcttcctcccctcctaagtattaactttgttgcggccattgttgtcgtgactctggccatagatccttttatgtacatgcgaaatgtaaccaagggatatggaataagaacatgttcatcctgttgtagacagcatggtggtacaggaattctttttatttttcatagttgattggtgatgaactggatcggtgccagcataagaattatgataaggtaccttttctgccgctgaattttttggtgtatgtcgatttgtcgagtggatttagtattgagatgaatgatatgacatcacatggatttttatgcgtctcatgttgttaattgtct

SEQ ID NO: 27876 - DNA, 4300 bp, Zea Mays
cccaacccaaaccaaccaagccgaaagaactctcgctcgaggggtggaaaagaagcggaaggagagacgagacgagaggaaaccctcgcctccgccacacgccatggtggagactcgccggagctcggccgctgcgaagcgcccgtccccgtcgccgtcctcttcgtccgtacctcccccgaagcggcccaaggcggagtctccggggtcaccgacggcctccgcgcccgcgagagcggaggaggattccgtggcgggagcggcacccgcgaggagcgacggctcggccgacgacgcggcggcggcggttgcacagaaagatcaaggagcggataagccttcttccgccgcggccgagagttcaaagaggagaaaggagccggagcaacagcaacccgcagcgccatgggcaaagctgctctcgcagtgctcacagactcctcactatcccatcattgccgctcagttttctgttggtcaaagcaaaaactgtaatttgtggctgaaagaccagcctgttagcaaggtgctttgcaagctgcggcgccttgagcatggaggtccatgtgagttagaagttcttggaaagaagggtatggtccaattaaatggaaggtccataagttcaggcacaaaagttccccttacaggaggggatgaagtcatattcaattcatgcggcaagcatgcttatcatcctttgagtgacaaagctcctaaaacggtgccatcatctgctgttagtcttatagaacctccggttgctagcgtaaagcgcatccgtacagataagagaacaggagacacttctgctattgctggtacagagatgttgccatctacatctaatcaggcaaaggatgtagcagcagcacctcccgcgttcgccggagagaacagccaaagagtaatgctgccaatggcatcatctgcgtctgataaatcaaaagggcacactgtgagccctgataaggaatttgagaatggggaaaatgctaatgaggttaattctaacattgaagactctccaatggatgctgctgcagcccccatatctcctgatgctgctgcgaacgatgcatgtcaacaaaatggctttttgcctgatgctcatcttggtgcggaaatcgctcttgaagatcagagggatctcatcagggatcttaacgcttcagccagtgtgcctccgagtagatgtcaagcctttaaggatgggatgaaacaaggaattattaatccaagtgatattgatgttacctttgaggattttccttattatgtcagaatgtgctcttgtcatgtgcattcatacacttggaaaagaaggagttcatcaagcagtttgctgagatttcatcaataaaccaacgaattttgttatccggtcccgcaggttctgagatttatcaggaaacattggtaaaggcacttgcgaaacattttggtgctagacttcttgtcgtggattcacttttgctacctggggcacctttgaaggatgcagagtcccagaaagatgttgggaaggggtgataaatcaggggataagggaactgctgagaagtttgcaatatatcagaagcatcgttcttcgttggcagacactgttcagttcaggaggcccagctgctccaacttccagtgtgaatgctgatattgtgggaacatccactctgcagtctgcatctctaccgaaacaagaatcctcaacagctacatccaagagctatactttcagagaaggtgatagggtgcgttacgttggtccagctcagctatcctcattgtcacaaaggggaccaagttatggttatcgaggcagagtgatgcttgcttttgaagataatggatcctcaaaaattggagtccgatttgacaagcagatccctgatggtaatgatcttggtggtttgtgcgaggaagatcatggcttcttctgctctgctgaatcacttcgcccagacttttctgctggtgaagaagttgagaggctagctatgaccgagttaatagaggtcatttcagaagagaacaaatctggacctctgattgtgttacttaaggatgtagagaaatcattcactggagttaccgagtcactttcatctttgcggagcaaatttgaatcgcttccatctggtgttcttattataggatcccacactcagatggacagccgcaaagaaaaggcgcatcctggaggttttcttttcacaaagtttgccagtagcagccagacactttttgaccttttcccggatagctttggtagcaggtggttgcatgaaagaagcaaagaaagtccaaaggcaatgaaacatctgaataagcttttcccaaacaagatttcgattcagcttccgcaggatgaagctctacttacagattggaagcagcagttggatcgtgatgttgaaacccttaaagccaaatcaaacattggtagcattcgcacgtttctgagtcgcaatggaattgaatgcaatgatattgaagaattattcatcaaagaccaatcactgagtaatgaaaatgtggacaagattgttggatacgcagtgagttatcaccttaagcacaataaaattgaaacctccaactcgaaggataataaacttgtactcacaagtgaaagccttaagcatgggctcaacatgctgcaaagcatgcaaagtgataacaagagctcgaaaaaatcactgaaggatgttgtcacagagaatgaatttgagaaaaggcttttggtggatgttataccacctaatgacattggagttacctttgatgatattggagccttggagaatgtaaaggacacattaaaggagctggtgatgctccctttacaaagacctgaattgttctgcaaagggcagctaacaaagccttgcaagggaatattgcttttcggacctcctggcactgggaaaactatgcttgccaaagcagtagcaactgaagcaggtgctaatttcatcaatatatcaatgtcgagcattacgtcgaagtggtttggtgaaggggagaagtatgtaaaggctgttttctcactagcaagtaaaatagcccccagtgttatatttatcgatgaggtcgatagtatgctaggaaggagagaaaatccaggggagcatgaagcgatgcgcaagatgaagaatgaatttatggtaaattgggatggactgcgcactaaagataaggagcgtgtgcttgttcttggtgctacaaatagaccttttgacctggacgaggctgtgattaggaggttcccccgcaggttaatggtaaacttgcctgatgcatcaaatagagagaaaattctgaaagtaattttggcaaaagaagagctgggatcggatgttgatctcgactcacttgccaatatgactgatggttattcaggaagcgacctgaaaatctgtgtgtgaccgcagcgcattaccccattcgagaaatcctagagaaggaaaagaaggagaagagtttggctaaaacagaaggtaggccagagcccgcattgtatggaagcgagcacatccgtcctcttagcatagacgacttcaaatccgcccatgagcaggtttgcgcgagcgtttcatccgactcggcaaacatgaacgagcttctccaatggaacgacctgtacggtgaaggcgggtcgaggaagaggaaagcgctgagctacttcatgtgacggcgagagacataaaaccagaaggatcacaaccgcgccataaagccagaaggtatcgcagttgcgccatattgtacagccgccatagtacttcccccctccctggccctaaatccagccagggttttcctcctccctcctgggtagccgtggccgcctgtagtccctccctcgtgtaattagaaccgtgtaccgagtcgagttcatttacccactgtttgaggttccagagagttgagatttaaattttaagtggcgccattgcccttcctttcttcctcccctcctaagtattaactttgttgcggccattgttgtcgtgactctggccatagatccttttatgtacatgcgaaatgtaaccaagggatatggaataagaacatgttcatcctgttgtagacagcatggtggtacaggaattctttttatttttcatagttgattggtgatgaactggatcggtgccagcataagaattatgataaggtaccttttctgccgctgaattttttggtgtatgtcgatttgtcgagtggatttagtattgagatgaatgatatgacatcacatggatttttatgcgtctcatgttgttaattgtct

SEQ ID NO: 27877 - DNA, 4266 bp, Zea Mays
cccaccccaacccaaaccaaccaagccgaaagaactctcgctcgaggggtggaaaagaagcggaaggagagacgagacgagaggaaaccctcgcctccgccacacgccatggtggagactcgccggagctcggccgctgcgaagcgcccgtccccgtcgccgtcctcttcgtccgtacctcccccgaagcggcccaaggcggagtctccggggtcaccgacggcctccgcgcccgcgagagcggaggaggattccgtggcgggagcggcacccgcgaggagcgacggctcggccgacgacgcggcggcggcggttgcacagaaagatcaaggagcggataagccttcttccgccgcggccgagagttcaaagaggagaaaggagccggagcaacagcaacccgcagcgccatgggcaaagctgctctcgcagtgctcacagactcctcactatcccatcattgccgctcagttttctgttggtcaaagcaaaaactgtaatttgtggctgaaagaccagcctgttagcaaggtgctttgcaagctgcggcgccttgagcatggaggtccatgtgagttagaagttcttggaaagaagggtatggtccaattaaatggaaggtccataagttcaggcacaaaagttccccttacaggaggggatgaagtcatattcaattcatgcggcaagcatgcttatatttttcagcatcctttgagtgacaaagctcctaaaacggtgccatcatctgctgttagtcttatagaacctccggttgctagcgtaaagcgcatccgtacagataagagaacaggagacacttctgctattgctggtacagagatgttgccatctacatctaatcaggcaaaggatgtagcagcagcacctcccgcgttcgccggagagaacagccaaagagtaatgctgccaatggcatcatctgcgtctgataaatcaaaagggcacactgtgagccctgataaggaatttgagaatggggaaaatgctaatgaggttaattctaacattgaagactctccaatggatgctgctgcagcccccatatctcctgatgctgctgcgaacgatgcatgtcaacaaaatggctttttgcctgatgctcatcttggtgcggaaatcgctcttgaagatcagagggatctcatcagggatcttaacgcttcagccagtgtgcctccgagtagatgtcaagcctttaaggatgggatgaaacaaggaattattaatccaagtgatattgatgttacctttgaggattttccttattatgtcagaatgtgctcttgtcatgtgcattcatacacttggaaaagaaggagttcatcaagcagtttgctgagatttcatcaataaaccaacgaattttgttatccggtcccgcaggttctgagatttatcaggaaacattggtaaaggcacttgcgaaacattttggtgctagacttcttgtcgtggattcacttttgctacctggggcacctttgaaggatgcagagtcccagaaagatgttgggaaggggtgataaatcaggggataagggaactgctgagaagtttgcaatatatcagaagcatcgttcttcgttggcagacactgttcagttcaggaggcccagctgctccaacttccagtgtgaatgctgatattgtgggaacatccactctgcagtctgcatctctaccgaaacaagaatcctcaacagctacatccaagagctatactttcagagaaggtgatagggtgcgttacgttggtccagctcagctatcctcattgtcacaaaggggaccaagttatggttatcgaggcagagtgatgcttgcttttgaagataatggatcctcaaaaattggagtccgatttgacaagcagatccctgatggtaatgatcttggtggtttgtgcgaggaagatcatggcttcttctgctctgctgaatcacttcgcccagacttttctgctggtgaagaagttgagaggctagctatgaccgagttaatagaggtcatttcagaagagaacaaatctggacctctgattgtgttacttaaggatgtagagaaatcattcactggagttaccgagtcactttcatctttgcggagcaaatttgaatcgcttccatctggtgttcttattataggatcccacactcagatggacagccgcaaagaaaaggcgcatcctggaggttttcttttcacaaagtttgccagtagcagccagacactttttgaccttttcccgctttggtagcaggtggttgcatgaaagaagcaaagaaagtccaaaggcaatgaaacatctgaataagcttttcccaaacaagatttcgattcagcttccgcaggatgaagctctacttacagattggaagcagcagttggatcgtgatgttgaaacccttaaagccaaatcaaacattggtagcattcgcacgtttctgagtcgcaatggaattgaatgcaatgatattgaagaattattcatcaaagaccaatcactgagtaatgaaaatgtggacaagattgttggatacgcagtgagttatcaccttaagcacaataaaattgaaacctccaactcgaaggataataaacttgtactcacaagtgaaagccttaagcatgggctcaacatgctgcaaagcatgcaaagtgataacaagagctcgaaaaaatcactgaaggatgttgtcacagagaatgaatttgagaaaaggcttttggtggatgttataccacctaatgacattggagttacctttgatgatattggagccttggagaatgtaaaggacacattaaaggagctggtgatgctccctttacaaagacctgaattgttctgcaaagggcagctaacaaagccttgcaagggaatattgcttttcggacctcctggcactgggaaaactatgcttgccaaagcagtagcaactgaagcagtggtttggtgaaggggagaagtatgtaaaggctgttttctcactagcaagtaaaatagcccccagtgttatatttatcgatgaggtcgatagtatgctaggaaggagagaaaatccaggggagcatgaagcgatgcgcaagatgaagaatgaatttatggtaaattgggatggactgcgcactaaagataaggagcgtgtgcttgttcttggtgctacaaatagaccttttgacctggacgaggctgtgattaggaggttcccccgcaggttaatggtaaacttgcctgatgcatcaaatagagagaaaattctgaaagtaattttggcaaaagaagagctgggatcggatgttgatctcgactcacttgccaatatgactgatggttattcaggaagcgacctgaagaatctgtgtgtgaccgcagcgcattaccccattcgagaaatcctagagaaggaaaagaaggagaagagtttggctaaaacagaaggtaggccagagcccgcattgtatggaagcgagcacatccgtcctcttagcatagacgacttcaaatccgcccatgagcaggtttgcgcgagcgtttcatccgactcggcaaacatgaacgagcttctccaatggaacgacctgtacggtgaaggcgggtcgaggaagaggaaagcgctgagctacttcatgtgacggcgagagacataaaaccagaaggatcacaaccgcgccataaagccagaaggtatcgcagttgcgccatattgtacagccgccatagtacttcccccctccctggccctaaatccagccagggttttcctcctccctcctgggtagccgtggccgcctgtagtccctccctcgtgtaattagaaccgtgtaccgagtcgagttcatttacccactgtttgaggttccagagagttgagatttaaattttaagtggcgccattgcccttcctttcttcctcccctcctaagtattaactttgttgcggccattgttgtcgtgactctggccatagatccttttatgtacatgcgaaatgtaaccaagggatatggaataagaacatgttcatcctgttgtagacagcatggtggtacaggaattctttttatttttcatagttgattggtgatgaactggatcggtgccagcataagaattatgataaggtaccttttctgccgctgaattttttggtgtatgtcgatttgtcgagtggatttagtattgagatgaatgatatgacatcacatggatttttatgcgtctcatgttgttaattgtct

SEQ ID NO: 27878 - DNA, 4305 bp, Zea Mays
cccaccccaacccaaaccaaccaagccgaaagaactctcgctcgaggggtggaaaagaagcggaaggagagacgagacgagaggaaaccctcgcctccgccacacgccatggtggagactcgccggagctcggccgctgcgaagcgcccgtccccgtcgccgtcctcttcgtccgtacctcccccgaagcggcccaaggcggagtctccggggtcaccgacggcctccgcgcccgcgagagcggaggaggattccgtggcgggagcggcacccgcgaggagcgacggctcggccgacgacgcggcggcggcggttgcacagaaagatcaaggagcggataagccttcttccgccgcggccgagagttcaaagaggagaaaggagccggagcaacagcaacccgcagcgccatgggcaaagctgctctcgcagtgctcacagactcctcactatcccatcattgccgctcagttttctgttggtcaaagcaaaaactgtaatttgtggctgaaagaccagcctgttagcaaggtgctttgcaagctgcggcgccttgagcatggaggtccatgtgagttagaagttcttggaaagaagggtatggtccaattaaatggaaggtccataagttcaggcacaaaagttccccttacaggaggggatgaagtcatattcaattcatgcggcaagcatgcttatatttttcagcatcctttgagtgacaaagctcctaaaacggtgccatcatctgctgttagtcttatagaacctccggttgctagcgtaaagcgcatccgtacagataagagaacaggagacacttctgctattgctggtacagagatgttgccatctacatctaatcaggcaaaggatgtagcagcagcacctcccgcgttcgccggagagaacagccaaagagtaatgctgccaatggcatcatctgcgtctgataaatcaaaagggcacactgtgagccctgataaggaatttgagaatggggaaaatgctaatgaggttaattctaacattgaagactctccaatggatgctgctgcagcccccatatctcctgatgctgctgcgaacgatgcatgtcaacaaaatggctttttgcctgatgctcatcttggtgcggaaatcgctcttgaagatcagagggatctcatcagggatcttaacgcttcagccagtgtgcctccgagtagatgtcaagcctttaaggatgggatgaaacaaggaattattaatccaagtgatattgatgttacctttgaggattttccttattatgtcagaatgtgctcttgtcatgtgcattcatacacttggaaaagaaggagttcatcaagcagtttgctgagatttcatcaataaaccaacgaattttgttatccggtcccgcaggttctgagatttatcaggaaacattggtaaaggcacttgcgaaacattttggtgctagacttcttgtcgtggattcacttttgctacctggggcacctttgaaggatgcagagtcccagaaagatgttgggaaggggtgataaatcaggggataagggaactgctgagaagtttgcaatatatcagaagcatcgttcttcgttggcagacactgttcagttcaggaggcccagctgctccaacttccagtgtgaatgctgatattgtgggaacatccactctgcagtctgcatctctaccgaaacaagaatcctcaacagctacatccaagagctatactttcagagaaggtgatagggtgcgttacgttggtccagctcagctatcctcattgtcacaaaggggaccaagttatggttatcgaggcagagtgatgcttgcttttgaagataatggatcctcaaaaattggagtccgatttgacaagcagatccctgatggtaatgatcttggtggtttgtgcgaggaagatcatggcttcttctgctctgctgaatcacttcgcccagacttttctgctggtgaagaagttgagaggctagctatgaccgagttaatagagaagagaacaaatctggacctctgattgtgttacttaaggatgtagagaaatcattcactggagttaccgagtcactttcatctttgcggagcaaatttgaatcgcttccatctggtgttcttattataggatcccacactcagatggacagccgcaaagaaaaggcgcatcctggaggttttcttttcacaaagtttgccagtagcagccagacactttttgaccttttcccggatagctttggtagcaggtggttgcatgaaagaagcaaagaaagtccaaaggcaatgaaacatctgaataagcttttcccaaacaagatttcgattcagcttccgcaggatgaagctctacttacagattggaagcagcagttggatcgtgatgttgaaacccttaaagccaaatcaaacattggtagcattcgcacgtttctgagtcgcaatggaattgaatgcaatgatattgaagaattattcatcaaagaccaatcactgagtaatgaaaatgtggacaagattgttggatacgcagtgagttatcaccttaagcacaataaaattgaaacctccaactcgaaggataataaacttgtactcacaagtgaaagccttaagcatgggctcaacatgctgcaaagcatgcaaagtgataacaagagctcgaaaaaatcactgaaggatgttgtcacagagaatgaatttgagaaaaggcttttggtggatgttataccacctaatgacattggagttacctttgatgatattggagccttggagaatgtaaaggacacattaaaggagctggtgatgctccctttacaaagacctgaattgttctgcaaagggcagctaacaaagccttgcaagggaatattgcttttcggacctcctggcactgggaaaactatgcttgccaaagcagtagcaactgaagcaggtgctaatttcatcaatatatcaatgtcgagcattacgtcgaagtggtttggtgaaggggagaagtatgtaaaggctgttttctcactagcaagtaaaatagcccccagtgttatatttatcgatgaggtcgatagtatgctaggaaggagagaaaatccaggggagcatgaagcgatgcgcaagatgaagaatgaatttatggtaaattgggatggactgcgcactaaagataaggagcgtgtgcttgttcttggtgctacaaatagaccttttgacctggacgaggctgtgattaggaggttcccccgcaggttaatggtaaacttgcctgatgcatcaaatagagagaaaattctgaaagtaattttggcaaaagaagagctgggatcggatgttgatctcgactcacttgccaatatgactgatggttattcaggaagcgacctgaagaatctgtgtgtgaccgcagcgcattaccccattcgagaaatcctagagaaggaaaagaaggagaagagtttggctaaaacagaaggtaggccagagcccgcattgtatggaagcgagcacatccgtcctcttagcatagacgacttcaaatccgcccatgagcaggtttgcgcgagcgtttcatccgactcggcaaacatgaacgagcttctccaatggaacgacctgtacggtgaaggcgggtcgaggaagaggaaagcgctgagctacttcatgtgacggcgagagacataaaaccagaaggatcacaaccgcgccataaagccagaaggtatcgcagttgcgccatattgtacagccgccatagtacttcccccctccctggccctaaatccagccagggttttcctcctccctcctgggtagccgtggccgcctgtagtccctccctcgtgtaattagaaccgtgtaccgagtcgagttcatttacccactgtttgaggttccagagagttgagatttaaattttaagtggcgccattgcccttcctttcttcctcccctcctaagtattaactttgttgcggccattgttgtcgtgactctggccatagatccttttatgtacatgcgaaatgtaaccaagggatatggaataagaacatgttcatcctgttgtagacagcatggtggtacaggaattctttttatttttcatagttgattggtgatgaactggatcggtgccagcataagaattatgataaggtaccttttctgccgctgaattttttggtgtatgtcgatttgtcgagtggatttagtattgagatgaatgatatgacatcacatggatttttatgcgtctcatgttgttaattgtct

SEQ ID NO: 27879 - DNA, 4310 bp, Zea Mays
ccccaccccaacccaaaccaaccaagccgaaagaactctcgctcgaggggtggaaaagaagcggaaggagagacgagacgagaggaaaccctcgcctccgccacacgccatggtggagactcgccggagctcggccgctgcgaagcgcccgtccccgtcgccgtcctcttcgtccgtacctcccccgaagcggcccaaggcggagtctccggggtcaccgacggcctccgcgcccgcgagagcggaggaggattccgtggcgggagcggcacccgcgaggagcgacggctcggccgacgacgcggcggcggcggttgcacagaaagatcaaggagcggataagccttcttccgccgcggccgagagttcaaagaggagaaaggagccggagcaacagcaacccgcagcgccatgggcaaagctgctctcgcagtgctcacagactcctcactatcccatcattgccgctcagttttctgttggtcaaagcaaaaactgtaatttgtggctgaaagaccagcctgttagcaaggtgctttgcaagctgcggcgccttgagcatggaggtccatgtgagttagaagttcttggaaagaagggtatggtccaattaaatggaaggtccataagttcaggcacaaaagttccccttacaggaggggatgaagtcatattcaattcatgcggcaagcatgcttatatttttcagcatcctttgagtgacaaagctcctaaaacggtgccatcatctgctgttagtcttatagaacctccggttgctagcgtaaagcgcatccgtacagataagagaacaggagacacttctgctattgctggtacagagatgttgccatctacatctaatcaggcaaaggatgtagcagcagcacctcccgcgttcgccggagagaacagccaaagagtaatgctgccaatggcatcatctgcgtctgataaatcaaaagggcacactgtgagccctgataaggaatttgagaatggggaaaatgctaatgaggttaattctaacattgaagactctccaatggatgctgctgcagcccccatatctcctgatgctgctgcgaacgatgcatgtcaacaaaatggctttttgcctgatgctcatcttggtgcggaaatcgctcttgaagatcagagggatctcatcagggatcttaacgcttcagccagtgtgcctccgagtagatgtcaagcctttaaggatgggatgaaacaaggaattattaatccaagtgatattgatgttacctttgaggattttccttattatgtcagtgagaacacaaagaatgtgctcttgtcatgtgcattcatacacttggaaaagaaggagttcatcaagcagtttgctgagatttcatcaataaaccaacgaattttgttatccggtcccgcaggttctgagatttatcaggaaacattggtaaaggcacttgcgaaacattttggtgctagacttcttgtcgtggattcacttttgctacctggggcacctttgaaggatgcagagtcccagaaagatgttgggaaggggtgataaatcaggggataagggaactgctgagaagtttgcaatatatcagaagcatcgttcttcgttggcagacactgttcagttcaggaggcccagctgctccaacttccagtgtgaatgctgatattgtgggaacatccactctgcagtctgcatctctaccgaaacaagaatcctcaacagctacatccaagagctatactttcagagaaggtgatagggtgcgttacgttggtccagctcagctatcctcattgtcacaaaggggaccaagttatggttatcgaggcagagtgatgcttgcttttgaagataatggatcctcaaaaattggagtccgatttgacaagcagatccctgatggtaatgatcttggtggtttgtgcgaggaagatcatggcttcttctgctctgctgaatcacttcgcccagacttttctgctggtgaagaagttgagaggctagctatgaccgagttaatagaggtcatttcagaagagaacaaatctggacctctgattgtgttacttaaggatgtagagaaatcattcactggagttaccgagtcactttcatctttgcggagcaaatttgaatcgcttccatctggtgttcttattataggatcccacactcagatggacagccgcaaagaaaaggcgcatcctggaggttttcttttcacaaagtttgccagtagcagccagacactttttgaccttttcccggatagctttggtagcaggtggttgcatgaaagaagcaaagaaagtccaaaggcaatgaaacatctgaataagcttttcccaaacaagatttcgattcagcttccgcagattggaagcagcagttggatcgtgatgttgaaacccttaaagccaaatcaaacattggtagcattcgcacgtttctgagtcgcaatggaattgaatgcaatgatattgaagaattattcatcaaagaccaatcactgagtaatgaaaatgtggacaagattgttggatacgcagtgagttatcaccttaagcacaataaaattgaaacctccaactcgaaggataataaacttgtactcacaagtgaaagccttaagcatgggctcaacatgctgcaaagcatgcaaagtgataacaagagctcgaaaaaatcactgaaggatgttgtcacagagaatgaatttgagaaaaggcttttggtggatgttataccacctaatgacattggagttacctttgatgatattggagccttggagaatgtaaaggacacattaaaggagctggtgatgctccctttacaaagacctgaattgttctgcaaagggcagctaacaaagccttgcaagggaatattgcttttcggacctcctggcactgggaaaactatgcttgccaaagcagtagcaactgaagcaggtgctaatttcatcaatatatcaatgtcgagcattacgtcgaagtggtttggtgaaggggagaagtatgtaaaggctgttttctcactagcaagtaaaatagcccccagtgttatatttatcgatgaggtcgatagtatgctaggaaggagagaaaatccaggggagcatgaagcgatgcgcaagatgaagaatgaatttatggtaaattgggatggactgcgcactaaagataaggagcgtgtgcttgttcttggtgctacaaatagaccttttgacctggacgaggctgtgattaggaggttcccccgcaggttaatggtaaacttgcctgatgcatcaaatagagagaaaattctgaaagtaattttggcaaaagaagagctgggatcggatgttgatctcgactcacttgccaatatgactgatggttattcaggaagcgacctgaagaatctgtgtgtgaccgcagcgcattaccccattcgagaaatcctagagaaggaaaagaaggagaagagtttggctaaaacagaaggtaggccagagcccgcattgtatggaagcgagcacatccgtcctcttagcatagacgacttcaaatccgcccatgagcaggtttgcgcgagcgtttcatccgactcggcaaacatgaacgagcttctccaatggaacgacctgtacggtgaaggcgggtcgaggaagaggaaagcgctgagctacttcatgtgacggcgagagacataaaaccagaaggatcacaaccgcgccataaagccagaaggtatcgcagttgcgccatattgtacagccgccatagtacttcccccctccctggccctaaatccagccagggttttcctcctccctcctgggtagccgtggccgcctgtagtccctccctcgtgtaattagaaccgtgtaccgagtcgagttcatttacccactgtttgaggttccagagagttgagatttaaattttaagtggcgccattgcccttcctttcttcctcccctcctaagtattaactttgttgcggccattgttgtcgtgactctggccatagatccttttatgtacatgcgaaatgtaaccaagggatatggaataagaacatgttcatcctgttgtagacagcatggtggtacaggaattctttttatttttcatagttgattggtgatgaactggatcggtgccagcataagaattatgataaggtaccttttctgccgctgaattttttggtgtatgtcgatttgtcgagtggatttagtattgagatgaatgatatgacatcacatggatttttatgcgtctcatgttgttaattgtct

SEQ ID NO: 27880 - DNA, 4323 bp, Zea Mays
ccccaccccaacccaaaccaaccaagccgaaagaactctcgctcgaggggtggaaaagaagcggaaggagagacgagacgagaggaaaccctcgcctccgccacacgccatggtggagactcgccggagctcggccgctgcgaagcgcccgtccccgtcgccgtcctcttcgtccgtacctcccccgaagcggcccaaggcggagtctccggggtcaccgacggcctccgcgcccgcgagagcggaggaggattccgtggcgggagcggcacccgcgaggagcgacggctcggccgacgacgcggcggcggcggttgcacagaaagatcaaggagcggataagccttcttccgccgcggccgagagttcaaagaggagaaaggagccggagcaacagcaacccgcagcgccatgggcaaagctgctctcgcagtgctcacagactcctcactatcccatcattgccgctcagttttctgttggtcaaagcaaaaactgtaatttgtggctgaaagaccagcctgttagcaaggtgctttgcaagctgcggcgccttgagcatggaggtccatgtgagttagaagttcttggaaagaagggtatggtccaattaaatggaaggtccataagttcaggcacaaaagttccccttacaggaggggatgaagtcatattcaattcatgcggcaagcatgcttatatttttcagcatcctttgagtgacaaagctcctaaaacggtgccatcatctgctgttagtcttatagaacctccggttgctagcgtaaagcgcatccgtacagataagagaacaggagacacttctgctattgctggtacagagatgttgccatctacatctaatcaggcaaaggatgtagcagcagcacctcccgcgttcgccggagagaacagccaaagagtaatgctgccaatggcatcatctgcgtctgataaatcaaaagggcacactgtgagccctgataaggaatttgagaatggggaaaatgctaatgaggttaattctaacattgaagactctccaatggatgctgctgcagcccccatatctcctgatgctgctgcgaacgatgcatgtcaacaaaatggctttttgcctgatgctcatcttggtgcggaaatcgctcttgaagatcagagggatctcatcagggatcttaacgcttcagccagtgtgcctccgagtagatgtcaagcctttaaggatgggatgaaacaaggaattattaatccaagtgatattgatgttacctttgaggattttccttattatgtcagtgagaacacaaagaatgtgctcttgtcatgtgcattcatacacttggaaaagaaggagttcatcaagcagtttgctgagatttcatcaataaaccaacgaattttgttatccggtcccgcaggttctgagatttatcaggaaacattggtaaaggcacttgcgaaacattttggtgctagacttcttgtcgtggattcacttttgctacctggggcacctttgaaggatgcagagtcccagaaagatgttgggaaggggtgataaatcaggggataagggaactgctgagaagtttgcaatatatcagaagcatcgttcttcgttggcagacactgttcagttcaggaggcccagctgctccaacttccagtgtgaatgctgatattgtgggaacatccactctgcagtctgcatctctaccgaaacaagaatcctcaacagctacatccaagagctatactttcagagaaggtgatagggtgcgttacgttggtccagctcagctatcctcattgtcacaaaggggaccaagttatggttatcgaggcagagtgatgcttgcttttgaagataatggatcctcaaaaattggagtccgatttgacaagcagatccctgatggtaatgatcttggtggtttgtgcgaggaagatcatggcttcttctgctctgctgaatcacttcgcccagacttttctgctggtgaagaagttgagaggctagctatgaccgagttaatagaggtcatttcagaagagaacaaatctggacctctgattgtgttacttaaggatgtagagaaatcattcactggagttaccgagtcactttcatctttgcggagcaaatttgaatcgcttccatctggtgttcttattataggatcccacactcagatggacagccgcaaagaaaaggcgcatcctggaggttttcttttcacaaagtttgccagtagcagccagacactttttgaccttttcccggatagctttggtagcaggtggttgcatgaaagaagcaaagaaagtccaaaggcaatgaaacatctgaataagcttttcccaaacaagatttcgattcagcttccgcaggatgaagctctacttacagattggaagcagcagttggatcgtgatgttgaaacccttaaagccaaatcaaacattggtagcattcgcacgtttctgagtcgcaatggaattgaatgcaatgatattgaagaattattcatcaaagaccaatcactgagtaatgaaaatgtggacaagattgttggatacgcagtgagttatcaccttaagcacaataaaattgaaacctccaactcgaaggataataaacttgtactcacaagtgaaagccttaagcatgggctcaacatgctgcaaagcatgcaaagtgataacaagagctcgaaaaaatcactgaaggatgttgtcacagagaatgaatttgagaaaaggcttttggtggatgttataccacctaatgacattggagttacctttgatgatattggagccttggagaatgtaaaggacacattaaaggagctggtgatgctccctttacaaagacctgaattgttctgcaaagggcagctaacaaagccttgcaagggaatattgcttttcggacctcctggcactgggaaaactatgcttgccaaagcagtagcaactgaagcaggtgctaatttcatcaatatatcaatgtcgagcattacgtcgaagtggtttggtgaaggggagaagtatgtaaaggctgttttctcactagcaagtaaaatagcccccagtgttatatttatcgatgaggtcgatagtatgctaggaaggagagaaaatccaggggagcatgaagcgatgcgcaagatgaagaatgaatttatggtaaattgggatggactgcgcactaaagataaggagcgtgtgcttgttcttggtgctacaaatagaccttttgacctggacgaggctgtgattaggaggttcccccgcaggttaatggtaaacttgcctgatgcatcaaatagagagaaaattctgaaagtaattttggcaaaagaagagctgggatcggatgttgatctcgactcacttgccaatatgactgatggttattcaggaagcgacctgaagaatctgtgtgtgaccgcagcgcattaccccattcgagaaatcctagagaaggaaaagaagagtttggctaaaacagaaggtaggccagagcccgcattgtatggaagcgagcacatccgtcctcttagcatagacgacttcaaatccgcccatgagcaggtttgcgcgagcgtttcatccgactcggcaaacatgaacgagcttctccaatggaacgacctgtacggtgaaggcgggtcgaggaagaggaaagcgctgagctacttcatgtgacggcgagagacataaaaccagaaggatcacaaccgcgccataaagccagaaggtatcgcagttgcgccatattgtacagccgccatagtacttcccccctccctggccctaaatccagccagggttttcctcctccctcctgggtagccgtggccgcctgtagtccctccctcgtgtaattagaaccgtgtaccgagtcgagttcatttacccactgtttgaggttccagagagttgagatttaaattttaagtggcgccattgcccttcctttcttcctcccctcctaagtattaactttgttgcggccattgttgtcgtgactctggccatagatccttttatgtacatgcgaaatgtaaccaagggatatggaataagaacatgttcatcctgttgtagacagcatggtggtacaggaattctttttatttttcatagttgattggtgatgaactggatcggtgccagcataagaattatgataaggtaccttttctgccgctgaattttttggtgtatgtcgatttgtcgagtggatttagtattgagatgaatgatatgacatcacatggatttttatgcgtctcatgttgttaattgtct

SEQ ID NO: 27881 - DNA, 1264 bp, Zea Mays
cccaaaccaaccaagccgaaagaactctcgctcgaggggtggaaaagaagcggaaggagagacgagacgagaggaaaccctcgcctccgccacacgccatggtggagactcgccggagctcggccgctgcgaagcgcccgtccccgtcgccgtcctcttcgtccgtacctcccccgaagcggcccaaggcggagtctccggggtcaccgacggcctccgcgcccgcgagagcggaggaggattccgtggcgggagcggcacccgcgaggagcgacggctcggccgacgacgcggcggcggcggttgcacagaaagatcaaggagcggataagccttcttccgccgcggccgagagttcaaagaggagaaaggagccggagcaacagcaacccgcagcgccatgggcaaagctgctctcgcagtgctcacagttttctgttggtcaaagcaaaaactgtaatttgtggctgaaagaccagcctgttagcaaggtgctttgcaagctgcggcgccttgagcatggaggtccatgtgagttagaagttcttggaaagaagggtatggtccaattaaatggaaggtccataagttcaggcacaaaagttccccttacaggaggggatgaagtcatattcaattcatgcggcaagcatgcttatatttttcagcatcctttgagtgacaaagctcctaaaacggtgccatcatctgctgttagtcttatagaacctccggttgctagcgtaaagcgcatccgtacagataagagaacaggagacacttctgctattgctggtacagagatgttgccatctacatctaatcaggcaaaggatgtagcagcagcacctcccgcgttcgccggagagaacagccaaagagtaatgctgccaatggcatcatctgcgtctgataaatcaaaagggcacactgtgagccctgataaggaatttgagaatggggaaaatgctaatgaggttaattctaacattgaagactctccaatggatgctgctgcagcccccatatctcctgatgctgctgcgaacgatgcatgtcaacaaaatggctttttgcctgatgctcatcttggtgcggaaatcgatcagagggatctcatcagggatcttaacgcttcagccagtgtgcctccgagtagatgtcaagcctttaaggatgggatgaaacaaggaattattaatccaagtgatattgatgttacctttgaggattttccttattatgtcagtgagaacacaaagaa

SEQ ID NO: 27882 - DNA, 1780 bp, Zea Mays
gatctccccatccctcctgactaattccaagcggctcattggtagaagatttagcgatgcttctgtacagagtgacattaagcactggcccttcaaggtcattcctggacctgatgacaagcctatgatagttgttcaatacaggggtgtggagcagcagtttgcagctgaagaaatctcctcgatggtcctcgtcaaaatgcgggagattgctgaagcctatcttggcaccacagtcaaggatgctgttgtcactgttcctgcctgctctaccgacttgcagagacaggccacatggaatgcaggagtgcttgcaaatcttaatgttatacgcatcatccctgagcccactgctgctgccttggcttatggtcttaataggaaggctgcccagattatgggtgaatatgacgttctcgtgtttgatcttggaggtggtacctttgatgtctctgttctcgcaattgaacagggtatctttgaggtcagggccacagctggtgctgctcaccttggaggtgaggacttcgacaacaggatggtaaaccactttgtcgaggaattcaagagaaagaagaagaaggacattagcggcaaccctagggctctcaggaggctaaggacagcctgcgagagagcgaagaggaccctctcctcctatttagaggcgagcattgagattgattgcttgtatgaggacatcgacttctactcagccatcacccgtgccaggtttgaggagctcaacatggatctcttcagaaagtgtatggcgattgtggaggactgcctcagtgatgcgagttatgtacgttcaattcatgatgtcgtccttgttggtggttcctctagaattccaaagatccagcagcttcttcaggagctctttgatgggaaggagctttgcaacagcatcaaccccgatgaagctgttgcctacggagctactatgcaggctgctatcttgagccgagagggtggctatgagatccagaattatctcctgttggatgctacccctctttctcttggtttggagacggatgggggcctcatgaccttcttcagcttgttcgctgcggcttgctgcggctgcaatccggctgcggctgcggcttctacagtatttttctctctatggattgcagctgcagcagtccaaacagctgcaacagtgtcggcttgcagccaaccgaacacgccccttgatgattccaaggaataccaccattccaaccaaaaaggagagggtcttatcgactgactccgacaaccagccttgtatccgaatccgagtgtacgagggtgaggggtctattactcgtgacaaccacctgttgggtgagtttgagttttcccttcttcccgcacctagcggcgttcctcagatcactgtttgcttcgatgtcgacattaacggtatcctgaatgtctccgctgaggacaaaaccactggccagaagatgaaaaaagtcatcacaaagaggtttcgtttaaagcgttaattatctgatcaataactacacgaactagacagttttatgtcctttcataggattgatcgtctccaaggtcaaggcatatagtactggtgtttgtttagacagccgatgtcttattttacttgccaagcttggtggttgccttgtaaattgagcattttatttggaggttgtaaactgtttaatacatctatgtgtctatgatcaaagcataagtgtgtacgtcattggtgtctttataccatacatgtgaagtaaaaatatcattgcagttacag

SEQ ID NO: 27883 - DNA, 3473 bp, Zea Mays
atccaaaccatgcttagtacatgtttcgatagaatgaatgaatgcccgtccgattaattagaatacactcgttctccccaagaaggggatccactgccctagccttgtgcagcgcggcatggcatcatgcggcggcggtgtctgtctcaagagagatcgacgagaggaggaggagaacgacgacgacaagggcgagacgagcggccgcaacaagagaccaagctccggcgcttattacacgggcgcgggagtcgatgctcagagaacggatgacgacgacagcgccgccgccgattacatgtacgagtacgacgacggctacgaggaagaagaatccgctgctgagcaacccaagggcgacgacgcctcggcgcgcgacacggagcagaggtacgccgtgctgaccgaggacgacgtccgcgcgcggcaagaggcggacacggccagggtcgcggaggtgctgtcgatcccggcgggcttcgcgcgcgcgctgctgcgccacttcaagtggcgcgtcgggcgggcgcaggaggagtggttctcggacgcccagcaccagcagcgcgtccgcggcgccgtcggcctagtccccgcggcttgtccggacggcgacgccctggtccccgccgcgcgcagcccgcggccgcgggtgtgcggcatctgcttcgacgcgtttcccgcgggcgggacgcggtcggccgggtgcgccgcccactactactgcgacggctgctggtgcggctacgtcgcggcggcggtaggcgacggcgcgcgctgcctggcgctgcggtgccccgacccgtcgtgcgcggcggccgtcgtccgggagctggtcgacgaggtggcgcgcgacgacgaccgggcccggtacgcgcggttctggctccgctcctacgtggaggagagcgggggccggatcaggtggtgcggcggcgccggctgcacccggtccgtggagctcctcggcggctgcgacgcggaggccgtggcctccgcggtcgacgtcgtctgcgggtgcaggcacgccttctgctggcgctgcggcgaggaggcgcaccggcccgtgtcgtgcggcacggtgcgcgcgtggctggccaagaacgcgtccgactcggagacggccaactgggtggtggccaacaccaagcgctgccccatgtgccgccgccccatcgagaagaaccacggctgcaaccacatgacgtgcggcgcgccctgccaccaccagttctgctggctctgcctcgacccctgggaccaccacaggggctgcacgcgctacgactcccgccgccgccgccgccatgggccggtcgacgaggtggaggacgaggaggagcaggcgcagcggaccctggccaaggcgtcgctggacaggtacctgtaccactacgagcggtgggagggcaacggcaagtcgctgcgcaaggcgctcgcggacgcggacgagctggagcggtcggagctccagcggatggccaggctgctcgacctcccggcgatggacctcggcttcgtgaccgaggcctaccgccagatcgccgacggccgccgcgtgctgcggtgggcgcacgcctacgactacttcctgtccctggacccggagcgcgacgcggccaagcgcggcctgttcgacgacctgcagagccaggccaaccgctggctcgagtgcctgcacggctgcgccgagctggagaggaagcacctcttcggcgctgccgacgccgacgccgaggacgagcccaccgtcgccgccgccgcgttcatggcgtacaaggagaggctcgccaacctcaccggagtcacgcgcaggttcatcgggaacctcgtcagagcgttcaagaccaacctgccggaagtggtggtgacgctgacgccgccggcatccgacttgcaacacatagtgaagagtggaccaacgacggagagacaaacaacggttggcattggaggcatcctttctacagaagcaactgtgacactacctgtttccaacgtgtcttctttacaagggacatcagcactgcgaccttcatcgtcgtctctagtagtctcacaggaaacggacattgcaaatgatagcgtgcaagaacgacacagccctacaagaaaccttgcccaggcccagcatccagttcgtcctggcggtcatggcggcttcctcagcaatccatacccgagtttctttggagaggctacctcaaccgcgggaccattgcaactctacatgccaaacatggtggtgtcagatatggctgctgcgtcgtcctctcagcctgaccgcatgggcatggatcaacaagcaggaaccggttctgccatgaatctgacaattgggctgcatcccaatgcccagcagccaccaccaaaatatgtcaaaatctgggagggtgacttatacgggcaaaggcaagggcagcctgtgtttattagtaaactcgaaagttggggtggaacagtgtccagaaaagttgcagaggattggccagaaactatgcagattgttcgcctcatagcccaggagcatatgaacaagaatcaatacgttggaaacacagactttctaatatttcgggctttaaatcagcatgggtttcttggacaactacaagagaggaaactgtgtggtgtgatacagttaccgtcgcaaactctactactttcaatgtatgacaaaacaagccgtatggttggcatgctcttccctaagaacatgctgatgttcaggccagaggccttaactcagccatcaccagtgcagcaggaagaacttatacaccaccaacaacaacaactacagcagcaacagagaaacatacatcgtcttcaacgacaactcatacagaagcagcagcagcaacatatgcagaagctactaccacaacgacttcaataccaagagcagctacatttacagcaacagatgacgcaacaaatacaacagcaacaacaatctctataccagcaacatcaacaaatgcagcatcaacagcaactgtggcaacaaatacaacaacagaagcatcagttgcaacacatggatccccaacaacaacagctgttgtctcagatggtgggtacagaattaggcagtgatgatgacacaagggaagattgggtcacaggggctgggccgcatgcctagggaatcagggagggttaatgagggcttacactcactcacttgagggttaagatgtttcctagtgtttgtcgttaaatcattaactgataacttcaaaaaaataaaccagtcatttgtatagttatacggatggggtaagagtttaaataacaccgttatgttatcgaatagctagtatattgtattgagctgggagctagatttttgcaaactccccatgtttcttcaccaaaatctttaatcatcgatcaaagatcggtaatccagtgatgcactggctcaggacacgcttaacgcacaccaccttcttggaagctgcagcctgcag

SEQ ID NO: 27884 - DNA, 3609 bp, Zea Mays
cccgaatatatccaaaccatgcttagtacatgtttcgatagaatgaatgaatgcccgtccgattaattagaatacactcgttctccccaagaaggggatccactgccctagccttgtgcagcgcggcatggcatcatgcggcggcggtgtctgtctcaagagagatcgacgagaggaggaggagaacgacgacgacaagggcgagacgagcggccgcaacaagagaccaagctccggcgcttattacacgggcgcgggagtcgatgctcagagaacggatgacgacgacagcgccgccgccgattacatgtacgagtacgacgacggctacgaggaagaagaatccgctgctgagcaacccaagggcgacgacgcctcggcgcgcgacacggagcagaggtacgccgtgctgaccgaggacgacgtccgcgcgcggcaagaggcggacacggccagggtcgcggaggtgctgtcgatcccggcgggcttcgcgcgcgcgctgctgcgccacttcaagtggcgcgtcgggcgggcgcaggaggagtggttctcggacgcccagcaccagcagcgcgtccgcggcgccgtcggcctagtccccgcggcttgtccggacggcgacgccctggtccccgccgcgcgcagcccgcggccgcgggtgtgcggcatctgcttcgacgcgtttcccgcgggcgggacgcggtcggccgggtgcgccgcccactactactgcgacggctgctggtgcggctacgtcgcggcggcggtaggcgacggcgcgcgctgcctggcgctgcggtgccccgacccgtcgtgcgcggcggccgtcgtccgggagctggtcgacgaggtggcgcgcgacgacgaccgggcccggtacgcgcggttctggctccgctcctacgtggaggagagcgggggccggatcaggtggtgcggcggcgccggctgcacccggtccgtggagctcctcggcggctgcgacgcggaggccgtggcctccgcggtcgacgtcgtctgcgggtgcaggcacgccttctgctggcgctgcggcgaggaggcgcaccggcccgtgtcgtgcggcacggtgcgcgcgtggctggccaagaacgcgtccgactcggagacggccaactgggtggtggccaacaccaagcgctgccccatgtgccgccgccccatcgagaagaaccacggctgcaaccacatgacgtgcggcgcgccctgccaccaccagttctgctggctctgcctcgacccctgggaccaccacaggggctgcacgcgctacgactcccgccgccgccgccgccatgggccggtcgacgaggtggaggacgaggaggagcaggcgcagcggaccctggccaaggcgtcgctggacaggtacctgtaccactacgagcggtgggagggcaacggcaagtcgctgcgcaaggcgctcgcggacgcggacgagctggagcggtcggagctccagcggatggccaggctgctcgacctcccggcgatggacctcggcttcgtgaccgaggcctaccgccagatcgccgacggccgccgcgtgctgcggtgggcgcacgcctacgactacttcctgtccctggacccggagcgcgacgcggccaagcgcggcctgttcgacgacctgcagagccaggccaaccgctggctcgagtgcctgcacggctgcgccgagctggagaggaagcacctcttcggcgctgccgacgccgacgccgaggacgagcccaccgtcgccgccgccgcgttcatggcgtacaaggagaggctcgccaacctcaccggagtcacgcgcaggttcatcgggaacctcgtcagagcgttcaagaccaacctgccggaagtggtggtgacgctgacgccgccggcatccgacttgcaacacatagagtggaccaacgacggagagacaaacaacggttggcattggaggcatcctttctacagaagcaactgtgacactacctgtttccaacgtgtcttctttacaagggacatcagcactgcgaccttcatcgtcgtctctagtagtctcacaggaaacggacattgcaaatgatagcgtgcaagaacgacacagccctacaagaaaccttgcccaggcccagcatccagttcgtcctggcggtcatggcggcttcctcagcaatccatacccgagtttctttggagaggctacctcaaccgcgggaccattgcaactctacatgccaaacatggtggtgtcaggtggcacgacatcgacgccctctctcgccttctctctgtctgcgcttggacagcctattacgagcacagctcttggcggctcctttggctcaaacactcgcactgcatggggcaattcagatatggctgctgcgtcgtcctctcagcctgaccgcatgggcatggatcaacaagcaggaaccggttctgccatgaatctgacaattgggctgcatcccaatgcccagcagccaccaccaaaatatgtcaaaatctgggagggtgacttatacgggcaaaggcaagggcagcctgtgtttattagtaaactcgaaagttggggtggaacagtgtccagaaaagttgcagaggattggccagaaactatgcagattgttcgcctcatagcccaggagcatatgaacaagaaatattctgaaagtcaatacgttggaaacacagactttctaatatttcgggctttaaatcagcatgggtttcttggacaactacaagagaggaaactgtgtggtgtgatacagttaccgtcgcaaactctactactttcaatgtatgacaaaacaagccgtatggttggcatgctcttccctaagaacatgctgatgttcaggccagaggccttaactcagccatcaccagtgcagcaggaagaacttatacaccaccaacaacaacaactacagcagcaacagagaaacatacatcgtcttcaacgacaactcatacagaagcagcagcagcaacatatgcagaagctactaccacaacgacttcaataccaagagcagctacatttacagcaacagatgacgcaacaaatacaacagcaacaacaatctctataccagcaacatcaacaaatgcagcatcaacagcaactgtggcaacaaatacaacaacagaagcatcagttgcaacacatggatccccaacaacaacagctgttgtctcagatggtgggtacagaattaggcagtgatgatgacacaagggaagattgggtcacaggggctgggccgcatgcctagggaatcagggagggttaatgagggcttacactcactcacttgagggttaagatgtttcctagtgtttgtcgttaaatcattaactgataacttcaaaaaaataaaccagtcatttgtatagttatacggatggggtaagagtttaaataacaccgttatgttatcgaatagctagtatattgtattgagctgggagctagatttttgcaaactccccatgtttcttcaccaaaatctttaatcatcgatcaaagatcggtaatccagtgatgcactggctcaggacacgcttaacgcacaccaccttcttggaagctgcagcctgcag

SEQ ID NO: 27885 - DNA, 3655 bp, Zea Mays
gtttggttttatcccctttccttcttccccgaatatatccaaaccatgcttagtacatgtttcgatagaatgaatgaatgcccgtccgattaattagaatacactcgttctccccaagaaggggatccactgccctagccttgtgcagcgcggcatggcatcatgcggcggcggtgtctgtctcaagagagatcgacgagaggaggaggagaacgacgacgacaagggcgagacgagcggccgcaacaagagaccaagctccggcgcttattacacgggcgcgggagtcgatgctcagagaacggatgacgacgacagcgccgccgccgattacatgtacgagtacgacgacggctacgaggaagaagaatccgctgctgagcaacccaagggcgacgacgcctcggcgcgcgacacggagcagaggtacgccgtgctgaccgaggacgacgtccgcgcgcggcaagaggcggacacggccagggtcgcggaggtgctgtcgatcccggcgggcttcgcgcgcgcgctgctgcgccacttcaagtggcgcgtcgggcgggcgcaggaggagtggttctcggacgcccagcaccagcagcgcgtccgcggcgccgtcggcctagtccccgcggcttgtccggacggcgacgccctggtccccgccgcgcgcagcccgcggccgcgggtgtgcggcatctgcttcgacgcgtttcccgcgggcgggacgcggtcggccgggtgcgccgcccactactactgcgacggctgctggtgcggctacgtcgcggcggcggtaggcgacggcgcgcgctgcctggcgctgcggtgccccgacccgtcgtgcgcggcggccgtcgtccgggagctggtcgacgaggtggcgcgcgacgacgaccgggcccggtacgcgcggttctggctccgctcctacgtggaggagagcgggggccggatcaggtggtgcggcggcgccggctgcacccggtccgtggagctcctcggcggctgcgacgcggaggccgtggcctccgcggtcgacgtcgtctgcgggtgcaggcacgccttctgctggcgctgcggcgaggaggcgcaccggcccgtgtcgtgcggcacggtgcgcgcgtggctggccaagaacgcgtccgactcggagacggccaactgggtggtggccaacaccaagcgctgccccatgtgccgccgccccatcgagaagaaccacggctgcaaccacatgacgtgcggcgcgccctgccaccaccagttctgctggctctgcctcgacccctgggaccaccacaggggctgcacgcgctacgactcccgccgccgccgccgccatgggccggtcgacgaggtggaggacgaggaggagcaggcgcagcggaccctggccaaggcgtcgctggacaggtacctgtaccactacgagcggtgggagggcaacggcaagtcgctgcgcaaggcgctcgcggacgcggacgagctggagcggtcggagctccagcggatggccaggctgctcgacctcccggcgatggacctcggcttcgtgaccgaggcctaccgccagatcgccgacggccgccgcgtgctgcggtgggcgcacgcctacgactacttcctgtccctggacccggagcgcgacgcggccaagcgcggcctgttcgacgacctgcagagccaggccaaccgctggctcgagtgcctgcacggctgcgccgagctggagaggaagcacctcttcggcgctgccgacgccgacgccgaggacgagcccaccgtcgccgccgccgcgttcatggcgtacaaggagaggctcgccaacctcaccggagtcacgcgcaggttcatcgggaacctcgtcagagcgttcaagaccaacctgccggaagtggtggtgacgctgacgccgccggcatccgacttgcaacacatagtgaagagtggaccaacgacggagagacaaacaacggttggcattggaggcatcctttctacagaagcaactgtgacactacctgtttccaacgtgtcttctttacaagggacatcagcactgcgaccttcatcgtcgtctctagtagtctcacaggaaacggacattgcaaatgatagcgtgcaagaacgacacagccctacaagaaaccttgcccaggcccagcatccagttcgtcctggcggtcatggcggcttcctcagcaatccatacccgagtttctttggagaggctacctcaaccgcgggaccattgcaactctacatgccaaacatggtggtgtcaggtggcacgacatcgacgccctctctcgccttctctctgtctgcgcttggacagcctattacgagcacagctcttggcggctcctttggctcaaacactcgcactgcatggggcaattcagatatggctgctgcgtcgtcctctcagcctgaccgcatgggcatggatcaacaagcaggaaccggttctgccatgaatctgacaattgggctgcatcccaatgcccagcagccaccaccaaaatatgtcaaaatctgggagggtgacttatacgggcaaaggcaagggcagcctgtgtttattagtaaactcgaaagttggggtggaacagtgtccagaaaagttgcagaggattggccagaaactatgcagattgttcgcctcatagcccaggagcatatgaacaagaaatattctgaaagtcaatacgttggaaacacagactttctaatatttcgggctttaaatcagcatgggtttcttggacaactacaagagaggaaactgttccatcgattcagtgtggtgtgatacagttaccgtcgcaaactctactactttcaatgtatgacaaaacaagccgtatggttggcatgctcttccctaagaacatgctgatgttcaggccagaggccttaactcagccatcaccagtgcagcaggaagaacttatacaccaccaacaacaacaactacagcagcaacagagaaacatacatcgtcttcaacgacaactcatacagaagcagcagcagcaacatatgcagaagctactaccacaacgacttcaataccaagagcagctacatttacagcaacagatgacgcaacaaatacaacagcaacaacaatctctataccagcaacatcaacaaatgcagcatcaacagcaactgtggcaacaaatacaacaacagaagcatcagttgcaacacatggatccccaacaacaacagctgttgtctcagatggtgggtacagaattaggcagtgatgatgacacaagggaagattgggtcacaggggctgggccgcatgcctagggaatcagggagggttaatgagggcttacactcactcacttgagggttaagatgtttcctagtgtttgtcgttaaatcattaactgataacttcaaaaaaataaaccagtcatttgtatagttatacggatggggtaagagtttaaataacaccgttatgttatcgaatagctagtatattgtattgagctgggagctagatttttgcaaactccccatgtttcttcaccaaaatctttaatcatcgatcaaagatcggtaatccagtgatgcactggctcaggacacgcttaacgcacaccaccttcttggaagctgcagcctgcag

SEQ ID NO: 27886 - DNA, 3695 bp, Zea Mays
gtttggttttatcccctttccttcttccccgaatatatccaaaccatgcttagtacatgtttcgatagaatgaatgaatgcccgtccgattaattagaatacactcgttctccccaagaaggggatccactgccctagccttgtgcagcgcggcatggcatcatgcggcggcggtgtctgtctcaagagagatcgacgagaggaggaggagaacgacgacgacaagggcgagacgagcggccgcaacaagagaccaagctccggcgcttattacacgggcgcgggagtcgatgctcagagaacggatgacgacgacagcgccgccgccgattacatgtacgagtacgacgacggctacgaggaagaagaatccgctgctgagcaacccaagggcgacgacgcctcggcgcgcgacacggagcagaggtacgccgtgctgaccgaggacgacgtccgcgcgcggcaagaggcggacacggccagggtcgcggaggtgctgtcgatcccggcgggcttcgcgcgcgcgctgctgcgccacttcaagtggcgcgtcgggcgggcgcaggaggagtggttctcggacgcccagcaccagcagcgcgtccgcggcgccgtcggcctagtccccgcggcttgtccggacggcgacgccctggtccccgccgcgcgcagcccgcggccgcgggtgtgcggcatctgcttcgacgcgtttcccgcgggcgggacgcggtcggccgggtgcgccgcccactactactgcgacggctgctggtgcggctacgtcgcggcggcggtaggcgacggcgcgcgctgcctggcgctgcggtgccccgacccgtcgtgcgcggcggccgtcgtccgggagctggtcgacgaggtggcgcgcgacgacgaccgggcccggtacgcgcggttctggctccgctcctacgtggaggagagcgggggccggatcaggtggtgcggcggcgccggctgcacccggtccgtggagctcctcggcggctgcgacgcggaggccgtggcctccgcggtcgacgtcgtctgcgggtgcaggcacgccttctgctggcgctgcggcgaggaggcgcaccggcccgtgtcgtgcggcacggtgcgcgcgtggctggccaagaacgcgtccgactcggagacggccaactgggtggtggccaacaccaagcgctgccccatgtgccgccgccccatcgagaagaaccacggctgcaaccacatgacgtgcggcgcgccctgccaccaccagttctgctggctctgcctcgacccctgggaccaccacaggggctgcacgcgctacgactcccgccgccgccgccgccatgggccggtcgacgaggtggaggacgaggaggagcaggcgcagcggaccctggccaaggcgtcgctggacaggtacctgtaccactacgagcggtgggagggcaacggcaagtcgctgcgcaaggcgctcgcggacgcggacgagctggagcggtcggagctccagcggatggccaggctgctcgacctcccggcgatggacctcggcttcgtgaccgaggcctaccgccagatcgccgacggccgccgcgtgctgcggtgggcgcacgcctacgactacttcctgtccctggacccggagcgcgacgcggccaagcgcggcctgttcgacgacctgcagagccaggccaaccgctggctcgagtgcctgcacggctgcgccgagctggagaggaagcacctcttcggcgctgccgacgccgacgccgaggacgagcccaccgtcgccgccgccgcgttcatggcgtacaaggagaggctcgccaacctcaccggagtcacgcgcaggttcatcgggaacctcgtcagagcgttcaagaccaacctgccggaagtggtggtgacgctgacgccgccggcatccgacttgcaacacatagtgaagagtggaccaacgacggagagacaaacaacggttggcattggaggcatcctttctacagaagcaactgtgacactacctgtttccaacgtgtcttctttacaagggacatcagcactgcgaccttcatcgtcgtctctagtagtctcacaggaaacggacattgcaaatgatagcgtgcaagaacgacacagccctacaagaaaccttgcccaggcccagcatccagttcgtcctggcggtcatggcggcttcctcagcaatccatacccgagtttctttggagaggctacctcaaccgcgggaccattgcaactctacatgccaaacatggtggtgtcaggtggcacgacatcgacgccctctctcgccttctctctgtctgcgcttggacagcctattacgagcacagctcttggcggctcctttggctcaaacactcgcactgcatggggcaattcagatatggctgctgcgtcgtcctctcagcctgaccgcatgggcatggatcaacaagcaggaaccggttctgccatgaatctgacaattgggctgcatcccaatgcccagcagccaccaccaaaatatgtcaaaatctgggagggtgacttatacgggcaaaggcaagggcagcctgtgtttattagtaaactcgaatatcaagacatttattcgtgcgattcgtaattctcactcactaatttctgacagagttggggtggaacagtgtccagaaaagttgcagaggattggccagaaactatgcagattgttcgcctcatagcccaggagcatatgaacaagaaatattctgaaagtcaatacgttggaaacacagactttctaatatttcgggctttaaatcagcatgggtttcttggacaactacaagagaggaaactgtgtggtgtgatacagttaccgtcgcaaactctactactttcaatgtatgacaaaacaagccgtatggttggcatgctcttccctaagaacatgctgatgttcaggccagaggccttaactcagccatcaccagtgcagcaggaagaacttatacaccaccaacaacaacaactacagcagcaacagagaaacatacatcgtcttcaacgacaactcatacagaagcagcagcagcaacatatgcagaagctactaccacaacgacttcaataccaagagcagctacatttacagcaacagatgacgcaacaaatacaacagcaacaacaatctctataccagcaacatcaacaaatgcagcatcaacagcaactgtggcaacaaatacaacaacagaagcatcagttgcaacacatggatccccaacaacaacagctgttgtctcagatggtgggtacagaattaggcagtgatgatgacacaagggaagattgggtcacaggggctgggccgcatgcctagggaatcagggagggttaatgagggcttacactcactcacttgagggttaagatgtttcctagtgtttgtcgttaaatcattaactgataacttcaaaaaaataaaccagtcatttgtatagttatacggatggggtaagagtttaaataacaccgttatgttatcgaatagctagtatattgtattgagctgggagctagatttttgcaaactccccatgtttcttcaccaaaatctttaatcatcgatcaaagatcggtaatccagtgatgcactggctcaggacacgcttaacgcacaccaccttcttggaagctgcagcctgcag

SEQ ID NO: 27887 - DNA, 3632 bp, Zea Mays
cgacgagaccgacggtggtgcaggccagactggagtgtgctcagtggacgcgcgggacgtcagcagccacgaccgcgtgaccgctgatcctgatcgtgccaagtcgtttttgtttggttttatcccctttccttcttccccgaatatatccaaaccatgcttagtacatgtttcgatagaatgaatgaatgcccgtccgattaattagaatacactcgttctccccaagaaggggatccactgccctagccttgtgcagcgcggcatggcatcatgcggcggcggtgtctgtctcaagagagatcgacgagaggaggaggagaacgacgacgacaagggcgagacgagcggccgcaacaagagaccaagctccggcgcttattacacgggcgcgggagtcgatgctcagagaacggatgacgacgacagcgccgccgccgattacatgtacgagtacgacgacggctacgaggaagaagaatccgctgctgagcaacccaagggcgacgacgcctcggcgcgcgacacggagcagaggtacgccgtgctgaccgaggacgacgtccgcgcgcggcaagaggcggacacggccagggtcgcggaggtgctgtcgatcccggcgggcttcgcgcgcgcgctgctgcgccacttcaagtggcgcgtcgggcgggcgcaggaggagtggttctcggacgcccagcaccagcagcgcgtccgcggcgccgtcggcctagtccccgcggcttgtccggacggcgacgccctggtccccgccgcgcgcagcccgcggccgcgggtgtgcggcatctgcttcgacgcgtttcccgcgggcgggacgcggtcggccgggtgcgccgcccactactactgcgacggctgctggtgcggctacgtcgcggcggcggtaggcgacggcgcgcgctgcctggcgctgcggtgccccgacccgtcgtgcgcggcggccgtcgtccgggagctggtcgacgaggtggcgcgcgacgacgaccgggcccggtacgcgcggttctggctccgctcctacgtggaggagagcgggggccggatcaggtggtgcggcggcgccggctgcacccggtccgtggagctcctcggcggctgcgacgcggaggccgtggcctccgcggtcgacgtcgtctgcgggtgcaggcacgccttctgctggcgctgcggcgaggaggcgcaccggcccgtgtcgtgcggcacggtgcgcgcgtggctggccaagaacgcgtccgactcggagacggccaactgggtggtggccaacaccaagcgctgccccatgtgccgccgccccatcgagaagaaccacggctgcaaccacatgacgtgcggcgcgccctgccaccaccagttctgctggctctgcctcgacccctgggaccaccacaggggctgcacgcgctacgactcccgccgccgccgccgccatgggccggtcgacgaggtggaggacgaggaggagcaggcgcagcggaccctggccaaggcgtcgctggacaggtacctgtaccactacgagcggtgggagggcaacggcaagtcgctgcgcaaggcgctcgcggacgcggacgagctggagcggtcggagctccagcggatggccaggctgctcgacctcccggcgatggacctcggcttcgtgaccgaggcctaccgccagatcgccgacggccgccgcgtgctgcggtgggcgcacgcctacgactacttcctgtccctggacccggagcgcgacgcggccaagcgcggcctgttcgacgacctgcagagccaggccaaccgctggctcgagtgcctgcacggctgcgccgagctggagaggaagcacctcttcggcgctgccgacgccgacgccgaggacgagcccaccgtcgccgccgccgcgttcatggcgtacaaggagaggctcgccaacctcaccggagtcacgcgcaggttcatcgggaacctcgtcagagcgttcaagaccaacctgccggaagtggtggtgacgctgacgccgccggcatccgacttgcaacacatagtgaagagtggaccaacgacggagagacaaacaacggttggcattggaggcatcctttctacagaagcaactgtgacactacctgtttccaacgtgtcttctttacaagggacatcagcactgcgaccttcatcgtcgtctctagtagtctcacaggaaacggacattgcaaatgatagcgtgcaagaacgacacagccctacaagaaaccttgcccaggcccagcatccagttcgtcctggcggtcatggcggcttcctcagcaatccatacccgagtttctttggagaggctacctcaaccgcgggaccattgcaactctacatgccaaacatggtggtgtcagatatggctgctgcgtcgtcctctcagcctgaccgcatgggcatggatcaacaagcaggaaccggttctgccatgaatctgacaattgggctgcatcccaatgcccagcagccaccaccaaaatatgtcaaaatctgggagggtgacttatacgggcaaaggcaagggcagcctgtgtttattagtaaactcgaaagttggggtggaacagtgtccagaaaagttgcagaggattggccagaaactatgcagattgttcgcctcatagcccaggagcatatgaacaagaaatattctgaaagtcaatacgttggaaacacagactttctaatatttcgggctttaaatcagcatgggtttcttggacaactacaagagaggaaactgtgtggtgtgatacagttaccgtcgcaaactctactactttcaatgtatgacaaaacaagccgtatggttggcatgctcttccctaagaacatgctgatgttcaggccagaggccttaactcagccatcaccagtgcagcaggaagaacttatacaccaccaacaacaacaactacagcagcaacagagaaacatacatcgtcttcaacgacaactcatacagaagcagcagcagcaacatatgcagaagctactaccacaacgacttcaataccaagagcagctacatttacagcaacagatgacgcaacaaatacaacagcaacaacaatctctataccagcaacatcaacaaatgcagcatcaacagcaactgtggcaacaaatacaacaacagaagcatcagttgcaacacatggatccccaacaacaacagctgttgtctcagatggtgggtacagaattaggcagtgatgatgacacaagggaagattgggtcacaggggctgggccgcatgcctagggaatcagggagggttaatgagggcttacactcactcacttgagggttaagatgtttcctagtgtttgtcgttaaatcattaactgataacttcaaaaaaataaaccagtcatttgtatagttatacggatggggtaagagtttaaataacaccgttatgttatcgaatagctagtatattgtattgagctgggagctagatttttgcaaactccccatgtttcttcaccaaaatctttaatcatcgatcaaagatcggtaatccagtgatgcactggctcaggacacgcttaacgcacaccaccttcttggaagctgcagcctgcag

SEQ ID NO: 27888 - DNA, 1029 bp, Zea Mays
caggatttcttcatatgcgaggctgtatacgaggccagggcggatgtggtggctactgcgagctgtaagaagctcatcatagatatgcactaagagacgcgcatccagaccatcatcacttaccatggctctatccttggagagaaggttagcaagaaggatgaccgaaccatgtcgttgactcatgaccagtacttgcagatgattccttattgttgcgctacgcatcctgagtgctgggagtagtggtgcaaaggtggtgctcgaacgagtggggcaaggcgcacaacgctagacgggaacgacgttggatgatgcaaggtccctcccactaccaaggcagtcgcagccttggcaaatacgcagaagcatgggtaaacaccctttttaatttagtctaagttttggttaggcatgatatctaatcatctcattggttttctcacagttggcgtcacatagtggccagccttgctctatcttttcggcgtatgctatggcccacaagggcaaggtgacgtctaacatcacctacaacctagaggacgggcccaaggcgtacaacaatctcatcgtctacagccacctcagtgagtacgccgccatggcaaaggaggtccatgagctagattatgatccaaggatcgaggacatcaacagagatgtcctcatgaggcttggaggaggcaagaggcatgggcggtactagattgtcgatggggcaatcgactcgtcatccacttccactctgtctccggtgcaatcaaggagcaggagcatgagcctagccatacgacctcgacaggacagctcatagcatcgcatccaggaactccagacccagctataagaagagaggagggaacatatggagcgggaagcgaagcagggcggatcagcagaggatgggtgagatgttctagtacatgcagagccttggtgctgcacagggtcttgctccaccacctctgttgttctctacagttaactcttctcagttccatactcatgtgagtatcaaaattttag

SEQ ID NO: 27889 - DNA, 337 bp, Zea Mays
gttgaagatgcggcgcaataggacgtcgatgtagtgcggttggacgacaacgacactcagtaagacgcctctggttctggtgcctcaggttcgatgcaagtctacttgagaggtctcgtgagtctccgtaagcgaccgatccttcgtgacaggagcccgcttatttgacacgatgggaaaaaggtggtcacaaacgcgtccccaatggcatcctcggccttctgtgcagggaacacttccctggattgttgagtacgtcggaatgacgggcccaccctattcattcgaccactacgccgtcgccctcgatgcagtagatcaggacgacagggaattc

SEQ ID NO: 27890 - DNA, 2311 bp, Zea Mays
cttccccacgcacacaacaaaagatctcagagccacacagcgagcgcgagcgagaggcgcgctgttgcggaaatgccgctcccggcgttcctggcggcggcggcgaggctcgccgtcctgctggccgccgccgtgactgcggccaacgcggtctccttcgcgcgctaccggcgccgccacctccgccgcatccccaaccccatcgacgagtccgccgaccccgtcgccgacttccgcgccctccgccccgcctcggccgaggacgccgcagaagatgacagcttcttctttgggctagcgaccgcgccggcacatgtggaggacaggttggaagacgcttggcttcagtttgcggtggagcactcctgcgacgacaaggaggccatgcgcgaccctacgacagcagatgcggtgatggcgtccgctgcaggggacggaggtgctcagttggcttctcgtaggtcgtccagaggggatgatgatagggatggtgatggagagttgaggaagcctcttaagatcgccatggaggcgatgctcagggggtttgaaatgtttgctgagggtggtgagtcaggttctgctgctgctgctggtgacagttgcagccacaacgttgcggcttggcacaatgtcccttgcccgtaagtcccaaccgtaccttatgttgtctgctcaactgttgtagatgttgtcccaagtcccaacccttctgtttgtctgacatttggacaatccaggcaagaaaggcttaagttttggtctgatcctgatactgagttgaaacttgctaaggaaactgggatcagtgttttccgcatggggattgattggacgagggtaatgccgaaggaaccaatcgaagacctcgagagctcagtcaattttgcggcgctcgagcggtatagatggatcgtccaaagggttcgtgactatggaatgaaagtgatgcttacgctgtttcaccactcgcttccaccttgggccggagaatatggcgggtggaggatggaaaaaacggtcaagcttgttgttgatcgtgtatcagatttggtggactactgggtggttttcaatgaacctcatgtgtttgtgatgctgacctattgtgccggtgcttggcctggtggtgaccctaatgcaatcgaggtagcgacgtctgctttgccgactggtgtatacaaccaagcattgcattggatggctattgcacatgcggaagcctacgattacatacattcaaaaggcgaaagtaaaaggaagccggtcgttggtgtcgctcatcatgtatcatttacacgaccctatggtctgtttgatgttgccgctgtcacactggctaattcattgacccttttcccttacatcgatagcatatgtgacaaattggattttattggcatcaactactacgggcaggaggtgatatcaggccctggcctaaagctcgtggacaatgatgagtacagcgaatctggtcggggtgtttatcctgacgggctgtttcgtattctgattcggtttaacgaacgatacaagagcttgaatatacctttcgtagttactgaaaatggagtttctgatgagactgatctgatccggaaaccatatattctggagcacctgttagccatttatgctgcaatccttatgggtgtgcctgtgcttggttatctattctggacaacgtcagataattgggaatgggcagatggctatggtcctaagtttgggcttgtggctgttgatcgtgctaacaacatagcacggaaacctaggccatcatactatttgttctctaagattgttacaactgggaaaatcacaagacatgacaggttggctgcttggagggagctgcaacaggcagcgtttcagaagaaaacacgcccgttttttagggcagtagataaacatggccggatgtatgcagggggtctggatcggcctatccagagatcattcatattgcgggattggcgatttggtcattatgaaatggaaggcttgcaggatcctttcagccgatttataacatccattatttcaacaattttgtggaagaagaagatcagttacattgaggatgaggatatttcttattctctttcttgttgatgcttcttactctaggtgttatgtctaagagaatttgaggtcccatttttttttactttcactgtatatggcctgtataaaattgtttgcccttatttttatatgtaagtagcatgattcgtcctctagacaaagtaaatataaagttctagaaagtaaaagtttctctttatggataaattgcagtgtgcac

SEQ ID NO: 27891 - DNA, 4734 bp, Zea Mays
atggctagagaaggatggggagggctgggcgagctgagcgacgacgctcgatctgggcgagcgcgtctagggatgaggcaacgtgagggagctggcttcctatgcgcaggggataagcaaggactccacatatggttgatacgatgggaggaagccaacacctgtgcttgggcgagcagagacaagctgatggcctggagaaatctagcagcagttgtgtacgaagggataagaagaggagtctagacggtggaggatagggatccgagcgacttcaagaaaatcccagagagacggcaccatgggagattatcaacgacaatgaaaaaataaaactgaaaagggattttcctatgtttctctcacatttttttagacacggacaaatttgggttctaggatttgggtctaagcgagatgcaaggatgaaccaaaataatattaacatcgctattttacgtttgattcgaattatttgaaattaaataatttcatccgcgtctaaacagggaaacaaattaattacgattactcaattccggctctaattatctcggtccaatttaatctcgcatcgacactcttgtcgtcgatcttctaataaaattcacttgggtcaaaaatcacaagagtgggtcgggattccaaattcatattctcttaatccataaattttaaacggacatcagactcgacatttcgtgaaataaatacgcgagatcgatacagcatcgaaattgtgatccttgcgaaagcgacgtcacacatcgttcacgtgggcgagaagttgtgcgctatccagacaccggttagcacctgccacccgtgtcacgatgtcaggccacagagagacacgtgcaacacaagcgtgaaagaatttcaaatgaagtttaagggaccagatccgatttctaggattagagtttgggcaagacgtcgatggctcaaccaaaacgatactggattcgatgtttcgaaagattactaaagtccgaatttttgtgaaataatttaggacaatttaaacagatggagacaaacacgatatccaaatcatgataaacgaggatgattaaaatttagtgacctttacattcacagctatcacgtgttaacgtccatactcgtggtcgagtagacgataaacacctggggtgttacagccttctccccttaaaagaatctcgtcccgagattcagaacgaaagacttctaagagtagagaggcatataaccctgtccataatagtgatagcataagacggtcctgagtgaaggcgagtggatgtggtttctctagtggatatagcatgtatcaccttaagccaactagagatgtcaacaagcagacgacaactgacaaagaacacataaggttccatgtgtgcagttgtcactaagatcaagagaaaggagtctccacatgaaaagggtgattttatcacatgattagacacagataggtttcgattttcgatggagatttctgaatgggtagaaaatttacgaaggaatacattagagttatatacccttttgatctaacagtgatgacatatgtggcttgatcattctgacaaagaacatagaaatcatttcacggaagcagtctacggaagataacatgtcagtgcagttccataatggatcatacccagagacttcgataccagcgtaccgaacagcactaccatgtgtcagccgccacatgagactttcggctttacgcggcaccataagtcattaactaggacaccatcgtcgaactagcaccgataatgaatctcacgtggtaagaacaattgcgcaaagataacatatcgatataatctcataatggattatgactaactaactgtgataccaggcgtgtgccaagtagcgcaaccatgtgttgatcacccacagggaggccctcgggtttcgtcgcagcaccatcagttttagtcataacaccattgccagacgtaatcaataagaaatctcacatgacacagatagattgagcaagggtgacaatatacaaaaagactctacctgtaagaatgattacaagtagagagtcaaatagatcatggcccgatgaagtgaacacgatacggccaaaaccaaaaattggttgataaggagtacgatgggagactgttactttagccccaagcatatttctatgtccatcacagagattatcatgtcaataattagcgtccaataagatatggaagggaaacaatcataagattaaattgataagccttcgagagagatgaaaaaaaatcaaaggcattaaattcaagaaaatgattgggcactgctttcctaggttgggctgagaaagcaacaagatgatcctgatggagactcaaactgacatagagatatcagcttgcaccaaccgaacaaaggtatgttttaggatgaaattatgaccataagagagccacaagtggattgttaagatcacagactcgagatccttgtttttaagtttgagtgcattttaggtctaataaggggattacctaaacatctatttgcacgagtttggccatggagtaggaatcgataattcaaactcatgcatgttttgaagatttagagcgactttgaagaaatgacaaaattatgaattatatctcatacaatttcaaatgttgagatgatgaggacatgacttggtctaattactagaactccaataatcttgtgaagaaaatgatcttcacacaagacgacacctaggacaggttgtcaagaaattaatacacgtttagatcaaggtttactaaacaaggacatagcctagctttgggtttacgtcaacaagctaccaacattctaccggcacaaacacaccaaaacaaacacaagttggactagtggtcaaattaaaaagaaccacaggccacataaacgcatatctaaaggacacaacaaacaaagctagaaattgcttataggacagtcatgcttcacacattttccaattatttattatcggaataaagacgagggaagcacgttcgttcacaatcaccaattattagaataaaggtgagagaagcatttttgtgcgcaaacaacaaacataatgcggcaatcaggatgcatgctcgtcctattcgtcctcacgaatttcgccaacataatgtggcaatagcgttctatatcggtggcatatctacgttctctctcgatatgttgctagtcgtcagctacacatacaagttcgaagttagtgtacctgcagaaaatttcatcacagcccagttcccaatgatgcaattcacacatgacagtttatcacagtttatactccatatattgctatatggaggccagctcctcattaagcgccgagccacgcataggcgccgctgccacactttaaccatagggcagctcattatggtaactcaccttcttacctgaacgtaggtgcgtcgttgcaaatacatacacttctcagtattcccatgtctgtatacccatacacatccatggggtactgaatcccggaaaagtaaatactccacatcatagccttcatatatacatatgtaaaacatgtatataatcaagcgctttttatactctcccctggaacgacgattgttcggtcatgctctcacatctcactttacctgagcgtcgatccattcaaaactgaatggctcaaaaataacaatacacatgtatgcaatacccccggttgtgggttagtggtttttaaataagccacctaatagaccttaatttagggcttaacagaggatgtcgctagcattatagtttttcaaaactgtttttcaaagccaaacaatgtgtttagttgaaaatagatttttgaaaccaaacttttgttttaaaaatacgtatgtgattgtatcatacttaatcaagctccgataccagctgtcgcagaaccttccaagttatcgggcccacatgcacctgtccttgtctcaaagacctcagacagctatgcatgtgcaccaaacaacttaacaggatctgtccgagtgccccgaggacctcggataaacgacttaccgccaagatcgcaggattaagtaaacacaactcacatacaaacacttgcagcggaaataaattctttattacaaaatgattacaagttacaacatttacaagttataacaagattacaatatatatcatcggagttgattacaaaagaaattgattcaaaaagattacaatttgaatgtataaaacatttataagttttaaaatacatgctagcttaagtgacaatcctcaatagggaagctaaagatgggatatacttatataagaaggccgagcctaccggcacttagcaccatccacaacagaacaaaattacaacctgaaaaacaacagggaataaaaccctgagtacgcaattactcagcaagacttacccgactaaagaaaagactctcaagggtatgctggtttgttgggaatcaaggtaaagctcatcaagtttcaaagactcgtttttgcagaaaagcttactagtagtggatccttatgccaaagttttacttcacagattaagtacttttcctgaatctagatttgcctaatctagagcattcacttgtcctacactagcttcattttatcaactttaatttcacttgttatctacgatgagggtcgaagatccagtcttcatatccgagaagttcggcgatccgaatcgattaatacccagctggggat

SEQ ID NO: 27892 - DNA, 2432 bp, Zea Mays
gagcaaataaagccaccgatgtcatcactcctgttgcgagtgctgctcatccagcttgcagcagtggagtgcctctccgccgcgattccaggctgcctaacgcaatgtggaggcgtagagataccctatccattcggcgtcggcaccaactgctcccgcaaagggttccggatcaagtgcatcaacggcagcgcgggcgaggagattccagtgctgctacctactacgcgctaccagaacatccgggtgctgaacctgtccgtgtcgccgttgccggaggctcgagtgcttcttccggtggcatggcagtgcttcaacgccaccgggggcgtcactgggatctactcgggagatgtggacttcaacccagagggcgtataccgcatctccaacacacagaacgagctcttcgtcctcggctgcgacacctatgcgttcaccaaaggcgtgagggtgcacaacgttaacgcacgcttcccttacagatacttcacggggtgtatcaccgtcagtgtagacgacaaggacccgcgcgacggtgcctgcgcgggcctcggctgctgccgcgtcgacatcccgccaggcatcacggacaccagcatgaccttctcgtctacctggacgcgtgccaaccagaccttctgcccctgcgactacgccttcatcgtggagaagggcaactacaccttcaaggcatccgaccttgtgtcgcacacacccgacaaccgtctgcctttggactggtggaccatgccactgcgtctcgactgggccatccgcgacaacaacggcgactccatgacttccatctcctgcgcccaggcacccaacgaacctgactatggctgccgcagcaagcatagcgagtgcactaattcaaccaatggccctggctacttctgcaagtgtgcccatggctacgacggaaacccctatgtccagagtgatggtgaatgcacgaatatcaacgagtgccaagatccaaagtcacataattgttcaagtggcagcaaatgcattgacacagacggaggctattattgtcaatgcaatttcttccgaagagggcagcaatgtgatcccttaattcctatggctgccgttgcactgttaaaaatggaggtaaactactgaatgcccagggcataaccacctacaccaaaagggagctgaagaagataactaatggctacagcaaacgccttggaggagggcactttggcaatgtttacgagggcaccatcgtcgacggcagaaaggtcgccgtcaaatgtcctttgcggacaagggtgtcgtcgcaccgctgccattggaagaatttgattcgacctcgccgtgtaccgctaccgcaacagagggtggaggaagatgggtcgttcatgaacgagatcaggttccagttcgaagtcagtcgtcacaagaacttggtccagctcctgggatgctgcctagagaccgacattccgatcctagtcttcgagtttgtcgccaatggaagcctggaggacatacttcatagtgccaagaaaccatgtaccctctcgctgccggagcggctggacatcgccattggctccgcggaagctatcgcctacatgcactcccttgacaatcaaaagcgtgtccatggagacatcaagccttccaacatcctccttgacgatgacctcaatccaaaagtctctgactttggttcctccaagctcctggcaatccatagctactacgttagggcagtggctgcagatataggctacatggacccattatatatgaagaccgagcacttcacattggagtgcgatgtctacagcttcggcgtggtgcttctggagctcatcacgaggagaagggccagctggtatgaacaagatcaccaagggaacaagatcctccccatcgagttcgtcaagtgcttcaaggaccacggtagcggatgtgcgatgtatgatagcagacttgatttctcagctggcgaggatgctcaatctcgatgcaacaagcgttgcctcgacatgattggcatgttggccgtccgatgcctcaaggaagacaagagggagaggccaaccatggcagaggttgtcgaggagcttaagcgagtgaaggtactactgctgggtacacatatataaaataatggcctgcagcaatcaagcgagttcgaagcacgcagatgaatggaagcgaagcaagcaataagaatggtcggtcagcacatgtgaagcgctgaacatggcggcggtactgatacaagcaataataagggttcctcaactcaaataaatatacatgatttattctcttccaataaaacagcaatgtctatctgtaaacatagtaattcgcatgaattgcttcgctttatacttcttaatttgatgtatgtccatacaaataattgacactatatatcgagcaccaaaagtgac

SEQ ID NO: 27893 - DNA, 2456 bp, Zea Mays
taataatccagcgaacacactatactagtgagcaaataaagccaccgatgtcatcactcctgttgcgagtgctgctcatccagcttgcagcagtggagtgcctctccgccgcgattccaggctgcctaacgcaatgtggaggcgtagagataccctatccattcggcgtcggcaccaactgctcccgcaaagggttccggatcaagtgcatcaacggcagcgcgggcgaggagattccagtgctgctacctactacgcgctaccagaacatccgggtgctgaacctgtccgtgtcgccgttgccggaggctcgagtgcttcttccggtggcatggcagtgcttcaacgccaccgggggcgtcactgggatctactcgggagatgtggacttcaacccagagggcgtataccgcatctccaacacacagaacgagctcttcgtcctcggctgcgacacctatgcgttcaccaaaggcgtgagggtgcacaacgttaacgcacgcttcccttacagatacttcacggggtgtatcaccgtcagtgtagacgacaaggacccgcgcgacggtgcctgcgcgggcctcggctgctgccgcgtcgacatcccgccaggcatcacggacaccagcatgaccttctcgtctacctggacgcgtgccaaccagaccttctgcccctgcgactacgccttcatcgtggagaagggcaactacaccttcaaggcatccgaccttgtgtcgcacacacccgacaaccgtctgcctttggactggtggaccatgccactgcgtctcgactgggccatccgcgacaacaacggcgactccatgacttccatctcctgcgcccaggcacccaacgaacctgactatggctgccgcagcaagcatagcgagtgcactaattcaaccaatggccctggctacttctgcaagtgtgcccatggctacgacggaaacccctatgtccagagtgatggtgaatgcacgaatatcaacgagtgccaagatccaaagtcacataattgttcaagtggcagcaaatgcattgacacagacggaggctattattgtcaatgcaatttcttccgaagagggcagcaatgtgatcccttaattcctatggctgccgttgcactaaatggaggtaaactactgaatgcccagggcataaccacctacaccaaaagggagctgaagaagataactaatggctacagcaaacgccttggaggagggcactttggcaatgtttacgagggcaccatcgtcgacggcagaaaggtcgccgtcaaatgtcctttgcggacaagggtgtcgtcgcaccgctgccattggaagaatttgattcgacctcgccgtgtaccgctaccgcaacagagggtggaggaagatgggtcgttcatgaacgagatcaggttccagttcgaagtcagtcgtcacaagaacttggtccagctcctgggatgctgcctagagaccgacattccgatcctagtcttcgagtttgtcgccaatggaagcctggaggacatacttcatagtgccaagaaaccatgtaccctctcgctgccggagcggctggacatcgccattggctccgcggaagctatcgcctacatgcactcccttgacaatcaaaagcgtgtccatggagacatcaagccttccaacatcctccttgacgatgacctcaatccaaaagtctctgactttggttcctccaagctcctggcaatccatagctactacgttagggcagtggctgcagatataggctacatggacccattatatatgaagaccgagcacttcacattggagtgcgatgtctacagcttcggcgtggtgcttctggagctcatcacgaggagaagggccagctggtatgaacaagatcaccaagggaacaagatcctccccatcgagttcgtcaagtgcttcaaggaccacggtagcggatgtgcgatgtatgatagcagacttgatttctcagctggcgaggatgctcaatctcgatgcaacaagcgttgcctcgacatgattggcatgttggccgtccgatgcctcaaggaagacaagagggagaggccaaccatggcagaggttgtcgaggagcttaagcgagtgaaggtactactgctgggtacacatatataaaataatggcctgcagcaatcaagcgagttcgaagcacgcagatgaatggaagcgaagcaagcaataagaatggtcggtcagcacatgtgaagcgctgaacatggcggcggtactgatacaagcaataataagggttcctcaactcaaataaatatacatgatttattctcttccaataaaacagcaatgtctatctgtaaacatagtaattcgcatgaattgcttcgctttatacttcttaatttgatgtatgtccatacaaataattgacactatatatcgagcaccaaaagtgac

SEQ ID NO: 27894 - DNA, 1153 bp, Zea Mays
caagatcgtcggtctcctctcctggtcaagataacggttgcaagtgtgtggtgccccggcctttttaatgacagtatatataaaccactgggcctcaactagttgagcataaaatcacccacacacccagcccagcagccagcaccgatcgagtcatccttaattaccgtaataatatgaaggccgccatgattgttgttgaagtagtactggcgctactgctgtcctatggggcgggacatgccgactgcgcaacgacgaccatcccccagaacagcaacagcacggccgacatgctttccctgctcgacttcagaaagacaatcagcagtgatccaggaggtttcctcacatcctggaacactaataacagtagcgccgccgactactgcggctggaatggcgttacatgcagcagaaagcacccagggcgggtcattgaactcaacctcagcagccaaagcttgcaaggccgaatctcttcatctctcggatctggccaccaggactcccctcgcccgctatgacagcttggggcccctctacacgctccggccatccacctccggcacgtctccgcctcctgccctggtatccaccacctcctccaccacttggcatcatcgtctcggacatcccggacctgacatcatgaccaagattaccagtagcctagatctttcatgtagtaggggacattttgagggcctctgtcatgcttgtcagttaggccggcatactcgtctcccattcaccacttcttcttctcaggatgagcaggcttttgacctggttcattgtgatctctggacctctcctgtactcagtctttctggttataaatactatttggtgattttggatgacttctcccattttctttggacttttcctcttcgattgaagtctgacacgctcaccacccgcacacacttctttgcctgggtctccacccagtttcaccgcccggtccgtgccctgcagtgtgacaatggttaaaaacggtttaaataatttcattaaacggtggctaaatagatacatgtaaacggaaaacatttgtttaaatggccatttagcgtttagggtttagcatatataggataacactgattttggcatgtcaaaatataattatttcctaataaaaaga

SEQ ID NO: 27895 - DNA, 663 bp, Zea Mays
attccatcaagtgtcgcctctgcctctgtatcaaatgcagcagcaccacaagctattatcaactcagatgatgtagcttgggctcattgtttttgcccagatgcaaacaagaagcattggctgaagtgcaagtactgtgacaagctatgcaaagctgggattacaagaattaagtggcaccttgctgtccttgtggtgaagcaaaagccaacaaaaggttctagtagccttagctgtagaacagtggtacgtggtggcactattgacagattttataaaccttctactattgaagaatttgttcaaatgatgcataaaggaattaaccttagcaacaaggttcaaacaacattgtcaactcagaaaagagaagagagaagggataaggcttgtgagtacatatgtcagtttttctatgaagctagtattgcacacaacacagtcacccttcctagctttgcacttatgcttgaggccattgggcaatttggtaaaggtttgagagggcctagtccttatgagatgagtggaccattcttgcagaaaaggaaacaaaaggtattggatggtttcaagaaccacaaggaatcatgggagcaaacaggatgtacaatcatgacagatgcatggacagataggaagggtaggggagtgattttttag

SEQ ID NO: 27896 - DNA, 900 bp, Zea Mays
cttgctcactgtgtcctctccatcgcgtgaacccagcactggcggctggcttcaacctgatggcggcggctggcttcaacagttcaagttcaacacgttggttccctgctggcggtaagcaatgaagcaagtagcaacaatcaaggcagcactccaatagtattctctccactctccaacctccaattgttgtccagttgaaccggcaccatgtctcagcaagagaagcaaacagttattccatcaagtgtcgcctctgcctctgtatcaaatgcagcagcaccacaagctattatcaactcagatgatgtagcttgggctcattgtttttgcccagatgcaaacaagaagcattggctgaagtgcaagtactgtgacaagctatgcaaagctgggattacaagaattaagtggcaccttgctgtccttgtggtgaagcaaaagccaacaaaaggttctagtagccttagctgtagaacagtggtacgtggtggcactattgacagattttataaaccttctactattgaagaatttgttcaaatgatgcataaaggaattaaccttagcaacaaggttcaaacaacattgtcaactcagaaaagagaagagagaagggataaggcttgtgagtacatatgtcagtttttctatgaagctagtattgcacacaacacagtcacccttcctagctttgcacttatgcttgaggccattgggcaatttggtaaaggtttgagagggcctagtccttatgagatgagtggaccattcttgcagaaaaggaaacaaaaggtattggatggtttcaagaaccacaaggaatcatgggagcaaacaggatgtacaatcatgacagatgcatggacagataggaagggtaggggagtgattttttag

SEQ ID NO: 27897 - DNA, 5439 bp, Zea Mays
gtcgtcccttcccaaaggctcaaactcctgaagcttcttgctcactgtgtcctctccatcgcgtgaacccaatcgcgttcgcctcagctccgataagtcgtcataccatcgtcttcgtcgatcgggaatcgtggtgccgacacatcgacatcgtcgttcgtcccctttccgagtctacaacaacgtcgcctatccctctttggtgcttgttatcgatccgtcgccttgccccgatgctggctcctacgtgacgcctcccacttgtgttcacgccaaaaatccgagaagatttggcgccgaaggaaataaatcagtacgcgaccggaggattctctatgtggatggagaagaaacgcgattcgatgcagcactcaccatgtgtttggtgaaatgctagagctgaaaggcgtcgtgatttcgtggtttcaagtcgaatttaatgagggtacgtaaattaaccatgtgatgcggaagacgagccaagtcgaccccaagcgcgagctactccgcatggtgatactgatggacgaacctgcctgatcaagtgctaggacaaggatgatcgtcaagtggtcgtcgtctaacaacactaacctagtgttacccaggcaagctccggtgcatttgcccattccttgtgttttaaatactttatcacctgatatgatgcattaggttgatagaagttgtgtgataaacaattgatgcattaccattccttggaaactccttaatccctgttttataaaaagaactgataatgcttagccctgcttagaaactgaaaaatcatttgttttcaaaaagaatgattgcagaacaatggttatgagctttttgattcaaaaatcaaagcaaactaaggtgatgactccactttggccagagtgggctcatcattggaaaagagtacccctgtcaggtaccaaaaatgggaaaatggtttgaataaatctagaccaggtgctgagcagacaaggtcgcccgtctgtgtcgattaaggatcgtaccgattgttggcctgctgatctaggaccctttaactggccacatacctcatcatgggtaagcctgaacccagctattccaaacatgaaaagacaatcgcacactgggagtggagagatggcgagagtgacacataccctcttggcaacggaccacctaaaaggggtggtgtgctctcgggtggcgcggacctgttcatgtggtggaggattcgtgggaatggtagacatgtgcaaaagagttaagggaagcatatgtcgtgtggttggagatccccagctgggtattaatcgattcggatcgccagacttctcggatatgaagactggatcactgccctgcatcgtagtttaataagtgaaacatgattgtgatttggttaaaaggaagctagtgtaggacaagtgaatgctctagattaggcaaatctagattcaggaaaagtacttaacttgtgaagtaaaagtttggcataaggatccactactagtaagctcttctgcaaaaattgagtccttgattcttgacaagtcttatcttgaatccttttaaaaccagcatacccttgaaagtcttttctttagtcgggtaagtcttgctgagtacttgcgtacttagggttttacccattgttgctgtaggtttcgagtcacttgattgtgattggtgttaagcgccggtgggcacgaccttcttataagtctaagtaactcttctatacttcttattgagaatggtcacttgagctagcatatatttcaaaactacaaataatttataacagttcaaagttatttctttgagtcacttttgtaatcactccgatcatgtacaatgtaaacttgacgtaacttgtaaaatttggtaataagatttccgctgcaaattattggtgtgtgatttgtgtttacttaatcttgtgatcctggttgtaagtggtttatccgaggtccttgggacactcggacatatcctgttaagttatctggtgcacatgcatagccgtctgaggtctttgagacacggacaggtgcatgtgggcccaataacttgggaggttctaccacagatggaggctttaaaatcactatccatatactcaacatagtccctagtaaatcagtatccaaaactccatatgagttgtggaatgacagaaagcccacgctcaactactttcacatatggggttgtccagcagaagctagaatatttaatcctggacagaaaaagctagatgatagaaccactagcttccattttattggctaccctgagagatcaaaaggttacagattctactgtctaggtagacaaaccaagtttatagaaaccatacatgccatttttctagagggtgacatgatcaaggggagcaaggtactcagagaggttgacctttacgaaagaggacgtatgtaccgattctaatggttaaaaaaccatacttctcgatacctattgtggttccaccaatggttgtaacgatgaggtgaaacccctattgcaaatgttgcatcacccagtgcagctactatagagcaagtttcttcaccttctgcgtagcctggcccttctgagtcggtcgcacaggagagttcacaagacagtggtagtgttgcgccaagtgacacactattgtaggagccccagaacaaaccagaactagaaccaagtctaaaaaggtctctatggtccagacgatctgtgattcctgacgactatgaagtttacgaaagtgtagaaacagaatgtgatgagatttatatgagcgaggacattgatgtagaaggtgatcccactacatatgaagaagctatgataagtgaaaattcaaccaaatggtttttagacatggaagatgaattggaatccatgagaataaacaaagtttgggacttagaggtcattccctaaagagccaaaatagtaggctgtaagtgggtctacaagaccaaacgtgacgccaaagggaatgtagaaaggtacaaggctagacttgtggccaaggggttcacacagagagaatacattgactaccatgaaaccttctcacctgtatcaacgaaagattcattccggatcattatggcattagtggaccattttgatctagatctccaccagatggatgtaaaaataacattcttatatagagagttagtagaaaaacgttttcatggcacaaccaaagggtttcgtcatgcgcggtaaagaacatatgggatgtcacctaaggaggtccatttatggattaaaacaagcctctagactgtggtacatcaagtttgatcagactatcagaaagtttggttttcaaggaaaacgaggaagacaattgcatttatgcaaagtttaagaaaggaaaattccttgttctatatgccgatgacatacttttaggtagtagtgataatgatatactggcggaaacagacatgtttctttcctcgaactttgatatgaaagatatgggagaagcctcttaagttctagaaatagaatttcacagagatagacataagggagtattagaactctcacagaagtcatatatagaaaagtaataaagaattacagtatgcatcagtgtaaggccacgcctgcgccaatagtcaagggtgataagtttgggaattatcaatgtccctagaatcagtgtcagaaagatcagatgaagtcagtaccatatgtttctactattggaagcattatgtatgctcaaatatatattcgcctaacttagaatttactaccgagttgcttgggagatataaaatcaacacaggcatagaacactgtaaacaattaagaaggctctaaagtacgtgcaaggtactaaaaggtctcatgctaacatacaaaagatgtagttccctatgaatagttggttgtgcagatgccgactgatgaggttgtaaagatagactgaagtctactttagggtatgtacactctctaggggagttatttcttagaaaagttgcaaacagacaacgagatcatcgtcgataatggacgctgagtttgtagccatatatgaggcaaatgggcaggcattatggatgaagaaattcgtacccgaattaagagtggttgatagcatagagcgatcactgagaatttactgcgataatgagcctacggtattttactcctataacaacaagtcaagttctttgtcatttagtgttatgttgttaaggagaaaattcaggatcaaaccataaaagttgagcataatagaagatagcaatgttagcggatcgctcacaaaaggccttccacccaacgtgttaagacaacatgtagccgacatgggtttaagggagtgcatatgatcttgattcacaggggctacaaattgcaacctaataaagtatcttttcgttctgaagcaggggatcatgttgtagtcattgagtgtggtgatacttaatcggtcattgtcacacattggtctctatgtgtaaacttgtcaagggatggaatcccaaacgttgagtataaggaatgtagagaacaaaggagagattgttgggtgtgtcctctacacccagtcatcagtgactggatttggattaacccaatcgtccatctccttaatcaggcccttgatttggagggtccacgctaacctcggttggagccacctgtcacacgacgctatataaaggattaagggtcgtaggaaattaaagccaacactagtatcttgccctaaacccaaatccacagacaggaccctatcgcctaggcgttggagtgactggaagaacgacaactctaatggcggcctcgaatctcgacgactgagccacctctagcaggaatggaggaggtggtggagaggattgaatccatctccaccactgtaaggcaacaatatgtcgtcctaatcacctctgtttatgtgttcacagtgagagcacacgcgtagattcactactgttcattcaagtaacctcagatcgactaagtgtgacccagcaaagatcccatagaaccagtggcggagttagaatctctttaagtatagggccgaatataacactgaaaacgatgtatagacctttagacaccaaaaactagctctttggacaacagtcacagctaaccatacttgccagtatatggacctttagagactatttggtccaaaagtaagacacaggccctactagccataggcctatctccgccaatgttttaaatcaccggagatcgctgccgctatcgccggagatcgcttctggcaaacaatgccgctaggagattacaattctgccgctattgcttgctgaccgctattagccgctattagccggtgaaatccgttaaatgggccatcttctagcggcagctaaatcaaacctgggccattttcttgcgcgcgtccgacccagcccattatctccctctaccttttct

SEQ ID NO: 27898 - DNA, 1585 bp, Zea Mays
tcaccatcatgctaatcttttatggtgtcaactgtcaagcaaatgctgctccacttaacacacatcgtatttgtggtttgattgaactgatgtgctgacttgtcaactttctcaaaatccatgttgaaaattaagataccagaaaacaaattgtcttggatggcccacggagttgtggtaaaagcattgcacttgcgatgcttgtccattgggcgcgtactgaaggatggctggtattttatgttccacaagggaaggattggactcatggaggattcttttatagaaacacatacagtgattttttcgatacaccagtacaggctgccaatatcttgcagaattttttgaagtacaatgaaacacgtttacaacagttaccatgccaaatttttgagcgtattcccctgggagaaggtgctggtgttggaatgatgaaaggggttgacacaatggaaatgcctgaagggtccacattatatgatctcattcaaactgggataactcaaacacatgcttcagttggtgttatggttcgcttaaggaaggagctgtcccttgttaaagacgtgcctgtactatttgccattgatcagtacaatagctggttcacattcagtgacttccaggaacctgtaactgtccgatcctgtcgatcgatccatgcaaaagagcttacaatggtcaatgcttatagatcaatgctgcacaatgatatgatggtgggggctttttcacactcaacagcagttggcaaactacggcaggagctgccagatgttccttctgatgctcgtttgatctttccacgttacaccttagatgaagctgagactgcatgtcactattatatgaggcaaaagatcattcggcgcgagaatttttcagaagagaaatggaaaaagatatactacttatcaaatggaaatggtgcagagatgagatggcttgctgccttcgtttgagtttctgatacctggattgtactcagttttggtggtggtgtagaaaggttgccacctctgtttcagcattccgttacacaccacagttcattgttgtgtacttgtagtccgtctcttgacatctctagaagaaagtttggcgtcaacatcatttgtgctgagtagaacttgaggagataaggcataagtatgtggctcagttacatgattatatccttaggcttctttcagttctcgctcagatgctagatacaaaataatgtagcattgttattggagaagttttcacatgttttggctccgccgagcacgatgagtatgatgagttgatgccaatctactcagcatgcttgctactatgttgctgaattgagctccgttgagtattttttttaaattactgtacgaatcgaacaattatttgagttgggaacaatattcttctttgcggaactcaaaggttacgaggcatatcctcagtttgaatagtttagcttacccttgtttcctcagtttgaatagtttagcttacccttgtttctcggagagatgcaacatattgatttagctacattgtctattccggtgtactcctatgccgtttatcgattttccttctg

SEQ ID NO: 27899 - DNA, 2077 bp, Zea Mays
gctcctaacccttctcccctccgacggtctaaaccctgccgccgaaatgctcctccgccctttcctccgccgcggcgccgccgccgccgccgccgcggtatcctctaacggggctcgcgccatagcactccccgacccgcctgccgctctcgcctcccttttactcgcctcccgatcctacgcgaaggccaagggcgggggcaagccggcgtcgtccacgtcaaaccgcggcaaggtccgcgccaaggacccgcgcggggtggcgtcggccgatgatgccgcgggagccgaattctccgccggaggtgggggcgacgacattgacaccgagttcgagctgcccaccgacccgctgccccctacatatgatccagctctcgacgtcggccccggcggccgcccgctcttcgctttcactgacacgttcgggtccttcgcccaccgtgacgcgaacatctatgtcgacttcacaagggctgccagcagggatgatgaaagagtttcaggagacaagacggtgtgctgtgatggtgaggaaaagcttcctagatctccgggataacttccgtaggattgttgatccagctgttacaacaaacctcaaagataccagaaaacaaattgtcttggatggcccacggagttgtggtaaaagcattgcacttgcgatgcttgtccattgggcgcgtactgaaggatggctggtattttatgttccacaagggaaggattggactcatggaggattcttttatagaaacacatacagtgattttttcgatacaccagtacaggctgccaatatcttgcagaattttttgaagtacaatgaaacacgtttacaacagttaccatgccaaatttttgagcgtattcccctgggagaaggtgctggtgttggaatgatgaaaggggttgacacaatggaaatgcctgaagggtccacattatatgatctcattcaaactgggataactcaaacacatgcttcagttggtgttatggttcgcttaaggaaggagctgtcccttgttaaagacgtgcctgtactatttgccattgatcagtacaatagctggttcacattcagtgacttccaggaacctgtaactgtccgatcctgtcgatcgatccatgcaaaagagcttacaatggtcaatgcttatagatcaatgctgcacaatgatatgatggtgggggctttttcacactcaacagcagttggcaaactacggcaggagctgccagatgttccttctgatgctcgtttgatctttccacgttacaccttagatgaagctgagactgcatgtcactattatatgaggcaaaagatcattcggcgcgagaatttttcagaagagaaatggaaaaagatatactacttatcaaatggaaatggtgcagagatgagatggcttgctgccttcgtttgaggtagatatactgtccctgaagtttctgatacctggattgtactcagttttggtggtggtgtagaaaggttgccacctctgtttcagcattccgttacacaccacagttcattgttgtgtacttgtagtccgtctcttgacatctctagaagaaagtttggcgtcaacatcatttgtgctgagtagaacttgaggagataaggcataagtatgtggctcagttacatgattatatccttaggcttctttcagttctcgctcagatgctagatacaaaataatgtagcattgttattggagaagttttcacatgttttggctccgccgagcacgatgagtatgatgagttgatgccaatctactcagcatgcttgctactatgttgctgaattgagctccgttgagtattttttttaaattactgtacgaatcgaacaattatttgagttgggaacaatattcttctttgcggaactcaaaggttacgaggcatatcctcagtttgaatagtttagcttacccttgtttcctcagtttgaatagtttagcttacccttgtttctcggagagatgcaacatattgatttagctacattgtctattccggtgtactcctatgccgtttatcgattttccttctg

SEQ ID NO: 27900 - DNA, 2059 bp, Zea Mays
gtccaatcaggctcctaacccttctcccctccgacggtctaaaccctgccgccgaaatgctcctccgccctttcctccgccgcggcgccgccgccgccgccgccgcggtatcctctaacggggctcgcgccatagcactccccgacccgcctgccgctctcgcctcccttttactcgcctcccgatcctacgcgaaggccaagggcgggggcaagccggcgtcgtccacgtcaaaccgcggcaaggtccgcgccaaggacccgcgcggggtggcgtcggccgatgatgccgcgggagccgaattctccgccggaggtgggggcgacgacattgacaccgagttcgagctgcccaccgacccgctgccccctacatatgatccagctctcgacgtcggccccggcggccgcccgctcttcgctttcactgacacgttcgggtccttcgcccaccgtgacgcgaacatctatgtcgacttcactttggatgaatggaatgccatgttaccagaagggctgccagcagggatgatgaaagagtttcaggagacaagacggtgtgctgtgatggtgaggaaaagcttcctagatctccgggataacttccgtaggattgttgatccagctgttacaacaaacctcaaagataccagaaaacaaattgtcttggatggcccacggagttgtggtaaaagcattgcacttgcgatgcttgtccattgggcgcgtactgaaggatggctggtattttatgttccacaagggaaggattggactcatggaggattcttttatagaaacacatacagtgattttttcgatacaccagtacaggctgccaatatcttgcagttaccatgccaaatttttgagcgtattcccctgggagaaggtgctggtgttggaatgatgaaaggggttgacacaatggaaatgcctgaagggtccacattatatgatctcattcaaactgggataactcaaacacatgcttcagttggtgttatggttcgcttaaggaaggagctgtcccttgttaaagacgtgcctgtactatttgccattgatcagtacaatagctggttcacattcagtgacttccaggaacctgtaactgtccgatcctgtcgatcgatccatgcaaaagagcttacaatggtcaatgcttatagatcaatgctgcacaatgatatgatggtgggggctttttcacactcaacagcagttggcaaactacggcaggagctgccagatgttccttctgatgctcgtttgatctttccacgttacaccttagatgaagctgagactgcatgtcactattatatgaggcaaaagatcattcggcgcgagaatttttcagaagagaaatggaaaaagatatactacttatcaaatggaaatggtgcagagatgagatggcttgctgccttcgtttgagtttctgatacctggattgtactcagttttggtggtggtgtagaaaggttgccacctctgtttcagcattccgttacacaccacagttcattgttgtgtacttgtagtccgtctcttgacatctctagaagaaagtttggcgtcaacatcatttgtgctgagtagaacttgaggagataaggcataagtatgtggctcagttacatgattatatccttaggcttctttcagttctcgctcagatgctagatacaaaataatgtagcattgttattggagaagttttcacatgttttggctccgccgagcacgatgagtatgatgagttgatgccaatctactcagcatgcttgctactatgttgctgaattgagctccgttgagtattttttttaaattactgtacgaatcgaacaattatttgagttgggaacaatattcttctttgcggaactcaaaggttacgaggcatatcctcagtttgaatagtttagcttacccttgtttcctcagtttgaatagtttagcttacccttgtttctcggagagatgcaacatattgatttagctacattgtctattccggtgtactcctatgccgtttatcgattttccttctg

SEQ ID NO: 27901 - DNA, 2617 bp, Zea Mays
gtccaatcaggctcctaacccttctcccctccgacggtctaaaccctgccgccgaaatgctcctccgccctttcctccgccgcggcgccgccgccgccgccgccgcggtatcctctaacggggctcgcgccatagcactccccgacccgcctgccgctctcgcctcccttttactcgcctcccgatcctacgcgaaggccaagggcgggggcaagccggcgtcgtccacgtcaaaccgcggcaaggtccgcgccaaggacccgcgcggggtggcgtcggccgatgatgccgcgggagccgaattctccgccggaggtgggggcgacgacattgacaccgagttcgagctgcccaccgacccgctgccccctacatatgatccagctctcgacgtcggccccggcggccgcccgctcttcgctttcactgacacgttcgggtccttcgcccaccgtgacgcgaacatctatgtcgacttcactttggatgaatggaatgccatgttaccagaagggctgccagcagggatgatgaaagagtttcaggagacaagacggtgtgctgtgatggtgaggaaaagcttcctagatctccgggataacttccgtaggattgttgatccagctgttacaacaaacctcaaagataccagaaaacaaattgtcttggatggcccacggagttgtggtaaaagcattgcacttgcgatgcttgtccattgggcgcgtactgaaggatggctggtattttatgttccacaagggaaggattggactcatggaggattcttttatagaaacacatacagtgattttttcgatacaccagtacaggctgccaatatcttgcagaattttttgaagtacaatgaaacacgtttacaacagttaccatgccaaatttttgagcgtattcccctgggagaaggtgctggtgttggaatgatgaaaggggttgacacaatggaaatgcctgaagggtccacattatatgatctcattcaaactgggataactcaaacacatgcttcagttggtgttatggttcgcttaaggaaggagctgtcccttgttaaagacgtgcctgtactatttgccattgatcagtacaatagctggttcacattcagtgacttccaggaacctgtaactgtccgatcctgtcgatcgatccatgcaaaagagcttacaatggtttgttgcactgagatacttcaccttgttcaagcaacacattcttttatgtccttcagaaacctactttgaaagtaacaaatatttgcacacccattctgcttatttgcatgtattttttggttgtgatgtagtaaaaattgttacgttccttacacttttctatgcgttaattatcttgtcttgtgtaacatttcatggactctgttttgttgcctaataagtaaatatacagtttctgagcgacttatatttttgtaaagataaacatatgaatctgtattagccttttttactgcttggtggagatcttgggacatgtgtaagatgtacgatgcctagcatcatctgttcgcttggctttaatccgtaccggcttctactactttcacaatgtttttgtctctattgattgcagctgcagcagtccaaacagccggctttaatccgagcgctttttttaacactagtaatcagttccctggacatacacatttaatgtttcacttgcactataaacaggtcaatgcttatagatcaatgctgcacaatgatatgatggtgggggctttttcacactcaacagcagttggcaaactacggcaggagctgccagatgttccttctgatgctcgtttgatctttccacgttacaccttagatgaagctgagactgcatgtcactattatatgaggcaaaagatcattcggcgcgagaatttttcagaagagaaatggaaaaagatatactacttatcaaatggaaatggtgcagagatgagatggcttgctgccttcgtttgagtttctgatacctggattgtactcagttttggtggtggtgtagaaaggttgccacctctgtttcagcattccgttacacaccacagttcattgttgtgtacttgtagtccgtctcttgacatctctagaagaaagtttggcgtcaacatcatttgtgctgagtagaacttgaggagataaggcataagtatgtggctcagttacatgattatatccttaggcttctttcagttctcgctcagatgctagatacaaaataatgtagcattgttattggagaagttttcacatgttttggctccgccgagcacgatgagtatgatgagttgatgccaatctactcagcatgcttgctactatgttgctgaattgagctccgttgagtattttttttaaattactgtacgaatcgaacaattatttgagttgggaacaatattcttctttgcggaactcaaaggttacgaggcatatcctcagtttgaatagtttagcttacccttgtttcctcagtttgaatagtttagcttacccttgtttctcggagagatgcaacatattgatttagctacattgtctattccggtgtactcctatgccgtttatcgattttccttctg

SEQ ID NO: 27902 - DNA, 2035 bp, Zea Mays
agacgacccaggaagagtccaatcaggctcctaacccttctcccctccgacggtctaaaccctgccgccgaaatgctcctccgccctttcctccgccgcggcgccgccgccgccgccgccgcggtatcctctaacggggctcgcgccatagcactccccgacccgcctgccgctctcgcctcccttttactcgcctcccgatcctacgcgaaggccaagggcgggggcaagccggcgtcgtccacgtcaaaccgcggcaaggtccgcgccaaggacccgcgcggggtggcgtcggccgatgatgccgcgggagccgaattctccgccggaggtgggggcgacgacattgacaccgagttcgagctgcccaccgacccgctgccccctacatatgatccagctctcgacgtcggccccggcggccgcccgctcttcgctttcactgacacgttcgggtccttcgcccaccgtgacgcgaacatctatgtcgacttcactttggatgaatggaatgccatgttaccagaagggctgccagcagggatgatgaaagagtttcaggagacaagacggtgtgctgtgatgataccagaaaacaaattgtcttggatggcccacggagttgtggtaaaagcattgcacttgcgatgcttgtccattgggcgcgtactgaaggatggctggtattttatgttccacaagggaaggattggactcatggaggattcttttatagaaacacatacagtgattttttcgatacaccagtacaggctgccaatatcttgcagaattttttgaagtacaatgaaacacgtttacaacagttaccatgccaaatttttgagcgtattcccctgggagaaggtgctggtgttggaatgatgaaaggggttgacacaatggaaatgcctgaagggtccacattatatgatctcattcaaactgggataactcaaacacatgcttcagttggtgttatggttcgcttaaggaaggagctgtcccttgttaaagacgtgcctgtactatttgccattgatcagtacaatagctggttcacattcagtgacttccaggaacctgtaactgtccgatcctgtcgatcgatccatgcaaaagagcttacaatggtcaatgcttatagatcaatgctgcacaatgatatgatggtgggggctttttcacactcaacagcagttggcaaactacggcaggagctgccagatgttccttctgatgctcgtttgatctttccacgttacaccttagatgaagctgagactgcatgtcactattatatgaggcaaaagatcattcggcgcgagaatttttcagaagagaaatggaaaaagatatactacttatcaaatggaaatggtgcagagatgagatggcttgctgccttcgtttgagtttctgatacctggattgtactcagttttggtggtggtgtagaaaggttgccacctctgtttcagcattccgttacacaccacagttcattgttgtgtacttgtagtccgtctcttgacatctctagaagaaagtttggcgtcaacatcatttgtgctgagtagaacttgaggagataaggcataagtatgtggctcagttacatgattatatccttaggcttctttcagttctcgctcagatgctagatacaaaataatgtagcattgttattggagaagttttcacatgttttggctccgccgagcacgatgagtatgatgagttgatgccaatctactcagcatgcttgctactatgttgctgaattgagctccgttgagtattttttttaaattactgtacgaatcgaacaattatttgagttgggaacaatattcttctttgcggaactcaaaggttacgaggcatatcctcagtttgaatagtttagcttacccttgtttcctcagtttgaatagtttagcttacccttgtttctcggagagatgcaacatattgatttagctacattgtctattccggtgtactcctatgccgtttatcgattttccttctg

SEQ ID NO: 27903 - DNA, 3552 bp, Zea Mays
ttttattaaatttgttttgaatttcgggctatgatgtgaatttcgggccctgatgtaaatttcgggcaaaaaactgaatttcgggccaaaaattgaatttcgggctctaatgtgaatttcgggcttttataatttcgggccgtccgaaatgagtctgacatgtttaagcaattacgggtcgggtcgtaggctaggtccgtgggctgggccagcccagcccgaaattcaaatgagctgagccggcccgaaattcaaacaatacgagtcttttcgggcttgggccgggccggatggtccgaatgtacacctatagccatggtttgtactggcgagcaaaaggtaaaaaaaacaagaataatccttttaggatcaaaagtatttttttgaaaagattaaattgcagaaaaaaacggtccggtaccccttgcctgtctctcccagtcgtttcccgggggcgctagattcagatccatgccgcacgcttctccattcctgtaagctcctgcgcctcctcctcgttgcttcactccaaatccaccgaggccaccgcccgggcccgggggaacccctagcgccgccgccggctcgggcgccctctcgcgcgcgcgtgcgtcgctccgacagcagctgcagccatggcgcagccgctcgtcgtgaagaaggacgacgacctcgacgaggaagagtactactcgccattcctgggcatagagaagggcgccgtgctgcaggaggcccgcgtcttccacgaccctcagcttgacgctcgtcgatgctgccaggttatcaccaagctcctgtacctgctcaaccagggtgacacctttaccaaggttgaggctacagaggtcttctttgcaaccaccaagctgttccagtctaaagatgtgggccttaggaggatggtgtacctcatgatcaaggaactctcaccttccgccgatgaggtcatcatagtaacaagctctttgatgaaggacatgaatagcaaaaccgatatgtaccgtgcaaacgctattagagttctttgtcgtattatcgactcaactcttctcacccaaatcgagaggtatttgaagcaagccattgttgacaagaatcctgttgttgccagtgcagcccttgttagtggcatctacttgcttcaaacaagtccggaagttgtaaaaagatggagcaatgaagttcaagaggctgtgcagtcaagagctgctcttgtgcagtttcatgcccttgctctccttcaccaaattagacaaaatgatcggctggctgtcagtaaacttgtcactagcttgaccaggggttcagttcgctctcctttggcccagtgcctacttattcgctacactagccaggtgattagagagtctggtgtgaaccaaggtggagatcgtcctttctttgatttccttgagtcctgtctccggaacaaagctgaaatggtcatacttgaggctgcaagagcaattactgaactgaatggtgtcacaagccgagagcttacacctgcaattactgtgctgcagttgtttttaagttcatccaaacctgttctcagatttgctgctgttcgcacgcttaacaaggttgcatcaactcatcctttggctgtcacaaattgtaacatagacatggagagcttaatctctgatcagaacaggagcattgcaacccttgcgattacaacactgttgaagacaggcaacgaatcaagtgttgatcgtttaatgaaacagatgaccaactttatgtcagacatagctgatgagtttaagattgttgttgttgaagcaataagatctctgtgcttgaagttccctctgaaatatcgctcattgatgaacttcttgagtaatattctacgggaagagggtggattcgagtataagaaagccatagttgattcaattattatactcattagagatattcctgatgcaaaggaaagcggtttatttcacttatgcgaattcatagaagattgtgaattcacctatttgtccactcagatacttcactttttgggaaatgaaggcccaaaaacatcagatcccagtaaatacatacgctatatatacaatagggtgatacttgaaaatgctacagttcgagctagtgcagtcagcacattggcaaagtttggtgccttggttgactcactcaagcctcgcatatttgtgctcctgagacgctgcctgtttgatggtgatgacgagagcaaccctttacctcaaattgttaggtggggaagctacagttggtgagacagagaaggatgtgaatgaatttctcttcggctcacttgatgttccattagtgaacatggagacgagtctgcggaattatgaaccttcggatgtaccttttgatatttcatctgttccgaaggagacaaaatcccaaccccttgcggagaaaaagtctacaggcaagaaatcagcaggtccggcatctgctgtcagtgaccctgtttctacagttgatgcttcgtatgagaagcttctttcgtccattcccgaattcgctgattttggaaagctttttaagtcatctgcacctgtagaattgactgaagctgagactgaatactcagttaatgttgtgaagcatatttttgatggacatgttgtgctccaatacaactgtaccaatacaattcctgaacaattgcttgaacaggttattgtttttgttgatgcttctgaggctgatgaatttttagaagttgcttcgaagcctttagaatcattaccatatgattctcctgggcagacctttgtcgcttttgagaagccagaaggtgtcattgctactggcaagttctcaaatatcctgaaattcattgttaaggaggttgatccatccacgggtgaaactgaagatgatggtgttgaggatgagtaccagcttgaagatcttgaaatagtttctgctgattatatgttgaaggtgggagtatctaacttccgaaatgcctgggaaaacatggatccagagactgagcgagttgatgagtatgggcttggagtaagggagagcttggctgaggctgtaagtgctgttataagcatccttggcatgcagccttgtgaggggactgacgtggtcccaagcaattcaaggtcgcacacttgtctgctctctggtgtgtttattggcaacgtgaaagtcttggtgagactttcatttggaatcagtgcaccgaaggaggtggccatgaagctggcagttagatctgatgatccagagatcagtgacaagatccacgaaattgtcgctaatggctaaaaacaatagtagaatcgttttttttactctttttttgttttgacttgcatgctacgggaagcttgaggggattcaattaattctagtatatgtaagtctggtttccagttgaatccatcatttgtcgcaccatcattcttcctttgacagtgcatcagtttttttttggttgatttggatctgtacaattttccttatgtactgatgcttataatagtatacgcaataatattcaggtacagttttgatggtaaaatgaag

SEQ ID NO: 27904 - DNA, 3421 bp, Zea Mays
ttttattaaatttgttttgaatttcgggctatgatgtgaatttcgggccctgatgtaaatttcgggcaaaaaactgaatttcgggccaaaaattgaatttcgggctctaatgtgaatttcgggcttttataatttcgggccgtccgaaatgagtctgacatgtttaagcaattacgggtcgggtcgtaggctaggtccgtgggctgggccagcccagcccgaaattcaaatgagctgagccggcccgaaattcaaacaatacgagtcttttcgggcttgggccgggccggatggtccgaatgtacacctatagccatggtttgtactggcgagcaaaaggtaaaaaaaacaagaataatccttttaggatcaaaagtatttttttgaaaagattaaattgcagaaaaaaacggtccggtaccccttgcctgtctctcccagtcgtttcccgggggcgctagattcagatccatgccgcacgcttctccattcctgtaagctcctgcgcctcctcctcgttgcttcactccaaatccaccgaggccaccgcccgggcccgggggaacccctagcgccgccgccggctcgggcgccctctcgcgcgcgcgtgcgtcgctccgacagcagctgcagccatggcgcagccgctcgtcgtgaagaaggacgacgacctcgacgaggaagagtactactcgccattcctgggcatagagaagggcgccgtgctgcaggaggcccgcgtcttccacgaccctcagcttgacgctcgtcgatgctgccaggttatcaccaagctcctgtacctgctcaaccagggtgacacctttaccaaggttgaggctacagaggtcttctttgcaaccaccaagctgttccagtctaaagatgtgggccttaggaggatggtgtacctcatgatcaaggaactctcaccttccgccgatgaggtcatcatagtaacaagctctttgatgaaggacatgaatagcaaaaccgatatgtaccgtgcaaacgctattagagttctttgtcgtattatcgactcaactcttctcacccaaatcgagaggtatttgaagcaagccattgttgacaagaatcctgttgttgccagtgcagcccttgttagtggcatctacttgcttcaaacaagtccggaagttgtaaaaagatggagcaatgaagttcaagaggctgtgcagtcaagagctgctcttgtgcagtttcatgcccttgctctccttcaccaaattagacaaaatgatcggctggctgtcagtaaacttgtcactagcttgaccaggggttcagttcgctctcctttggcccagtgcctacttattcgctacactagccaggtgattagagagtctggtgtgaaccaaggtggagatcgtcctttctttgatttccttgagtcctgtctccggaacaaagctgaaatggtcatacttgaggctgcaagagcaattactgaactgaatggtgtcacaagccgagagcttacacctgcaattactgtgctgcagttgtttttaagttcatccaaacctgttctcagatttgctgctgttcgcacgcttaacaaggttgcatcaactcatcctttggctgtcacaaattgtaacatagacatggagagcttaatctctgatcagaacaggagcattgcaacccttgcgattacaacactgttgaagacaggcaacgaatcaagtgttgatcgtttaatgaaacagatgaccaactttatgtcagacatagctgatgagtttaagattgttgttgttgaagcaataagatctctgtgcttgaagttccctctgaaatatcgctcattgatgaacttcttgagtaatattctacgggaagagggtggattcgagtataagaaagccatagttgattcaattattatactcattagagatattcctgatgcaaaggaaagcggtttatttcacttatgcgaattcatagaagattgtgaattcacctatttgtccactcagatacttcactttttgggaaatgaaggcccaaaaacatcagatcccagtaaatacatacgctatatatacaatagggtgatacttgaaaatgctacagttcgagctagtgcagtcagcacattggcaaagtttggtgccttggttgactcactcaagcctcgcatatttgtgctcctgagacgctgcctgtttgatggtgatgacgaggtgcgcgacagagcaaccctttacctcaaattgttaggaaccttcggatgtaccttttgatatttcatctgttccgaaggagacaaaatcccaaccccttgcggagaaaaagtctacaggcaagaaatcagcaggtccggcatctgctgtcagtgaccctgtttctacagttgatgcttcgtatgagaagcttctttcgtccattcccgaattcgctgattttggaaagctttttaagtcatctgcacctgtagaattgactgaagctgagactgaatactcagttaatgttgtgaagcatatttttgatggacatgttgtgctccaatacaactgtaccaatacaattcctgaacaattgcttgaacaggttattgtttttgttgatgcttctgaggctgatgaatttttagaagttgcttcgaagcctttagaatcattaccatatgattctcctgggcagacctttgtcgcttttgagaagccagaaggtgtcattgctactggttgatccatccacgggtgaaactgaagatgatggtgttgaggatgagtaccagcttgaagatcttgaaatagtttctgctgattatatgttgaaggtgggagtatctaacttccgaaatgcctgggaaaacatggatccagagactgagcgagttgatgagtatgggcttggagtaagggagagcttggctgaggctgtaagtgctgttataagcatccttggcatgcagccttgtgaggggactgacgtggtcccaagcaattcaaggtcgcacacttgtctgctctctggtgtgtttattggcaacgtgaaagtcttggtgagactttcatttggaatcagtgcaccgaaggaggtggccatgaagctggcagttagatctgatgatccagagatcagtgacaagatccacgaaattgtcgctaatggctaaaaacaatagtagaatcgttttttttactctttttttgttttgacttgcatgctacgggaagcttgaggggattcaattaattctagtatatgtaagtctggtttccagttgaatccatcatttgtcgcaccatcattcttcctttgacagtgcatcagtttttttttggttgatttggatctgtacaattttccttatgtactgatgcttataatagtatacgcaataatattcaggtacagttttgatggtaaaatgaag

SEQ ID NO: 27905 - DNA, 758 bp, Zea Mays
gccgcatctccttccctcacactgctctcacttgagcaccgccggatttgtggctccgctccttccctctctcttgctgctgctcccttggatcgatctctgtcgtgtccccctcctggatcagccgctgctgctgcagctgcagatgatccaggcggtgctgcgcgctgcccgccgacatctgatttgacggggatgagaggggaggtagctcaatggtcttcctgtgtccttccgggcgacgattggttcatggatgtctcccaagaagttgtcagcatgatcagtggaaggggtagagttgctaatggtgacagggaagtaaacagcccaacggcctcagtttcagcgcactccatttcttcgttcaaatcccatggcagctcctagtttgcaagtcggtattctttgtaggcaggtcattgtataataatcattagtatattctttcaacctattcctccactcatttgttttttcttttctttttcagaacttttgtgatagtatagtatagatggataattgtttgacctaggaaaataaatcttttttagtaattttgttttagggtgtgtttggttgaggagtggttccattccattttttggttgttcggttttcaataaaaataatagcggagtggctcttgtatctttatatgaaaatttactataaatagttggaacgctatcgctccataaaaacgaccggatgtgagcggtcgctctcgctccataaaaacgaccggatgtaag

SEQ ID NO: 27906 - DNA, 2552 bp, Zea Mays
atcgggatttggatgcttcactcgtctagacgaagaatttttataatggaaataagacatttgtgttcttatctccaagacctaaagaaggcttcagctgaagaaatgcgtagaagtgtttacgcaaattatgctgcattcatcagaacatctaaggagatatcagaccttgaaggggaactgttgtcaattagaaatctgcttaatacacaggcagctttaattcacggtctatctgaaggagttcagatagattcattaacttcaggccctgaaggttctgcagaagacgacatatccaaggttgaagatcaggagccttcagaaattcagaaatggtctgcagattttcctgacatgcttgacgttttgctagctgagcgaagagtggatgaagcactggatgcactggatgaagcagaacgggttgctgttgatgcaaaacgaaaacagactctaactgcagctgaagtttcggctttgaaaagatctatctctgataatcggcagaggctggcagatcagcttgctgaagctgcttgtcagtcttctactcgtggtattgagcttcgagctgcagcttctgccctcaaaagacttggtgatggcccccgagctcacagcctcttactgagtgcacataatcaaaggcttcaatgcaatatgcaaactatacatccatctagtacttcatatggtggggcatacactgcggcacttgcccaacaggttttttcagtcatagctcaggcactaagtgactctgtggatgtttttggtaatgagtcatgttatgcatctgaactggtaacgtgggctaccaagcaggttatgtcctttgcgctcctggtgaagaggcatgtgttgtcctcttgtgcagctgctggaggcttgagggcagctgcagaatgtgttcagatatcacttggccattgttttttgctggaagctcgtggtctgtctgtttcctctgttctcctcaaacaattcaagcccagtttagtgcaagcattagatgctaacttgaggagaattgaggagagtactgctgcactagcagcagctgataactggatactcacatatcccctaactggtattcgtccattaactagatcgtctgctgctaatttggcacttcagccaaagctctctagtagcgcacaccgtttcaattcaatggttcaggatttctttgaggacattgcaccactacttagcttgcaattgggtggttcatcaatggatgggatcacacaaattttcaattcatatgtaaacttgcttataagtgctttacctggttctatggatgatgaagctaacttagatggtttaggtaataagattgttagaatggcagagactgaagagcagcagttagctttattagctaatgcatctttactagctgaggagttgctacctagagcagctatgaagttatcgtcaataaaccagtctatggatgatttgcataaaagaggaacagataaacaaaaccgtgtgcctgagcaacgtgagtggaaaagaaaactacaacgaatggtggacaggttgagagataatttttgcaggcagcatgctcttgaacttatatttacagatgaaggtgatactcatctcagtgcagaaatgtatatcagtatggacaatactgttgaagaaccagaatgggttccgtctccaattttccaggaactgtatgtaaagttaaacaggatggcaagcattgccgcagaaatgtttgttggtagagaaagatttgctactttactgatgatgcgcctcactgagacagtcatactgtggctctcagaagaccaggccttttgggaagagattgaacaaggagcaaagcctttaggccccctaggtctgcaacagttctacctggacatgcaatttgtcatcatatttgggcaaggtcgttttctctctagacatgtacatcaagtcattttggatgtcattgatagagcaatggctgcattttctgctactggaatgaaccctgatagtgtccttccgggcgacgattggttcatggatgtctcccaagaagttgtcagcatgatcagtggaaggggtagagttgctaatggtgacagggaagtaaacagcccaacggcctcagtttcagcgcactccatttcttcgttcaaatcccatggcagctcctagtttgcaagtcggtattctttgtaggcaggtcattgtataataatcattagtatattctttcaacctattcctccactcatttgttttttcttttctttttcagaacttttgtgatagtatagtatagatggataattgtttgacctaggaaaataaatcttttttagtaattttgttttagggtgtgtttggttgaggagtggttccattccattttttggttgttcggttttcaataaaaataatagcggagtggctcttgtatctttatatgaaaatttactataaatagttggaacgctatcgctccataaaaacgaccggatgtgagcggtcgctctcgctccataaaaacgaccggatgtaag

SEQ ID NO: 27907 - DNA, 2507 bp, Zea Mays
ctccccttcgttggttcgtttgattgattggggagcaacaactcccaccacccgcaaccgcagcaatctcccctcgccaactccgtctcggccgcaacccattcgccattgccgaggaggaggaagcccggtcgtctattctggatctcggatggcgtcggccaagtcgtcgcggtcgcggcccgcgggccactcgggggtgttcccggtgggcagcgccgccgcggtggggagcgggggcggcggtggcgacggcggggtgcagctcgccgacaagctcaagatcttcaaaaccgacaacttcgatcccgacgcctacgtgcagtccaagtgccagaccatgaacgagaaggaaataagacatttgtgttcttatctccaagacctaaagaaggcttcagctgaagaaatgcgtagaagtgtttacgcaaattatgctgcattcatcaggatttctttgaggacattgcaccactacttagcttgcaattgggtggttcatcaatggatgggatcacacaaattttcaattcatatgtaaacttgcttataagtgctttacctggttctatggatgatgaagctaacttagatggtttaggtaataagattgttagaatggcagagactgaagagcagcagttagctttattagctaatgcatctttactagctgaggagttgctacctagagcagctatgaagttatcgtcaataaaccagtctatggatgatttgcataaaagaggaacagataaacaaaaccgtgtgcctgagcaacgtgagtggaaaagaaaactacaacgaatggtggacaggttgagagataatttttgcaggcagcatgctcttgaacttatatttacagatgaaggtgatactcatctcagtgcagaaatgtatatcagtatggacaatactgttgaagaaccagaatgggttccgtctccaattttccaggtacttactggaacggctcgtttgggtcttcctcatgcaaatacctgagattttagataattttcagattattaacatatgctattgtatacttctaattccctttccaaactaacatctcagtctataagataccaactttttgaggccactgtacatattttcattctattgcttggatcaaatcctttatgcattataaccagtcattttaacatgatcatatacctaaaagcggacgtttgggactaaattaattgagcatatggacacaagttaatgcttttgggaaccatgtgttcaattcactagaatggattgggtttcatgtagaattctgaaagaaaaacctatattacccactttaattttgataattcttctagttgatccctggaatatattataaaaatcatattagcacaattttaacagcccaaggctgcactatcaaaatttgagtgacatagtcacacacacacacaaaggtaaaaaagagagtcatatgatcttaccactttgataaataggccttctctgttgcttatatccttcatattggatgtaatttgttaaggtagcaggtttcatggcgaagattcttttgtcttctttttttctttttttgcatatggcaagtgtatcatagataatacttgtatttggatgaatgtcatctgctgtttattacaggaactgtatgtaaagttaaacaggatggcaagcattgccgcagaaatgtttgttggtagagaaagatttgctactttactgatgatgcgcctcactgagacagtcatactgtggctctcagaagaccaggccttttgggaagagattgaacaaggagcaaagcctttaggccccctaggtctgcaacagttctacctggacatgcaatttgtcatcatatttgggcaaggtcgttttctctctagacatgtacatcaagtcattttggatgtcattgatagagcaatggctgcattttctgctactggaatgaaccctgatagtgtccttccgggcgacgattggttcatggatgtctcccaagaagttgtcagcatgatcagtggaaggggtagagttgctaatggtgacagggaagtaaacagcccaacggcctcagtttcagcgcactccatttcttcgttcaaatcccatggcagctcctagtttgcaagtcggtattctttgtaggcaggtcattgtataataatcattagtatattctttcaacctattcctccactcatttgttttttcttttctttttcagaacttttgtgatagtatagtatagatggataattgtttgacctaggaaaataaatcttttttagtaattttgttttagggtgtgtttggttgaggagtggttccattccattttttggttgttcggttttcaataaaaataatagcggagtggctcttgtatctttatatgaaaatttactataaatagttggaacgctatcgctccataaaaacgaccggatgtgagcggtcgctctcgctccataaaaacgaccggatgtaag

SEQ ID NO: 27908 - DNA, 1717 bp, Zea Mays
gtctccctccccttcgttggttcgtttgattgattggggagcaacaactcccaccacccgcaaccgcagcaatctcccctcgccaactccgtctcggccgcaacccattcgccattgccgaggaggaggaagcccggtcgtctattctggatctcggatggcgtcggccaagtcgtcgcggtcgcggcccgcgggccactcgggggtgttcccggtgggcagcgccgccgcggtggggagcgggggcggcggtggcgacggcggggtgcagctcgccgacaagctcaagatcttcaaaaccgacaacttcgatcccgacgcctacgtgcagtccaagtgccagaccatgaacgagaaggaaataagacatttgtgttcttatctccaagacctaaagaaggcttcagctgaagaaatgcgtagaagtgtttacgcaaattatgctgcattcatcaggatttctttgaggacattgcaccactacttagcttgcaattgggtggttcatcaatggatgggatcacacaaattttcaattcatatgtaaacttgcttataagtgctttacctggttctatggatgatgaagctaacttagatggtttaggtaataagattgttagaatggcagagactgaagagcagcagttagctttattagctaatgcatctttactagctgaggagttgctacctagagcagctatgaagttatcgtcaataaaccagtctatggatgatttgcataaaagaggaacagataaacaaaaccgtgtgcctgagcaacgtgagtggaaaagaaaactacaacgaatggtggacaggttgagagataatttttgcaggcagcatgctcttgaacttatatttacagatgaaggtgatactcatctcagtgcagaaatgtatatcagtatggacaatactgttgaagaaccagaatgggttccgtctccaattttccagtcatactgtggctctcagaagaccaggccttttgggaagagattgaacaaggagcaaagcctttaggccccctaggtctgcaacagttctacctggacatgcaatttgtcatcatatttgggcaaggtcgttttctctctagacatgtacatcaagtcattttggatgtcattgatagagcaatggctgcattttctgctactggaatgaaccctgatagtgtccttccgggcgacgattggttcatggatgtctcccaagaagttgtcagcatgatcagtggaaggggtagagttgctaatggtgacagggaagtaaacagcccaacggcctcagtttcagcgcactccatttcttcgttcaaatcccatggcagctcctagtttgcaagtcggtattctttgtaggcaggtcattgtataataatcattagtatattctttcaacctattcctccactcatttgttttttcttttctttttcagaacttttgtgatagtatagtatagatggataattgtttgacctaggaaaataaatcttttttagtaattttgttttagggtgtgtttggttgaggagtggttccattccattttttggttgttcggttttcaataaaaataatagcggagtggctcttgtatctttatatgaaaatttactataaatagttggaacgctatcgctccataaaaacgaccggatgtgagcggtcgctctcgctccataaaaacgaccggatgtaag

SEQ ID NO: 27909 - DNA, 2790 bp, Zea Mays
cgtctccctccccttcgttggttcgtttgattgattggggagcaacaactcccaccacccgcaaccgcagcaatctcccctcgccaactccgtctcggccgcaacccattcgccattgccgaggaggaggaagcccggtcgtctattctggatctcggatggcgtcggccaagtcgtcgcggtcgcggcccgcgggccactcgggggtgttcccggtgggcagcgccgccgcggtggggagcgggggcggcggtggcgacggcggggtgcagctcgccgacaagctcaagatcttcaaaaccgacaacttcgatcccgacgcctacgtgcagtccaagtgccagaccatgaacgagaaggaaataagacatttgtgttcttatctccaagacctaaagaaggcttcagctgaagaaatgcgtagaagtgtttacgcaaattatgctgcattcatcagaacatctaaggagatatcagaccttgaaggggaactgttgtcaattagaaatctgcttaatacacaggcagctttaattcacggtctatctgaaggagttcagatagattcattaacttcaggccctgaaggttctgcagaagacgacatatccaagctgagcgaagagtggatgaagcactggatgcactggatgaagcagaacgggttgctgttgatgcaaaacgaaaacagactctaactgcagctgaagtttcggctttgaaaagatctatctctgataatcggcagaggctggcagatcagcttgctgaagctgcttgtcagtcttctactcgtggtattgagcttcgagctgcagcttctgccctcaaaagacttggtgatggcccccgagctcacagcctcttactgagtgcacataatcaaaggcttcaatgcaatatgcaaactatacatccatctagtacttcatatggtggggcatacactgcggcacttgcccaacaggttttttcagtcatagctcaggcactaagtgactctgtggatgtttttggtaatgagtcatgttatgcatctgaactggtaacgtgggctaccaagcaggttatgtcctttgcgctcctggtgaagaggcatgtgttgtcctcttgtgcagctgctggaggcttgagggcagctgcagaatgtgttcagatatcacttggccattgttttttgctggaagctcgtggtctgtctgtttcctctgttctcctcaaacaattcaagcccagtttagtgcaagcattagatgctaacttgaggagaattgaggagagtactgctgcactagcagcagctgataactggatactcacatatcccctaactggtattcgtccattaactagatcgtctgctgctaatttggcacttcagccaaagctctctagtagcgcacaccgtttcaattcaatggttcaggatttctttgaggacattgcaccactacttagcttgcaattgggtggttcatcaatggatgggatcacacaaattttcaattcatatgtaaacttgcttataagtgctttacctggttctatggatgatgaagctaacttagatggtttaggtaataagattgttagaatggcagagactgaagagcagcagttagctttattagctaatgcatctttactagctgaggagttgctacctagagcagctatgaagttatcgtcaataaaccagtctatggatgatttgcataaaagaggaacagataaacaaaaccgtgtgcctgagcaacgtgagtggaaaagaaaactacaacgaatggtggacaggttgagagataatttttgcaggcagcatgctcttgaacttatatttacagatgaaggtgatactcatctcagtgcagaaatgtatatcagtatggacaatactgttgaagaaccagaatgggttccgtctccaattttccaggaactgtatgtaaagttaaacaggatggcaagcattgccgcagaaatgtttgttggtagagaaagatttgctactttactgatgatgcgcctcactgagacagtcatactgtggctctcagaagaccaggccttttgggaagagattgaacaaggagcaaagcctttaggccccctaggtctgcaacagttctacctggacatgcaatttgtcatcatatttgggcaaggtcgttttctctctagacatgtacatcaagtcattttggatgtcattgatagagcaatggctgcattttctgctactggaatgaaccctgatagtgtccttccgggcgacgattggttcatggatgtctcccaagaagttgtcagcatgatcagtggaaggggtagagttgctaatggtgacagggaagtaaacagcccaacggcctcagtttcagcgcactccatttcttcgttcaaatcccatggcagctcctagtttgcaagtcggtattctttgtaggcaggtcattgtataataatcattagtatattctttcaacctattcctccactcatttgttttttcttttctttttcagaacttttgtgatagtatagtatagatggataattgtttgacctaggaaaataaatcttttttagtaattttgttttagggtgtgtttggttgaggagtggttccattccattttttggttgttcggttttcaataaaaataatagcggagtggctcttgtatctttatatgaaaatttactataaatagttggaacgctatcgctccataaaaacgaccggatgtgagcggtcgctctcgctccataaaaacgaccggatgtaag

SEQ ID NO: 27910 - DNA, 2839 bp, Zea Mays
cccgccccaaatcattcgtctccctccccttcgttggttcgtttgattgattggggagcaacaactcccaccacccgcaaccgcagcaatctcccctcgccaactccgtctcggccgcaacccattcgccattgccgaggaggaggaagcccggtcgtctattctggatctcggatggcgtcggccaagtcgtcgcggtcgcggcccgcgggccactcgggggtgttcccggtgggcagcgccgccgcggtggggagcgggggcggcggtggcgacggcggggtgcagctcgccgacaagctcaagatcttcaaaaccgacaacttcgatcccgacgcctacgtgcagtccaagtgccagaccatgaacgagaaggaaataagacatttgtgttcttatctccaagacctaaagaaggcttcagctgaagaaatgcgtagaagtgtttacgcaaattatgctgcattcatcagaacatctaaggagatatcagaccttgaaggggaactgttgtcaattagaaatctgcttaatacacaggcagctttaattcacggtctatctgaaggagttcagatagattcattaacttcaggccctgaaggttctgcagaagacgacatatccaaggttgaagatcaggagccttcagaaattcagaaatggtctgcagattttcctgacatgcttgacgttttgctagctgagcgaagagtggatgaagcactggatgcactggatgaagcagaacgggttgctgttgatgcaaaacgaaaacagactctaactgcagctgaagtttcggctttgaaaagatctatctctgataatcggcagaggctggcagatcagcttgctgaagctgcttgtcagtcttctactcgtggtattgagcttcgagctgcagcttctgccctcaaaagacttggtgatggcccccgagctcacagcctcttactgagtgcacataatcaaaggcttcaatgcaatatgcaaactatacatccatctagtacttcatatggtggggcatacactgcggcacttgcccaacaggttttttcagtcatagctcaggcactaagtgactctgtggatgtttttggtaatgagtcatgttatgcatctgaactggtaacgtgggctaccaagcaggttatgtcctttgcgctcctggtgaagaggcatgtgttgtcctcttgtgcagctgctggaggcttgagggcagctgcagaatgtgttcagatatcacttggccattgttttttgctggaagctcgtggtctgtctgtttcctctgttctcctcaaacaattcaagcccagtttagtgcaagcattagatgctaacttgaggagaattgaggagagtactgctgcactagcagcagctgataactggatactcacatatcccctaactggtattcgtccattaactagatcgtctgctgctaatttggcacttcagccaaagctctctagtagcgcacaccgtttcaattcaatggttcaggatttctttgaggacattgcaccactacttagcttgcaattgggtggttcatcaatggatgggatcacacaaattttcaattcatatgtaaacttgcttataagtgctttacctggttctatggatgatgaagctaacttagatggtttaggtaataagattgttagaatggcagagactgaagagcagcagttagctttattagctaatgcatctttactagctgaggagttgctacctagagcagctatgaagttatcgtcaataaaccagtctatggatgatttgcataaaagaggaacagataaacaaaaccgtgtgcctgagcaacgtgagtggaaaagaaaactacaacgaatggtggacaggttgagagataatttttgcaggcagcatgctcttgaacttatatttacagatgaaggtgatactcatctcagtgcagaaatgtatatcagtatggacaatactgttgaagaaccagaatgggttccgtctccaattttccaggaactgtatgtaaagttaaacaggatggcaagcattgccgcagaaatgtttgttggtagagaaagatttgctactttactgatgatgcgcctcactgagacagtcatactgtggctctcagaagaccaggccttttgggaagagattgaacaaggagcaaagcctttaggccccctaggtctgcaacaggtcgttttctctctagacatgtacatcaagtcattttggatgtcattgatagagcaatggctgcattttctgctactggaatgaaccctgatagtgtccttccgggcgacgattggttcatggatgtctcccaagaagttgtcagcatgatcagtggaaggggtagagttgctaatggtgacagggaagtaaacagcccaacggcctcagtttcagcgcactccatttcttcgttcaaatcccatggcagctcctagtttgcaagtcggtattctttgtaggcaggtcattgtataataatcattagtatattctttcaacctattcctccactcatttgttttttcttttctttttcagaacttttgtgatagtatagtatagatggataattgtttgacctaggaaaataaatcttttttagtaattttgttttagggtgtgtttggttgaggagtggttccattccattttttggttgttcggttttcaataaaaataatagcggagtggctcttgtatctttatatgaaaatttactataaatagttggaacgctatcgctccataaaaacgaccggatgtgagcggtcgctctcgctccataaaaacgaccggatgtaag

SEQ ID NO: 27911 - DNA, 2811 bp, Zea Mays
caaaatcatcatcatctatttccgcacaaaaataatacaaaaattagtcgtattctttaagaaccaatccaaacccaagcaaagccgacccgccccaaatcattcgtctccctccccttcgttggttcgtttgattgattggggagcaacaactcccaccacccgcaaccgcagcaatctcccctcgccaactccgtctcggccgcaacccattcgccattgccgaggaggaggaagcccggtcgtctattctggatctcggatggcgtcggccaagtcgtcgcggtcgcggcccgcgggccactcgggggtgttcccggtgggcagcgccgccgcggtggggagcgggggcggcggtggcgacggcggggtgcagctcgccgacaagctcaagatcttcaaaaccgacaacttcgatcccgacgcctacgtgcagtccaagtgccagaccatgaacgagaaggaaataagacatttgtgttcttatctccaagacctaaagaaggcttcagctgaagaaatgcgtagaagtgtttacgcaaattatgctgcattcatcagaacatctaaggagatatcagaccttgaaggggaactgttgtcaattagaaatctgcttaatacacaggcagctttaattcacggtctatctgaaggagttcagatagattcattaacttcagaaattcagaaatggtctgcagattttcctgacatgcttgacgttttgctagctgagcgaagagtggatgaagcactggatgcactggatgaagcagaacgggttgctgttgatgcaaaacgaaaacagactctaactgcagctgaagtttcggctttgaaaagatctatctctgataatcggcagaggctggcagatcagcttgctgaagctgcttgtcagtcttctactcgtggtattgagcttcgagctgcagcttctgccctcaaaagacttggtgatggcccccgagctcacagcctcttactgagtgcacataatcaaaggcttcaatgcaatatgcaaactatacatccatctagtacttcatatggtggggcatacactgcggcacttgcccaacaggttatgtcctttgcgctcctggtgaagaggcatgtgttgtcctcttgtgcagctgctggaggcttgagggcagctgcagaatgtgttcagatatcacttggccattgttttttgctggaagctcgtggtctgtctgtttcctctgttctcctcaaacaattcaagcccagtttagtgcaagcattagatgctaacttgaggagaattgaggagagtactgctgcactagcagcagctgataactggatactcacatatcccctaactggtattcgtccattaactagatcgtctgctgctaatttggcacttcagccaaagctctctagtagcgcacaccgtttcaattcaatggttcaggatttctttgaggacattgcaccactacttagcttgcaattgggtggttcatcaatggatgggatcacacaaattttcaattcatatgtaaacttgcttataagtgctttacctggttctatggatgatgaagctaacttagatggtttaggtaataagattgttagaatggcagagactgaagagcagcagttagctttattagctaatgcatctttactagctgaggagttgctacctagagcagctatgaagttatcgtcaataaaccagtctatggatgatttgcataaaagaggaacagataaacaaaaccgtgtgcctgagcaacgtgagtggaaaagaaaactacaacgaatggtggacaggttgagagataatttttgcaggcagcatgctcttgaacttatatttacagatgaaggtgatactcatctcagtgcagaaatgtatatcagtatggacaatactgttgaagaaccagaatgggttccgtctccaattttccaggaactgtatgtaaagttaaacaggatggcaagcattgccgcagaaatgtttgttggtagagaaagatttgctactttactgatgatgcgcctcactgagacagtcatactgtggctctcagaagaccaggccttttgggaagagattgaacaaggagcaaagcctttaggccccctaggtctgcaacagttctacctggacatgcaatttgtcatcatatttgggcaaggtcgttttctctctagacatgtacatcaagtcattttggatgtcattgatagagcaatggctgcattttctgctactggaatgaaccctgatagtgtccttccgggcgacgattggttcatggatgtctcccaagaagttgtcagcatgatcagtggaaggggtagagttgctaatggtgacagggaagtaaacagcccaacggcctcagtttcagcgcactccatttcttcgttcaaatcccatggcagctcctagtttgcaagtcggtattctttgtaggcaggtcattgtataataatcattagtatattctttcaacctattcctccactcatttgttttttcttttctttttcagaacttttgtgatagtatagtatagatggataattgtttgacctaggaaaataaatcttttttagtaattttgttttagggtgtgtttggttgaggagtggttccattccattttttggttgttcggttttcaataaaaataatagcggagtggctcttgtatctttatatgaaaatttactataaatagttggaacgctatcgctccataaaaacgaccggatgtgagcggtcgctctcgctccataaaaacgaccggatgtaag

SEQ ID NO: 27912 - DNA, 1221 bp, Zea Mays
actgaacaatgtttctgcatgtatcttaccgcctcaatatggctggccaaatatagaacatccattacttcctttttttaatctgaagcaaatatgactatttgcttttacttatctatcccttgtgaaagttcttagtttaacatgaaatatcagttaatatatttctgctttggtgcttactttatcaatcaactaatgctctagaacatctaaatgataaatattgtttgcttttctgcagcgtattgtgtagttgctgttgaatcagttgggcgacaaatccccatagctttcctggacagagttaaggaagacttcaccaaaaagtatggaggcgggaaagcagctactgctgcagcgaacagcttgaacagggagtttggatcaaagcttaaagagcacatgcagtactgtgtggaccaccctgaggaggttagcaagcttgccaaggtgaaggcccaagtctccgaagtcaaaggagttatgatggaaaacattgagaaggttcttgaccgtggcgagaagattgaactgcttgtcgacaaaactgaaaatctgcgttctcaggtaacgggttgctgattcctttttagcaatttaattttgcatgtgtgtagatccaagaaagaaaagatgaatcgcttcatctatagaatatataactttatggtagcatctaggaaaattggccataaaaattagcatatgtctttcgccctgagacgaaaacatgtatatggcttcttgacccttaagcagcccccctttggaacgcaggagtgatagaggagtcatacaagaatcagttcattttgataggaaaagcgcagcatagagggcctaagtgtgtaatgaatttgacttgatatgttgtagaagtttgatatctgtgctattcaatccaccttaagtgccagtgaccttgtttgttggaatgtcactattacgtagtaggattgcatcatttgttaaataattttcactagtgcaagtatcaggtgttgctttatcagttgaaagtggaaacataatgattcattaaatcaactggtcaaaacgctgtcttgaatgttaacagatcctgtagtctgaagtaacaattttttttttgtcagaattagcaagacatcaagtatgtaggaatactctgctgtgcttctaaggtgaagcgtcttatgttagatgactatcatgctgttacatagcagaaaaacaaaa

SEQ ID NO: 27913 - DNA, 1715 bp, Zea Mays
gtggattccacgctggacgcatcctcctgacctccacgctcgggtcgggcgcgtgaacccctcgccgccgtcgcagccgcagttccatcgccggagggtgagagggacgaggaagaggagggcaagatgaagacgaccaaggggggcaaggcgatgaaccccaccgacgccttccgcaaggagcagcggaagaaggagctcaagcggaacaaaaaggaaaggaagaaggtgcgggaagttggtattttgaaaaaggatccagacgctatacgagagcagattgagaaattggagaagatgaaggctgatggtgctctcgacaaggctaggaagcataagaaaagacagcttgaggatacatacaatcttattgttaagaaacgaaaggaatatgaacagaaaatgaaagagaagggtgagcaaccgattatgtttagtcatcttgcaccaccaaagaggcggcctacagcagatgaagatgatagagctaatcctaagcccgaggactctgtttactatcatccaaccttaaatccatctggagcaccaccacctggaaaacctccgatgtacaaatcatctataggaccaaggatcccactgccttccttatccagcactggggcctcatcttccatgtcagagtctgaagcaggtccatctaccctgccaccccctccaccaccaccaccattgccagacacctcagagtccattgatccatctgcccctcatttccctttgcctccactcccgccaccgccccctccacctcctccaggatttccaccgtctcaaatgccaatgccaccgtatggtgtgctccctggtccgccgccgatgcttaggcctccatttttgccaggacctcctatgcaactagatgagtttgctgcctttgccccaaggcctcagttacctcagcagccatcatacgtgaagtcggctgccccaacagttgtgaagagaccattagcacagcacactcctgagctgacggctatggttcctgcatcagtccgtgtcaagagagaatctgctctccccaagccaaaaccaaaggtgcagcagcagccacaactatcaacagtatccatttcaaagccctcggtgaccctcataagaagcgacgctcggcctccttcagcggcacccaagccgccaagcatcgacgactcttacatggcgttcttggaagatatgaaggagctaggggcacttgatgggtaactcaagtagagcaaatgcctgattgcacttagcagcttaattcatggaaacctgggcatggaaccttttttttttgcagcgtgagaatcaatagtctctggtcaatcaatcggagaaaatcatgcattagtttaattaaacactgggaaaacaattgtaatctatctttttcatactaaaggctctgtggcccaactgtacaagctggagatatttgaaacttgaatatggctctagcaaaggacatctcccagctgcatgtttcatggctgatttgcagataataccagtcgtggggaagactactggtgtgccttatttttgtctagagcgtttgcaattgaaagccatggcgaaaatgctgggcccatttgctttgaaaaccatgccggaattgctgacttggggtcccatgtaaacttgtgatattcacaaatgtcggcatcgggttctataatcctgcgatataatcctgcgacagtact

SEQ ID NO: 27914 - DNA, 2166 bp, Zea Mays
gtggattccacgctggacgcatcctcctgacctccacgctcgggtcgggcgcgtgaacccctcgccgccgtcgcagccgcagttccatcgccggagggtgagagggacgaggaagaggagggcaagatgaagacgaccaaggggggcaaggcgatgaaccccaccgacgccttccgcaaggagcagcggaagaaggagctcaagcggaacaaaaaggaaaggaagaaggtgcgggaagttggtattttgaaaaaggatccagacgctatacgagagcagattgagaaattggagaagatgaaggctgatggtgctctcgacaaggctaggaagcataagaaaagacagcttgaggatacatacaatcttattgttaagaaacgaaaggaatatgaacagaaaatgaaagagaagggtgagcaaccgattatgtttagtcatcttgcaccaccaaagaggcggcctacagcagatgaagatgatagagctaatcctaagcccgaggactctgtttactatcatccaaccttaaatccatctggagcaccaccacctggaaaacctccgatgaccaaggatcccactgccttccttatccagcactggggcctcatcttccatgtcagagtctgaagcaggtccatctaccctgccaccccctccaccaccaccaccattgccagacacctcagagtccattgatccatctgcccctcatttccctttgcctccactcccgccaccgcccccaccaccacctaaacctaacagtgacacagcattgccaggcttacctcctcctcctggtccacctctgagagaacctgtatccggtcatacagtacttcagccgccaccacctccatcgcagaggtctttaaatccgccagcagcgtctagtgcaaatgaaagcaaaacggattctgttcagttgcagccctcagttgtcctgcctccaccacccccgccgcctgggttgccaccaaaatctaatgacatggaggctgctggcacttcaaaggacactcctggacttaaagaagatactgcagcgagagtcttaccaccgctgcctccaccacctagtttgccacctttacctccaaggcctccaatgcaatctgatatgctagctcctggagtcatgagatttccaccacctccgccaccaccagattcaaggccatcgcttatggcggctggagttaacaggccccctccacctcctccaggatttccaccgtctcaaatgccaatgccaccgtatggtgtgctccctggtccgccgccgatgcttaggcctccatttttgccaggacctcctatgcaactagatgagtttgctgcctttgccccaaggcctcagttacctcagcagccatcatacgtgaagtcggctgccccaacagttgtgaagagaccattagcacagcacactcctgagctgacggctatggttcctgcatcagtccgtgtcaagagagaatctgctctccccaagccaaaaccaaaggtgcagcagcagccacaactatcaacagtatccatttcaaagccctcggtgaccctcataagaagcgacgctcggcctccttcagcggcacccaagccgccaagcatcgacgactcttacatggcgttcttggaagatatgaaggagctaggggcacttgatgggtaactcaagtagagcaaatgcctgattgcacttagcagcttaattcatggaaacctgggcatggaaccttttttttttgcagcgtgagaatcaatagtctctggtcaatcaatcggagaaaatcatgcattagtttaattaaacactgggaaaacaattgtaatctatctttttcatactaaaggctctgtggcccaactgtacaagctggagatatttgaaacttgaatatggctctagcaaaggacatctcccagctgcatgtttcatggctgatttgcagataataccagtcgtggggaagactactggtgtgccttatttttgtctagagcgtttgcaattgaaagccatggcgaaaatgctgggcccatttgctttgaaaaccatgccggaattgctgacttggggtcccatgtaaacttgtgatattcacaaatgtcggcatcgggttctataatcctgcgatataatcctgcgacagtact

SEQ ID NO: 27915 - DNA, 2159 bp, Zea Mays
gatcccatcgcggtggattccacgctggacgcatcctcctgacctccacgctcgggtcgggcgcgtgaacccctcgccgccgtcgcagccgcagttccatcgccggagggtgagagggacgaggaagaggagggcaagatgaagacgaccaaggggggcaaggcgatgaaccccaccgacgccttccgcaaggagcagcggaagaaggagctcaagcggaacaaaaaggaaaggaagaaggtgcgggaagttggtattttgaaaaaggatccagacgctatacgagagcagattgagaaattggagaagatgaaggctgatggtgctctcgacaaggctaggaagcataagaaaagacagcttgaggatacatacaatcttattgttaagaaacgaaaggaatatgaacagaaaatgaaagagaagggtgagcaaccgattatgtttagtcatcttgcaccaccaaagaggcggcctacagcagatgaagatgatagagctaatcctaagcccgaggactctgtttactatcatccaaccttaaatccatctggagcaccaccacctggaaaacctccgatgtacaaatcatctataggaccaaggatcccactgccttccttatccagcactggggcctcatcttccatgtcagagtctgaagcaggtccatctaccctgccaccccctccaccaccaccaccattgccagacacctcagagtccattgatccatctgcccctcatttccctttgcctccactcccgccaccgcccccaccaccacctcctcctcctggtccacctctgagagaacctgtatccggtcatacagtacttcagccgccaccacctccatcgcagaggtctttaaatccgccagcagcgtctagtgcaaatgaaagcaaaacggattctgttcagttgcagccctcagttgtcctgcctccaccacccccgccgcctgggttgccaccaaaatctaatgacatggaggctgctggcacttcaaaggacactcctggacttaaagaagatactgcagcgagagtcttaccaccgctgcctccaccacctagtttgccacctttacctccaaggcctccaatgcaatctgatatgctagctcctggagtcatgagatttccaccacctccgccaccaccagattcaaggccatcgcttatggcggctggagttaacaggccccctccacctcctccaggatttccaccgtctcaaatgccaatgccaccgtatggtgtgctccctggtccgccgccgatgcttaggcctccatttttgccaggacctcctatgcaactagatgagtttgctgcctttgccccaaggcctcagttacctcagcagccatcatacgtgaagtcggctgccccaacagttgtgaagagaccattagcacagcacactcctgagctgacggctatggttcctgcatcagtccgtgtcaagagagaatctgctctccccaagccaaaaccaaaggtgcagcagcagccacaactatcaacagtatccatttcaaagccctcggtgaccctcataagaagcgacgctcggcctccttcagcggcacccaagccgccaagcatcgacgactcttacatggcgttcttggaagatatgaaggagctaggggcacttgatgggtaactcaagtagagcaaatgcctgattgcacttagcagcttaattcatggaaacctgggcatggaaccttttttttttgcagcgtgagaatcaatagtctctggtcaatcaatcggagaaaatcatgcattagtttaattaaacactgggaaaacaattgtaatctatctttttcatactaaaggctctgtggcccaactgtacaagctggagatatttgaaacttgaatatggctctagcaaaggacatctcccagctgcatgtttcatggctgatttgcagataataccagtcgtggggaagactactggtgtgccttatttttgtctagagcgtttgcaattgaaagccatggcgaaaatgctgggcccatttgctttgaaaaccatgccggaattgctgacttggggtcccatgtaaacttgtgatattcacaaatgtcggcatcgggttctataatcctgcgatataatcctgcgacagtact

SEQ ID NO: 27916 - DNA, 2211 bp, Zea Mays
gtcctgatcccatcgcggtggattccacgctggacgcatcctcctgacctccacgctcgggtcgggcgcgtgaacccctcgccgccgtcgcagccgcagttccatcgccggagggtgagagggacgaggaagaggagggcaagatgaagacgaccaaggggggcaaggcgatgaaccccaccgacgccttccgcaaggagcagcggaagaaggagctcaagcggaacaaaaaggaaaggaagaaggtgcgggaagttggtattttgaaaaaggatccagacgctatacgagagcagattgagaaattggagaagatgaaggctgatggtgctctcgacaaggctaggaagcataagaaaagacagcttgaggatacatacaatcttattgttaagaaacgaaaggaatatgaacagaaaatgaaagagaagggtgagcaaccgattatgtttagtcatcttgcaccaccaaagaggcggcctacagcagatgaagatgatagagctaatcctaagcccgaggtatgggtatggactctgtttactatcatccaaccttaaatccatctggagcaccaccacctggaaaacctccgatgtacaaatcatctataggaccaaggatcccactgccttccttatccagcactggggcctcatcttccatgtcagagtctgaagcaggtccatctaccctgccaccccctccaccaccaccaccattgccagacacctcagagtccattgatccatctgcccctcatttccctttgcctccactcccgccaccgcccccaccaccacctaaacctaacagtgacacagcattgccaggcttacctcctcctcctggtccacctctgagagaacctgtatccggtcatacagtacttcagccgccaccacctccatcgcagaggtctttaaatccgccagcagcgtctagtgcaaatgaaagcaaaacggattctgttcagttgcagccctcagttgtcctgcctccaccacccccgccgcctgggttgccaccaaaatctaatgacatggaggctgctggcacttcaaaggacactcctggacttaaagaagatactgcagcgagagtcttaccaccgctgcctccaccacctagtttgccacctttacctccaaggcctccaatgcaatctgatatgctagctcctggagtcatgagatttccaccacctccgccaccaccagattcaaggccatcgcttatggcggctggagttaacaggccccctccacctcctccaggatttccaccgtctcaaatgccaatgccaccgtatggtgtgctccctggtccgccgccgatgcttaggcctccatttttgccaggacctcctatgcaactagatgagtttgctgcctttgccccaaggcctcagttacctcagcagccatcatacgtgaagtcggctgccccaacagttgtgaagagaccattagcacagcacactcctgagctgacggctatggttcctgcatcagtccgtgtcaagagagaatctgctctccccaagccaaaaccaaaggtgcagcagcagccacaactatcaacagtatccatttcaaagccctcggtgaccctcataagaagcgacgctcggcctccttcagcggcacccaagccgccaagcatcgacgactcttacatggcgttcttggaagatatgaaggagctaggggcacttgatgggtaactcaagtagagcaaatgcctgattgcacttagcagcttaattcatggaaacctgggcatggaaccttttttttttgcagcgtgagaatcaatagtctctggtcaatcaatcggagaaaatcatgcattagtttaattaaacactgggaaaacaattgtaatctatctttttcatactaaaggctctgtggcccaactgtacaagctggagatatttgaaacttgaatatggctctagcaaaggacatctcccagctgcatgtttcatggctgatttgcagataataccagtcgtggggaagactactggtgtgccttatttttgtctagagcgtttgcaattgaaagccatggcgaaaatgctgggcccatttgctttgaaaaccatgccggaattgctgacttggggtcccatgtaaacttgtgatattcacaaatgtcggcatcgggttctataatcctgcgatataatcctgcgacagtact

SEQ ID NO: 27917 - DNA, 2255 bp, Zea Mays
gtttgggccttgattaaccgggtgtccgagtcgatgcgaccggtctagttatgtagccagagtcctgatcccatcgcggtggattccacgctggacgcatcctcctgacctccacgctcgggtcgggcgcgtgaacccctcgccgccgtcgcagccgcagttccatcgccggagggtgagagggacgaggaagaggagggcaagatgaagacgaccaaggggggcaaggcgatgaaccccaccgacgccttccgcaaggagcagcggaagaaggagctcaagcggaacaaaaaggaaaggaagaaggtgcgggaagttggtattttgaaaaaggatccagacgctatacgagagcagattgagaaattggagaagatgaaggctgatggtgctctcgacaaggctaggaagcataagaaaagacagcttgaggatacatacaatcttattgttaagaaacgaaaggaatatgaacagaaaatgaaagagaagggtgagcaaccgattatgtttagtcatcttgcaccaccaaagaggcggcctacagcagatgaagatgatagagctaatcctaagcccgaggactctgtttactatcatccaaccttaaatccatctggagcaccaccacctggaaaacctccgatgtacaaatcatctataggaccaaggatcccactgccttccttatccagcactggggcctcatcttccatgtcagagtctgaagcaggtccatctaccctgccaccccctccaccaccaccaccattgccagacacctcagagtccattgatccatctgcccctcatttccctttgcctccactcccgccaccgcccccaccaccacctaaacctaacagtgacacagcattgccaggcttacctcctcctcctggtccacctctgagagaacctgtatccggtcatacagtacttcagccgccaccacctccatcgcagaggtctttaaatccgccagcagcgtctagtgcaaatgaaagcaaaacggattctgttcagccctcagttgtcctgcctccaccacccccgccgcctgggttgccaccaaaatctaatgacatggaggctgctggcacttcaaaggacactcctggacttaaagaagatactgcagcgagagtcttaccaccgctgcctccaccacctagtttgccacctttacctccaaggcctccaatgcaatctgatatgctagctcctggagtcatgagatttccaccacctccgccaccaccagattcaaggccatcgcttatggcggctggagttaacaggccccctccacctcctccaggatttccaccgtctcaaatgccaatgccaccgtatggtgtgctccctggtccgccgccgatgcttaggcctccatttttgccaggacctcctatgcaactagatgagtttgctgcctttgccccaaggcctcagttacctcagcagccatcatacgtgaagtcggctgccccaacagttgtgaagagaccattagcacagcacactcctgagctgacggctatggttcctgcatcagtccgtgtcaagagagaatctgctctccccaagccaaaaccaaaggtgcagcagcagccacaactatcaacagtatccatttcaaagccctcggtgaccctcataagaagcgacgctcggcctccttcagcggcacccaagccgccaagcatcgacgactcttacatggcgttcttggaagatatgaaggagctaggggcacttgatgggtaactcaagtagagcaaatgcctgattgcacttagcagcttaattcatggaaacctgggcatggaaccttttttttttgcagcgtgagaatcaatagtctctggtcaatcaatcggagaaaatcatgcattagtttaattaaacactgggaaaacaattgtaatctatctttttcatactaaaggctctgtggcccaactgtacaagctggagatatttgaaacttgaatatggctctagcaaaggacatctcccagctgcatgtttcatggctgatttgcagataataccagtcgtggggaagactactggtgtgccttatttttgtctagagcgtttgcaattgaaagccatggcgaaaatgctgggcccatttgctttgaaaaccatgccggaattgctgacttggggtcccatgtaaacttgtgatattcacaaatgtcggcatcgggttctataatcctgcgatataatcctgcgacagtact

SEQ ID NO: 27918 - DNA, 5185 bp, Zea Mays
cccaaattactcctcaacaagttaaaaggcactcacactaccatcgctttccgcgtccgccgttttaacaatcgcattgtcagatctacttcgatctcacttctggttaactgagggcgttcctcgatcggatctcctgctccggctccggctcctgctccagctgaatggataacatgctaggcgacttgtacaagccagatgacggcgacgacttctacagcaaaaaataccgcgacgagctagagaatgtgtcattccaactattagaagaaattacagatggtttctctgagagtcgagagctcggccgaggatcctttggagtggtttacaggggattgactaaaaatggtgattacgttgctgtgaagaagcttcatgctaatgtcactgatcttaaccataagcagtttcaaaatgagttatataaccttgcaaaacttaagcatgaaaacattgtacggatttatggctattgctatgaaattaagaaaacatttatggagcacgatagaagaaaaattcttgtcgaagagccgcgtatagcgctctgccttgagtatttacacaatggaagccttcaagatcatatttcggatgagttttctggtcttgactgggacacacgctacaggattatggaaggggtctgtcgtggtttatatcatatccataggaatctaaagaaacctctttatcatttggacctaaaacctgccaacatattactaagtaaaaccatgcaaccaaagcttgcagattttgggttatctaggatctttcggaatgaagaactaacacgaacgactaaaagtcctctaggaactcttgggtaccagccaccagaatacattgaaagaggtgaagtctcagaaaaattcgacatattcagcttaggtgtcgtaatgatacacctggtttcgggacgtggaggcttcgaaagatatgcatgcatgcatagtgaagaatttatcaatcaggtaaaaacaaactggaggaaaagatttaagcaattacagaggaattccttacgtaaagtcaaagtgtactgccacgaggtagagacatgcactcggatagcactgaattgtgtggagaaagacacacagaaaaggcctgatatagatatggtcatcaataatctaaaggaccgtaagacccatagattcaagagtacttggacaagtagttttcggcaggatggaagaatgtatggaagctatatgccatattcaaacagatatttaaacaaattgatgtcaggctctatttgcaccgaaacaaaattttatcgaagagaaaaattaccgaatgttggagaagaattcattatagggagaaaagaagagaaacagaaaatagtggcatctttactacagagcatgacacaacacatcactatccttcctatctatggcattggaggaattggcaagacaaccattgcaaagttgatttactatgatacaaatttcaatagttactctcgagtatgggtctatgtttcaccgaaatttgacttgaagaaagttggaaacactgtaatttcacaactctctagtgaggagagccaaattaatgaaacacaaatgatacatagttgcctgatgaaattactttctggtaaaaaggttctgattgttttagatgacttgtgggaggatagtttatttcaactgaataatttgaaggatatgctaagttatggtgatagcatcaatgtaatagttatagtaaccacacgcagtaaacatgttgcagagaatgttagcactaatgttgagccacacaagatagaacccttgacagatagcatgtgctgggatataatgaaacaaagaagcaactttgaagctaaaaatcacaaagaacatttggcacatataggaatggagatcgctgtaaagtgtggaggtgtggctttggcagctcaatcccttgggttcatgttgaagcccatggaattatgtgatgaatggattgaagtcagagacagtgacatctggaataaatctatttcgaaggatgccaattcaccaaaccatgtgcttgcatccttgatgttaagttgtaccaaaatggatcgatgcttgatattatgctttatctactgtgcaatctttccaaaaggtcatcatatagtcaaagaagaactaatacaacaatggatttctttgggtttcatccagccaacaaaattacactccaatatgcagatatgtgagaagtatattttgcagctcataggattgtctttcattcaagatacaatgtcaccaaaggaaaacatagcgatccaggaggtgttcgagagcctccgatgcagcccgcagggtctctccacggagcaggccgagcagcgcctcgccatcttcgggcccaacaagctggaagagaagcaggagagcaaattcctcaaatttttgggcttcatgtggaacccgctgtcctgggtcatggaggcggccgccatcatggccatcgcgctcgccaatgggggaaacaagccgcccgactggcaggacttcgtggggattatcactctactcatcatcaactccactattagcttcattgaggagaacaatgccggcaatgccgcggccgccctcatggcgcgcctcgcccccaaggccaaggttctcaggaacggccggtgggccgaggaggaatcggctatccttgtgccaggagacatcatcagtgtgaagcttggggacatcattccagctgacgctcgtctgcttgaaggggatccactgaaaattgaccagtctgcactcaccggcgagtcgcttccggtcaccaaaggccctggcgatggagtgtactctggctccacttgcaaacagggcgagatcgaggccgttgtcattgccaccggtgtgcacacattcttcggcaaggcagcacatcttgtcgattcaacaaaccaagttggtcatttccagaaggttctcaccgccataggaaacttttgcatctgttcaattgctgtgggaatgctcgtggagatcattgttatgtaccctatccaacacagggcttaccgatcagggattgacaatctgttggtgcttctgatcggaggaattccgattgccatgcccactgtcctttctgtgactatggcaatcggggctcatcgcttggctcaacagggagcaattactaagagaatgacagcaattgaagaattggctggcatggacattctgtgcagcgacaagactgggacattaaccttgaacaagttgactgtagacaaaagtcttgtagaggttttccaaagaggggttgaccaagatactgtaattctgatggctgccagagcttctcgtacggaaaatcaggatgccatagatgccacaatagttggtatgctggctgatccaaaggaggctcgtgctggtgtccaagagatccattttctgccatttaatccaaccgacaaaagaactgctttaacctaccttgatggcgagggaagaatgcatcgtgttagtaagggagcaccagagcagatccttcatcttgcccacaacaagacggatattgaaacaagggtcagagctgtgattgacaattttgctgaacgtggtctgcgagcacttggtgtagcttaccaggaagtgccagatggtaggaaagagagtcctggaggaccatgggagttcatgggcctcttgccactttttgatccccctcgcaaagatagcgcagacactatcagtaaggcactcgatcttggtgtcaatgtcaagatgattacaggcgatcagcttgctattgggaaggaaactgcacgtcgtttgggaatgggtactaatatgtacccttcatctgctttactcgaacagaataaggatgagtcaattgcttctttgccaattgatgaattgattgagactgctgatggctttgctggagtctttccagaacacaagtatgagatcgtgaagcgcttgcaagcaagaaaacatatttgcggtatgaccggggatggtgtaaacgacgctccagctctgaagaaggccgatattggtattgcagtggcagactccaccgacgcagctcgtagtgcttctgacatcgtcctaaccgaagtaggccttagtgtgattatcagtgccgtgctgacgagccgtgcgatttttcaaagaatgaagaactacacgatctacgctgtatcaatcaccatccgtatcgtgcttggtttcatgcttcttgcgctgatttggaagtttgacttcccaccatttatggtcctgatcatcgccatcctcaatgatggaaccattatgactatctccaaggacagagtgaagccatctccgcagcctgacagttggaagctagctgagatttttgcgactggagtagttctcggtacttacttggccatgatgactgtcatcttcttctgggctgcgtacaagaccgacttcttcccgcgactgttccatgtcgaaagccttgcccacgacgatttccagatgcttgcctctgcggtataccttcaagtcagcacgatcagtcaggcccttatcttcgtgacgcggtctcgcagctggtcctttgtggagcgtcctgggttcttgctggtgtctgctttcttggtggcgcagctgatcgctactctgattgctgtgtatgccaactgggcgtttgctgcgatcaagggcatcggatggggctgggccggcgtcatctggctgtacaacatcgtctgctacctcccgctggacatcatcaagttcctcatccggtacgcgctgagcgggagagcgtggaacctcgtccttgagcagaggatcgcattcacaagcaagaagaacttcggtgccgaggaacgggaacgcagatgggcgcatgctcagaggtctctccacgggctggagctccagccgccggaggcagcgtccatgttcgagaacaagacgagcttcagtgaagtgaaccagctcgctgaagaggccagaaggagagcggagatggcgaggtccgactgttgtttgtcgagcatctccactgaacgcggcgaccagactttgcactgccctgtctgattaataggggaagatgaggatggagtcggtggtgaaggagaaggcggagtatagaggcggcttctttttactgtatatattatatatactaggcagcaatatagaaacttata

SEQ ID NO: 27919 - DNA, 5764 bp, Zea Mays
ctcacactaccatcgctttccgcgtccgccgttttaacaatcgcattgtcagatctacttcgatctcacttctggttaactgagggcgttcctcgatcggatctcctgctccggctccggctcctgctccagctgaatggataacatgctaggcgacttgtacaagccagatgacggcgacgacttctacagcaaaaaataccgcgacgagctagagaatgtgtcattccaactattagaagaaattacagatggtttctctgagagtcgagagctcggccgaggatcctttggagtggtttacagggtaagtatgattttattggcatgcatgatcagtttcaataaacgaagttatgtacggtctgaccaacacactgggctgcttccaatcatacgcatacacatgatcttaccgcactgccataaatatagtatctgcatttttctggttttttcagttatcaaaatgataagtagtcactacatacatagaaaagtggaagttaatgtttgtttagtactgacaacatatcctcaacagggattgactaaaaatggtgattacgttgctgtgaagaagcttcatgctaatgtcactgatcttaaccataagcagtttcaaaatgagttatataaccttgcaaaacttaagcatgaaaacattgtacggatttatggctattgctatgaaattaagaaaacatttatggagcacgatagaagaaaaattcttgtcgaagagccgcgtatagcgctctgccttgagtatttacacaatggaagccttcaagatcatatttcggatgagttttctggtcttgactgggacacacgctacaggattatggaaggggtctgtcgtggtttatatcatatccataggaatctaaagaaacctctttatcatttggacctaaaacctgccaacatattactaagtaaaaccatgcaaccaaagcttgcagattttgggttatctaggatctttcggaatgaagaactaacacgaacgactaaaagtcctctaggaactcttgggtaccagccaccagaatacattgaaagaggtgaagtctcagaaaaattcgacatattcagcttaggtgtcgtaatgatacacctggtttcgggacgtggaggcttcgaaagatatgcatgcatgcatagtgaagaatttatcaatcaggtaaaaacaaactggaggaaaagatttaagcaattacagaggaattccttacgtaaagtcaaagtgtactgccacgaggtagagacatgcactcggatagcactgaattgtgtggagaaagacacacagaaaaggcctgatatagatatggtcatcaataatctaaaggaccgtaagacccatagattcaagagtacttggacaagtagttttcggcaggatggaagaatgtatggaagctatatgccatattcaaacagatatttaaacaaattgatgtcaggctctatttgcaccgaaacaaaattttatcgaagagaaaaattaccgaatgttggagaagaattcattatagggagaaaagaagagaaacagaaaatagtggcatctttactacagagcatgacacaacacatcactatccttcctatctatggcattggaggaattggcaagacaaccattgcaaagttgatttactatgatacaaatttcaatagttactctcgagtatgggtctatgtttcaccgaaatttgacttgaagaaagttggaaacactgtaatttcacaactctctagtgaggagagccaaattaatgaaacacaaatgatacatagttgcctgatgaaattactttctggtaaaaaggttctgattgttttagatgacttgtgggaggatagtttatttcaactgaataatttgaaggatatgctaagttatggtgatagcatcaatgtaatagttatagtaaccacacgcagtaaacatgttgcagagaatgttagcactaatgttgagccacacaagatagaacccttgacagatagcatgtgctgggatataatgaaacaaagaagcaactttgaagctaaaaatcacaaagaacatttggcacatataggaatggagatcgctgtaaagtgtggaggtgtggctttggcagctcaatcccttgggttcatgttgaagcccatggaattatgtgatgaatggattgaagtcagagacagtgacatctggaataaatctatttcgaaggatgccaattcaccaaaccatgtgcttgcatccttgatgttaagttgtaccaaaatggatcgatgcttgatattatgctttatctactgtgcaatctttccaaaaggtcatcatatagtcaaagaagaactaatacaacaatggatttctttgggtttcatccagccaacaaaattacactccaatatgcagatatgtgagaagtatattttgcagctcataggattgtctttcattcaagatacaatgtcaccaaaggatggcttggcgaccatgcttctgtcaaaatactaatcatcaacaactgcgtgagcaacctgtctctgccagaaagcatacagaagctcaccaggcttgtacgagtatatatttatctcgtttgccttttctttgttttaacctctcaatatttatacatagaaacgtttttaagccaactttggacatttaaatataaattgtgcattaatggtaatttattttagatgattaccttgcatgtctttttataattgcatagtggataacttatacgaaaatctagtcatttactttaaatcagcttttatgcatagtgggtaatttatatagactagtctaatacacccgtagctaggcttgagtcaattcgcattttacttgcctatgctacttaccatggctttaagctttaccaaatggacgtgaaaagtgtcttcctcaatggaccaatcaaggaagaggtctatgttgagcaacctcccggctttgaagatagtgagtaccctaaccatgtatataaactctctaaggcgctttatgggctcaagcaagcctcaagagcatggtatgaatgcctaagagatttccttatcactaatggcttcaaagtcggaaaggccgatcctactttatttactaaaacacttgcaaatgatttatttgtatgccaaatttatgttgatgatattatatttgggtctactaatgaatctacatgtgaggaatttaataggatcatgacacaaaaattcgagatgtctatgatgggagagttgaagtacttcttaggatttcaagtgaagcaactccaagaaggcaccttcattagtcaaacgaagtatactcaagacattctaaacaagtttgggatgaaggatgacaagcccatcaagacactcatgggaaccaatggacatctcgacctcgacacgggaggtaaatccgtcgatcaaaaggtataccggtcgatgataggctctttactctatttatgtgcatctcgaccggacataatgctttctgtatgcatgtgtgcaagattccaagccgaccctaaggaagctcaccttacggtcgtaaaacgaaccttgagatatttagttcatactcctaagtttgggctttggtaccctcggggatccacatttgatttgattggttattcggatgccgattgggcggggtgtaaaattaatagaaagagaacatcggggacttgccagttcttgggacgatccctggtgtcttgggcttcaaagaagcaaaattccgtagctctttctaccgccgaagccgagtatattgccgcaggccattgttgcgcgcaattactttagatgaggcaaacccttagtgactatggttacaaattaaccaaagttcctcttctatgtgataatgagagtgcaatccgtatggcgtataatcccgttgagcatagccgcactaaacacatagccattcggtatcattttctaagggatcaccaacaaaagggagatatcgagattgcatatattaacactaaggaacaattagccgatatctttaccaagccactagatgaacaaacatttaacaaacttaggcatgagctaaatattcttgattctcggaatttcttttgatgttttgcacacatagctcattcatatacctttgatcatgtctcttttatatgctatgactaaatgtgttttcaagtatatttcaaaacaagtcatagattgaaagggaattggagtcttcggcgaaaacaaaggcttccactccactccatcgaatcattcacccttcgccgtcgctccgagcaactctccaactttggtataatcttcactcatatgttatttatcaaagggggagaaattagttataagggcttatatttcactcaagtatccgtttttggcgattcatgccaaagggggagaaaatattagcccaaagcaaaaggaccgcaccaccaccaatttttcaaaattgaagctaagaaaaagttttcaaatgatgaatttctaaattgatatattattgtattcaaaagggggagaaagtagtattttcaaaattggtatcttaaaaccctcttgaacactaagaggaggattttattgagggtgagttttgtttagtcaaaggaaaaaaacatttgaaacagggggagaaaatttcaaatcttaaaaaatgcttctcaaaatcttattcatttatctttgactatttacaaaaggactttgaaaagaatttacaaaagaatttgcaaaaacaaaacatgtggtgcaagtgtggtccaaaatgttaaagataaagaaacaatccatgcatatcctatgagaatttatattggctcaattctaagtaacctttgcacttacaattatgcaaactagttcaattatgcacttctatatttgctttggtttgtgttggcatcaatcaccaaaaagggggagattgaaaaagaattaggcttacacctatttcctaattgattttggtggttgaattgcccaacacaaataattggactaactagtttgctctagtctataagttctacaggtgccaaaggttcacaataagccaataaaaagaccaagaaatggttcaaacaaagaaagcaaaagacatcccaaaaggcaccctggtctagcgcaccggactttccggtgcaccagggcactcgaggctgaacttgccaccttcgggaaaatgggaggtcgctccgctataatttaccggactgtccggtgaagcaccggatagtgtccggtgtgccagcggagcaacggctacttcgcgcgcaacggtcgactgcaacacattaaatgcgcgcctgcgctcgcagaggacagatgacgcacaattggcgcaccggacaggtctacaggacctgtccggtgcaccaccggacagcccagaggccccacaagtcagagctccaacggtcgaaccccaacggtctgctgacgtggctggcgcaccaaacagtgtccggtggcgcaccggactgtccggtgcgccatgcgacagcagccttccaacgaccatattttggtggttggaggctataaatacccccaaccaccccacattcaatggcatcaaagttttccatcttcaacacattacaagagctatagcattcaattctagacacaaccagagagatcaaatcctctcccaagtccgaaatcactccaaatcaaatagtgactagagagagtgacatttgtgttcatttgagctcttgcgcttggattgctt

SEQ ID NO: 27920 - DNA, 8831 bp, Zea Mays
aaattactcctcaacaagttaaaaggcactcacactaccatcgctttccgcgtccgccgttttaacaatcgcattgtcagatctacttcgatctcacttctggttaactgagggcgttcctcgatcggatctcctgctccggctccggctcctgctccagctgaatggataacatgctaggcgacttgtacaagccagatgacggcgacgacttctacagcaaaaaataccgcgacgagctagagaatgtgtcattccaactattagaagaaattacagatggtttctctgagagtcgagagctcggccgaggatcctttggagtggtttacaggggattgactaaaaatggtgattacgttgctgtgaagaagcttcatgctaatgtcactgatcttaaccataagcagtttcaaaatgagttatataaccttgcaaaacttaagcatgaaaacattgtacggatttatggctattgctatgaaattaagaaaacatttatggagcacgatagaagaaaaattcttgtcgaagagccgcgtatagcgctctgccttgagtatttacacaatggaagccttcaagatcatatttcggatgagttttctggtcttgactgggacacacgctacaggattatggaaggggtctgtcgtggtttatatcatatccataggaatctaaagaaacctctttatcatttggacctaaaacctgccaacatattactaagtaaaaccatgcaaccaaagcttgcagattttgggttatctaggatctttcggaatgaagaactaacacgaacgactaaaagtcctctaggaactcttgggtaccagccaccagaatacattgaaagaggtgaagtctcagaaaaattcgacatattcagcttaggtgtcgtaatgatacacctggtttcgggacgtggaggcttcgaaagatatgcatgcatgcatagtgaagaatttatcaatcaggtaaaaacaaactggaggaaaagatttaagcaattacagaggaattccttacgtaaagtcaaagtgtactgccacgaggtagagacatgcactcggatagcactgaattgtgtggagaaagacacacagaaaaggcctgatatagatatggtcatcaataatctaaaggaccgtaagacccatagattcaagagtacttggacaagtagttttcggcaggatggaagaatgtatggaagctatatgccatattcaaacagatatttaaacaaattgatgtcaggctctatttgcaccgaaacaaaattttatcgaagagaaaaattaccgaatgttggagaagaattcattatagggagaaaagaagagaaacagaaaatagtggcatctttactacagagcatgacacaacacatcactatccttcctatctatggcattggaggaattggcaagacaaccattgcaaagttgatttactatgatacaaatttcaatagttactctcgagtatgggtctatgtttcaccgaaatttgacttgaagaaagttggaaacactgtaatttcacaactctctagtgaggagagccaaattaatgaaacacaaatgatacatagttgcctgatgaaattactttctggtaaaaaggttctgattgttttagatgacttgtgggaggatagtttatttcaactgaataatttgaaggatatgctaagttatggtgatagcatcaatgtaatagttatagtaaccacacgcagtaaacatgttgcagagaatgttagcactaatgttgagccacacaagatagaacccttgacagatagcatgtgctgggatataatgaaacaaagaagcaactttgaagctaaaaatcacaaagaacatttggcacatataggaatggagatcgctgtaaagtgtggaggtgtggctttggcagctcaatcccttgggttcatgttgaagcccatggaattatgtgatgaatggattgaagtcagagacagtgacatctggaataaatctatttcgaaggatgccaattcaccaaaccatgtgcttgcatccttgatgttaagttgtaccaaaatggatcgatgcttgatattatgctttatctactgtgcaatctttccaaaaggtcatcatatagtcaaagaagaactaatacaacaatggatttctttgggtttcatccagccaacaaaattacactccaatatgcagatatgtgagaagtatattttgcagctcataggattgtctttcattcaagatacaatgtcaccaaagtattctcaagcatacaaaaaaggcctcacattgttcaccatgcacgatctcgtgcatgatttggcaagattactaacggctggtgaaattctggatgcttccaatattgggactatggatgcgaggcatgttgcccgcgagcctgcaactaggtcattatttcatgggtacatgcatgctaagtcaaactttcgtagcttcatacgtaccaattcaaatatatacacataccggcgacggcgagagccagaaggtagcggacagcaatacaaatatgcattgctcactaattgtcacaagcccctagaggtattgacggattcgcccaatatgataagggcactgcattttcgggattgtcatggctcgaaaggactaaaagattatgcatttttgcctgcaaagttgtccctaaaagttctggatttaagtgggtgcaacatagcctacctgccagcttctatcggtgaattggctgtattgaggtatctcaatgctccagagattaaaaatgaaatgctcccagactctctgagcaaactgtcaaaattaatatacctcaacctaagtgggtccaatatttcagcactgcctgattcaattggtgatatcgaaggtctaatgcatcttgatatatcaaattgtgtgcttttgtgtgagctcccagaatcatttgtggacctaaaaaatctggtatatctagatttatcacattgccagatcaaaattacagcaagagtttttagtggtctcaccaatatccagcatttgaatttatcaaaaagtcttattcatggaggtgacgggttggaggggctgcaggaagccgttggtggtctcaccgaacttcggtatttaaatctatcagggtgctttgaaaatctgaggccagatgaggtattaagttttgttgaccgtatttgtaggcttacaaatctggtgcacttggatttgtctttcaatttgggtcttgtcagtgtgcctgaaagtattggcagcctcaggaagctgcacaccctggatctcttgtgctgccgaaacctagtgacgcttccaaaatgtatgttcaacatggatagcatgaagatgttaaatgttacctgctgtcctcatctagatcagtctacgctcccccgatacaggtattttaccttgccgtactttgaggtccatgctgatgatggcgaatctaccagcaatattggtttgcttcggtatgtgaatcctactcatgagttgtacataagtgggcttgataacacaatatctgcagaagaggttgacagtataaacctaagccaaaaacaggggatccagtcgttgagtctttcatggactagagatgctcagagatctgtggaggacatggaagtcctgggaaagctagtgccacctgatactttaaaatgctttgagctaagaggttatgatagtatgagctttccaacatgggttatgggcatcacgctctatcttcctcgccttaccaaggttgtattgtgggagctgcgtaaatgcaatagtctaccaccactgggccagttaccaacactacaaaagctagttataggaggaatggacagcactttgacagttgatgagggtttctgctgcgccggcccgggagcctttcctctattacaggaacttcaactatgccaaatggagaacctggaagtgtggaacacaacatactcctgtggccagagcaatgaggatgtgcaggaattcatgttcccaaaccttagggaactgttaattcgtgattgccccaagttgagactgaaaccatgcccacctaaaactgtgggatggaagatagagaacagcgacaatgtactgtcgtcatgggatgaggagggagagatcgaccttgcagcattgttcccatcaaggaaagagtttaagaaactttgggaagggaaaacaaaagtgccagcagcttgtagcgcacaatttgaaaaatgcagaaaacctggagcttcctacaatgcttgtcctgaacgcgtggaggtgaaatcgagcaagctgcctttgggaaaatggaggctgttccggcacctccttcccacctatgatttaaggatctcgtgctgcacttatgcgacaagcggctcgtcacaagagatcatccaaggcctcgccttcatcgaatcattatgcctagaagacgatgctcagtctgagcttccgaattggttgggtgagctcacttctcttgaaacgttggagatatcgaagtacccagggctagaggcaccactggatggcatgaagcaactcgcccacctccggaagctgtcgctgataaattgtagaagcatgtcagcactaccgcaatggttgggagaactcatctctctcaaagaactgatcatctcagagtggccaaacctgagcgattttccggagagtatgcagctcctcacctccctcaagatgctacgtttggagcggtgtcccagaattactgcccttccaggatggctgggcgacctcgcttctctcaaaatactagtcatcagcaattgcaagggcatcgtgtctctgccagacagcatacagaagatcaccaggcttgtacgagtataaattgggggagcctgaaacatgctatctgctttgcaactcatttacaggtgctgcagtagcctggaagtgatgacagacatatatggaggctttcttctactggtgtttgcacagccaagtcagcttatgggggtttcttcattggagccacggtttttggtccttcggatctaatctggaaatcgtgggccccaaagaaatgtcgttttttcccctatggctggttgctcttgacaaatgttggagtgccgaccgtctagccagacggggtttacaggcagcaccctatgtgttgtttgttttgtgaccaagatgaggaaaccatcaaccatcttctggtttcttgctccttctctcggcaattttggttcgtgctgttacaaatggtgggtcttcaacgcctatctccacagccagacacgtccttcttcctagaatggtggtcaggttctgctgcagtggtggatgagcaatttcagcagggtttctactacatcatcctgcttggtgcttggctcctttggaagcaccgtaaccgatgtgtcttcgatgggattgggatcaaacccgatgtgcagcatgtgttgtccttagccacagaggaaatgagactttgggggctagctggtgcgaagggaattaggatgttgacttgttggcgagtaatcctctagcttgatccaggatggcttggcgaccatgcttctgtcaaaatactaatcatcaacaactgcgtgagcaacctgtctctgccagaaagcatacagaagctcaccaggcttgtacgagtatatatttatctcgtttgccttttctttgttttaacctctcaatatttatacatagaaacgtttttaagccaactttggacatttaaatataaattgtgcattaatggtaatttattttagatgattaccttgcatgtctttttataattgcatagtggataacttatacgaaaatctagtcatttactttaaatcagcttttatgcatagtgggtaatttatatagactagtctaatacacccgtagctaggcttgagtcaattcgcattttacttgcctatgctacttaccatggctttaagctttaccaaatggacgtgaaaagtgtcttcctcaatggaccaatcaaggaagaggtctatgttgagcaacctcccggctttgaagatagtgagtaccctaaccatgtatataaactctctaaggcgctttatgggctcaagcaagcctcaagagcatggtatgaatgcctaagagatttccttatcactaatggcttcaaagtcggaaaggccgatcctactttatttactaaaacacttgcaaatgatttatttgtatgccaaatttatgttgatgatattatatttgggtctactaatgaatctacatgtgaggaatttaataggatcatgacacaaaaattcgagatgtctatgatgggagagttgaagtacttcttaggatttcaagtgaagcaactccaagaaggcaccttcattagtcaaacgaagtatactcaagacattctaaacaagtttgggatgaaggatgacaagcccatcaagacactcatgggaaccaatggacatctcgacctcgacacgggaggtaaatccgtcgatcaaaaggtataccggtcgatgataggctctttactctatttatgtgcatctcgaccggacataatgctttctgtatgcatgtgtgcaagattccaagccgaccctaaggaagctcaccttacggtcgtaaaacgaaccttgagatatttagttcatactcctaagtttgggctttggtaccctcggggatccacatttgatttgattggttattcggatgccgattgggcggggtgtaaaattaatagaaagagaacatcggggacttgccagttcttgggacgatccctggtgtcttgggcttcaaagaagcaaaattccgtagctctttctaccgccgaagccgagtatattgccgcaggccattgttgcgcgcaattactttagatgaggcaaacccttagtgactatggttacaaattaaccaaagttcctcttctatgtgataatgagagtgcaatccgtatggcgtataatcccgttgagcatagccgcactaaacacatagccattcggtatcattttctaagggatcaccaacaaaagggagatatcgagattgcatatattaacactaaggaacaattagccgatatctttaccaagccactagatgaacaaacatttaacaaacttaggcatgagctaaatattcttgattctcggaatttcttttgatgttttgcacacatagctcattcatatacctttgatcatgtctcttttatatgctatgactaaatgtgttttcaagtatatttcaaaacaagtcatagattgaaagggaattggagtcttcggcgaaaacaaaggcttccactccactccatcgaatcattcacccttcgccgtcgctccgagcaactctccaactttggtataatcttcactcatatgttatttatcaaagggggagaaattagttataagggcttatatttcactcaagtatccgtttttggcgattcatgccaaagggggagaaaatattagcccaaagcaaaaggaccgcaccaccaccaatttttcaaaattgaagctaagaaaaagttttcaaatgatgaatttctaaattgatatattattgtattcaaaagggggagaaagtagtattttcaaaattggtatcttaaaaccctcttgaacactaagaggaggattttattgagggtgagttttgtttagtcaaaggaaaaaaacatttgaaacagggggagaaaatttcaaatcttaaaaaatgcttctcaaaatcttattcatttatctttgactatttacaaaaggactttgaaaagaatttacaaaagaatttgcaaaaacaaaacatgtggtgcaagtgtggtccaaaatgttaaagataaagaaacaatccatgcatatcctatgagaatttatattggctcaattctaagtaacctttgcacttacaattatgcaaactagttcaattatgcacttctatatttgctttggtttgtgttggcatcaatcaccaaaaagggggagattgaaaaagaattaggcttacacctatttcctaattgattttggtggttgaattgcccaacacaaataattggactaactagtttgctctagtctataagttctacaggtgccaaaggttcacaataagccaataaaaagaccaagaaatggttcaaacaaagaaagcaaaagacatcccaaaaggcaccctggtctagcgcaccggactttccggtgcaccagggcactcgaggctgaacttgccaccttcgggaaaatgggaggtcgctccgctataatttaccggactgtccggtgaagcaccggatagtgtccggtgtgccagcggagcaacggctacttcgcgcgcaacggtcgactgcaacacattaaatgcgcgcctgcgctcgcagaggacagatgacgcacaattggcgcaccggacaggtctacaggacctgtccggtgcaccaccggacagcccagaggccccacaagtcagagctccaacggtcgaaccccaacggtctgctgacgtggctggcgcaccaaacagtgtccggtggcgcaccggactgtccggtgcgccatgcgacagcagccttccaacgaccatattttggtggttggaggctataaatacccccaaccaccccacattcaatggcatcaaagttttccatcttcaacacattacaagagctatagcattcaattctagacacaaccagagagatcaaatcctctcccaagtccgaaatcactccaaatcaaatagtgactagagagagtgacatttgtgttcatttgagctcttgcgcttggattgctt

SEQ ID NO: 27921 - DNA, 5570 bp, Zea Mays
ctcacactaccatcgctttccgcgtccgccgttttaacaatcgcattgtcagatctacttcgatctcacttctggttaactgagggcgttcctcgatcggatctcctgctccggctccggctcctgctccaggcgacttgtacaagccagatgacggcgacgacttctacagcaaaaaataccgcgacgagctagagaatgtgtcattccaactattagaagaaattacagatggtttctctgagagtcgagagctcggccgaggatcctttggagtggtttacaggggattgactaaaaatggtgattacgttgctgtgaagaagcttcatgctaatgtcactgatcttaaccataagcagtttcaaaatgagttatataaccttgcaaaacttaagcatgaaaacattgtacggatttatggctattgctatgaaattaagaaaacatttatggagcacgatagaagaaaaattcttgtcgaagagccgcgtatagcgctctgccttgagtatttacacaatggaagccttcaagatcatatttcggatgagttttctggtcttgactgggacacacgctacaggattatggaaggggtctgtcgtggtttatatcatatccataggaatctaaagaaacctctttatcatttggacctaaaacctgccaacatattactaagtaaaaccatgcaaccaaagcttgcagattttgggttatctaggatctttcggaatgaagaactaacacgaacgactaaaagtcctctaggaactcttgggtaccagccaccagaatacattgaaagaggtgaagtctcagaaaaattcgacatattcagcttaggtgtcgtaatgatacacctggtttcgggacgtggaggcttcgaaagatatgcatgcatgcatagtgaagaatttatcaatcaggtaaaaacaaactggaggaaaagatttaagcaattacagaggaattccttacgtaaagtcaaagtgtactgccacgaggtagagacatgcactcggatagcactgaattgtgtggagaaagacacacagaaaaggcctgatatagatatggtcatcaataatctaaaggaccgtaagacccatagattcaagagtacttggacaagtagttttcggcaggatggaagaatgtatggaagctatatgccatattcaaacagatatttaaacaaattgatgtcaggctctatttgcaccgaaacaaaattttatcgaagagaaaaattaccgaatgttggagaagaattcattatagggagaaaagaagagaaacagaaaatagtggcatctttactacagagcatgacacaacacatcactatccttcctatctatggcattggaggaattggcaagacaaccattgcaaagttgatttactatgatacaaatttcaatagttactctcgagtatgggtctatgtttcaccgaaatttgacttgaagaaagttggaaacactgtaatttcacaactctctagtgaggagagccaaattaatgaaacacaaatgatacatagttgcctgatgaaattactttctggtaaaaaggttctgattgttttagatgacttgtgggaggatagtttatttcaactgaataatttgaaggatatgctaagttatggtgatagcatcaatgtaatagttatagtaaccacacgcagtaaacatgttgcagagaatgttagcactaatgttgagccacacaagatagaacccttgacagatagcatgtgctgggatataatgaaacaaagaagcaactttgaagctaaaaatcacaaagaacatttggcacatataggaatggagatcgctgtaaagtgtggaggtgtggctttggcagctcaatcccttgggttcatgttgaagcccatggaattatgtgatgaatggattgaagtcagagacagtgacatctggaataaatctatttcgaaggatgccaattcaccaaaccatatatgtgagaagtatattttgcagctcataggattgtctttcattcaagatacaatgtcaccaaagtattctcaagcatacaaaaaaggcctcacattgttcaccatgcacgatctcgtgcatgatttggcaagattactaacggctggtgaaattctggatgcttccaatattgggactatggatgcgaggcatgttgcccgcgagcctgcaactaggtcattatttcatgggtacatgcatgctaagtcaaactttcgtagcttcatacgtaccaattcaaatatatacacataccggcgacggcgagagccagaaggtagcggacagcaatacaaatatgcattgctcactaattgtcacaagcccctagaggtattgacggattcgcccaatatgataagggcactgcattttcgggattgtcatggctcgaaaggactaaaagattatgcatttttgcctgcaaagttgtccctaaaagttctggatttaagtgggtgcaacatagcctacctgccagcttctatcggtgaattggctgtattgaggtatctcaatgctccagagattaaaaatgaaatgctcccagactctctgagcaaactgtcaaaattaatatacctcaacctaagtgggtccaatatttcagcactgcctgattcaattggtgatatcgaaggtctaatgcatcttgatatatcaaattgtgtgcttttgtgtgagctcccagaatcatttgtggacctaaaaaatctggtatatctagatttatcacattgccagatcaaaattacagcaagagtttttagtggtctcaccaatatccagcatttgaatttatcaaaaagtcttattcatggaggtgacgggttggaggggctgcaggaagccgttggtggtctcaccgaacttcggtatttaaatctatcagggtgctttgaaaatctgaggccagatgaggtattaagttttgttgaccgtatttgtaggcttacaaatctggtgcacttggatttgtctttcaatttgggtcttgtcagtgtgcctgaaagtattggcagcctcaggaagctgcacaccctggatctcttgtgctgccgaaacctagtgacgcttccaaaatgtatgttcaacatggatagcatgaagatgttaaatgttacctgctgtcctcatctagatcagtctacgctcccccgatacaggtattttaccttgccgtactttgaggtccatgctgatgatggcgaatctaccagcaatattggtttgcttcggtatgtgaatcctactcatgagttgtacataagtgggcttgataacacaatatctgcagaagaggttgacagtataaacctaagccaaaaacaggggatccagtcgttgagtctttcatggactagagatgctcagagatctgtggaggacatggaagtcctgggaaagctagtgccacctgatactttaaaatgctttgagctaagaggttatgatagtatgagctttccaacatgggttatgggcatcacgctctatcttcctcgccttaccaaggttgtattgtgggagctgcgtaaatgcaatagtctaccaccactgggccagttaccaacactacaaaagctagttataggaggaatggacagcactttgacagttgatgagggtttctgctgcgccggcccgggagcctttcctctattacaggaacttcaactatgccaaatggagaacctggaagtgtggaacacaacatactcctgtggccagagcaatgaggatgtgcaggaattcatgttcccaaaccttagggaactgttaattcgtgattgccccaagttgagactgaaaccatgcccacctaaaactgtgggatggaagatagagaacagcgacaatgtactgtcgtcatgggatgaggagggagagatcgaccttgcagcattgttcccatcaaggaaagagtttaagaaactttgggaagggaaaacaaaagtgccagcagcttgtagcgcacaatttgaaaaatgcagaaaacctggagcttcctacaatgcttgtcctgaacgcgtggaggtgaaatcgagcaagctgcctttgggaaaatggaggctgttccggcacctccttcccacctatgatttaaggatctcgtgctgcacttatgcgacaagcggctcgtcacaagagatcatccaaggcctcgccttcatcgaatcattatgcctagaagacgatgctcagtctgagcttccgaattggttgggtgagctcacttctcttgaaacgttggagatatcgaagtacccagggctagaggcaccactggatggcatgaagcaactcgcccacctccggaagctgtcgctgataaattgtagaagcatgtcagcactaccgcaatggttgggagaactcatctctctcaaagaactgatcatctcagagtggccaaacctgagcgattttccggagagtatgcagctcctcacctccctcaagatgctacgtttggagcggtgtcccagaattactgcccttccaggatggctgggcgacctcgcttctctcaaaatactagtcatcagcaattgcaagggcatcgtgtctctgccagacagcatacagaagatcaccaggcttgtacgagtataaattgggggagcctgaaacatgctatctgctttgcaactcatttacagggtgcactctctgtaggtgctgcagtagcctggaagtgatgacagacatatatggaggctttcttctactggtgtttgcacagccaagtcagcttatgggggtttcttcattggagccacggtttttggtccttcggatctaatctggaaatcgtgggccccaaagaaatgtcgttttttcccctatggctggttgctcttgacaaatgttggagtgccgaccgtctagccagacggggtttacaggcagcaccctatgtgttgtttgttttgtgaccaagatgaggaaaccatcaaccatcttctggtttcttgctccttctctcggcaattttggttcgtgctgttacaaatggtgggtcttcaacgcctatctccacagccagacacgtccttcttcctagaatggtggtcaggttctgctgcagtggtggatgagcaatttcagcagggtttctactacatcatcctgcttggtgcttggctcctttggaagcaccgtaaccgatgtgtcttcgatgggattgggatcaaacccgatgtgcagcatgtgttgtccttagccacagaggaaatgagactttgggggctagctggtgcgaagggaattaggatgttgacttgttggcgagtaatcctctagcttgatccaggtcatgtttctttgttctggtcgagatttgtgagtgtgttgtttttctattctttttcttttttctttgtaatctgttttggggttctcagttctctatcccttttcatcttcttaatacaaagatacacagttgtcctgcgtgtttgaaaaaaaaatacttttaaacatagttaatgaactagtacatcaacattcaaaatttagttgatgttc

SEQ ID NO: 27922 - DNA, 5740 bp, Zea Mays
ggcactcacactaccatcgctttccgcgtccgccgttttaacaatcgcattgtcagatctacttcgatctcacttctggttaactgagggcgttcctcgatcggatctcctgctccggctccggctcctgctccagctgaatggataacatgctaggcgacttgtacaagccagatgacggcgacgacttctacagcaaaaaataccgcgacgagctagagaatgtgtcattccaactattagaagaaattacagatggtttctctgagagtcgagagctcggccgaggatcctttggagtggtttacaggggattgactaaaaatggtgattacgttgctgtgaagaagcttcatgctaatgtcactgatcttaaccataagcagtttcaaaatgagttatataaccttgcaaaacttaagcatgaaaacattgtacggatttatggctattgctatgaaattaagaaaacatttatggagcacgatagaagaaaaattcttgtcgaagagccgcgtatagcgctctgccttgagtatttacacaatggaagccttcaagatcatatttcggatgagttttctggtcttgactgggacacacgctacaggattatggaaggggtctgtcgtggtttatatcatatccataggaatctaaagaaacctctttatcatttggacctaaaacctgccaacatattactaagtaaaaccatgcaaccaaagcttgcagattttgggttatctaggatctttcggaatgaagaactaacacgaacgactaaaagtcctctaggaactcttgggtaccagccaccagaatacattgaaagaggtgaagtctcagaaaaattcgacatattcagcttaggtgtcgtaatgatacacctggtttcgggacgtggaggcttcgaaagatatgcatgcatgcatagtgaagaatttatcaatcaggtaaaaacaaactggaggaaaagatttaagcaattacagaggaattccttacgtaaagtcaaagtgtactgccacgaggtagagacatgcactcggatagcactgaattgtgtggagaaagacacacagaaaaggcctgatatagatatggtcatcaataatctaaaggaccgtaagacccatagattcaagagtacttggacaagtagttttcggcaggatggaagaatgtatggaagctatatgccatattcaaacagatatttaaacaaattgatgtcaggctctatttgcaccgaaacaaaattttatcgaagagaaaaattaccgaatgttggagaagaattcattatagggagaaaagaagagaaacagaaaatagtggcatctttactacagagcatgacacaacacatcactatccttcctatctatggcattggaggaattggcaagacaaccattgcaaagttgatttactatgatacaaatttcaatagttactctcgagtatgggtctatgtttcaccgaaatttgacttgaagaaagttggaaacactgtaatttcacaactctctagtgaggagagccaaattaatgaaacacaaatgatacatagttgcctgatgaaattactttctggtaaaaaggttctgattgttttagatgacttgtgggaggatagtttatttcaactgaataatttgaaggatatgctaagttatggtgatagcatcaatgtaatagttatagtaaccacacgcagtaaacatgttgcagagaatgttagcactaatgttgagccacacaagatagaacccttgacagatagcatgtgctgggatataatgaaacaaagaagcaactttgaagctaaaaatcacaaagaacatttggcacatataggaatggagatcgctgtaaagtgtggaggtgtggctttggcagctcaatcccttgggttcatgttgaagcccatggaattatgtgatgaatggattgaagtcagagacagtgacatctggaataaatctatttcgaaggatgccaattcaccaaaccatgtgcttgcatccttgatgttaagttgtaccaaaatggatcgatgcttgatattatgctttatctactgtgcaatctttccaaaaggtcatcatatagtcaaagaagaactaatacaacaatggatttctttgggtttcatccagccaacaaaattacactccaatatgcagatatgtgagaagtatattttgcagctcataggattgtctttcattcaagatacaatgtcaccaaagtattctcaagcatacaaaaaaggcctcacattgttcaccatgcacgatctcgtgcatgatttggcaagattactaacggctggtgaaattctggatgcttccaatattgggactatggatgcgaggcatgttgcccgcgagcctgcaactaggtcattatttcatgggtacatgcatgctaagtcaaactttcgtagcttcatacgtaccaattcaaatatatacacataccggcgacggcgagagccagaaggtagcggacagcaatacaaatatgcattgctcactaattgtcacaagcccctagaggtattgacggattcgcccaatatgataagggcactgcattttcgggattgtcatggctcgaaaggactaaaagattatgcatttttgcctgcaaagttgtccctaaaagttctggatttaagtgggtgcaacatagcctacctgccagcttctatcggtgaattggctgtattgaggtatctcaatgctccagagattaaaaatgaaatgctcccagactctctgagcaaactgtcaaaattaatatacctcaacctaagtgggtccaatatttcagcactgcctgattcaattggtgatatcgaaggtctaatgcatcttgatatatcaaattgtgtgcttttgtgtgagctcccagaatcatttgtggacctaaaaaatctggtatatctagatttatcacattgccagatcaaaattacagcaagagtttttagtggtctcaccaatatccagcatttgaatttatcaaaaagtcttattcatggaggtgacgggttggaggggctgcaggaagccgttggtggtctcaccgaacttcggtatttaaatctatcagggtgctttgaaaatctgaggccagatgaggtattaagttttgttgaccgtatttgtaggcttacaaatctggtgcacttggatttgtctttcaatttgggtcttgtcagtgtgcctgaaagtattggcagcctcaggaagctgcacaccctggatctcttgtgctgccgaaacctagtgacgcttccaaaatgtatgttcaacatggatagcatgaagatgttaaatgttacctgctgtcctcatctagatcagtctacgctcccccgatacaggtattttaccttgccgtactttgaggtccatgctgatgatggcgaatctaccagcaatattggtttgcttcggtatgtgaatcctactcatgagttgtacataagtgggcttgataacacaatatctgcagaagaggttgacagtataaacctaagccaaaaacaggggatccagtcgttgagtctttcatggactagagatgctcagagatctgtggaggacatggaagtcctgggaaagctagtgccacctgatactttaaaatgctttgagctaagaggttatgatagtatgagctttccaacatgggttatgggcatcacgctctatcttcctcgccttaccaaggttgtattgtgggagctgcgtaaatgcaatagtctaccaccactgggccagttaccaacactacaaaagctagttataggaggaatggacagcactttgacagttgatgagggtttctgctgcgccggcccgggagcctttcctctattacaggaacttcaactatgccaaatggagaacctggaagtgtggaacacaacatactcctgtggccagagcaatgaggatgtgcaggaattcatgttcccaaaccttagggaactgttaattcgtgattgccccaagttgagactgaaaccatgcccacctaaaactgtgggatggaagatagagaacagcgacaatgtactgtcgtcatgggatgaggagggagagatcgaccttgcagcattgttcccatcaaggaaagagtttaagaaactttgggaagggaaaacaaaagtgccagcagcttgtagcgcacaatttgaaaaatgcagaaaacctggagcttcctacaatgcttgtcctgaacgcgtggaggtgaaatcgagcaagctgcctttgggaaaatggaggctgttccggcacctccttcccacctatgatttaaggatctcgtgctgcacttatgcgacaagcggctcgtcacaagagatcatccaaggcctcgccttcatcgaatcattatgcctagaagacgatgctcagtctgagcttccgaattggttgggtgagctcacttctcttgaaacgttggagatatcgaagtacccagggctagaggcaccactggatggcatgaagcaactcgcccacctccggaagctgtcgctgataaattgtagaagcatgtcagcactaccgcaatggttgggagaactcatctctctcaaagaactgatcatctcagagtggccaaacctgagcgattttccggagagtatgcagctcctcacctccctcaagatgctacgtttggagcggtgtcccagaattactgcccttccaggatggctgggcgacctcgcttctctcaaaatactagtcatcagcaattgcaagggcatcgtgtctctgccagacagcatacagaagatcaccaggcttgtacgagtataaattgggggagcctgaaacatgctatctgctttgcaactcatttacagtagcctggaagtgatgacagacatatatggaggctttcttctactggtgtttgcacagccaagtcagcttatgggggtttcttcattggagccacggtttttggtccttcggatctaatctggaaatcgtgggccccaaagaaatgtcgttttttcccctatggctggttgctcttgacaaatgttggagtgccgaccgtctagccagacggggtttacaggcagcaccctatgtgttgtttgttttgtgaccaagatgaggaaaccatcaaccatcttctggtttcttgctccttctctcggcaattttggttcgtgctgttacaaatggtgggtcttcaacgcctatctccacagccagacacgtccttcttcctagaatggtggtcaggttctgctgcagtggtggatgagcaatttcagcagggtttctactacatcatcctgcttggtgcttggctcctttggaagcaccgtaaccgatgtgtcttcgatgggattgggatcaaacccgatgtgcagcatgtgttgtccttagccacagaggaaatgagactttgggggctagctggtgcgaagggaattaggatgttgacttgttggcgagtaatcctctagcttgatccaggtcatgtttctttgttctggtcgagatttgtgagtgtgttgtttttctattctttttcttttttctttgtaatctgttttggggttctcagttctctatcccttttcatcttcttaatacaaagatacacagttgtcctgcgtgtttgaaaaaaaaatacttttaaacatagttaatgaactagtacatcaacattcaaaatttagttgatgttc

SEQ ID NO: 27923 - DNA, 3117 bp, Zea Mays
gttaaaaggcactcacactaccatcgctttccgcgtccgccgttttaacaatcgcattgtcagatctacttcgatctcacttctggttaactgagggcgttcctcgatcggatctcctgctccggctccggctcctgctccagctgaatggataacatgctaggcgacttgtacaagccagatgacggcgacgacttctacagcaaaaaataccgcgacgagctagagaatgtgtcattccaactattagaagaaattacagatggtttctctgagagtcgagagctcggccgaggatcctttggagtggtttacaggggattgactaaaaatggtgattacgttgctgtgaagaagcttcatgctaatgtcactgatcttaaccataagcagtttcaaaatgagttatataaccttgcaaaacttaagcatgaaaacattgtacggatttatggctattgctatgaaattaagaaaacatttatggagcacgatagaagaaaaattcttgtcgaagagccgcgtatagcgctctgccttgagtatttacacaatggaagccttcaagatcatatttcggatgagttttctggtcttgactgggacacacgctacaggattatggaaggggtctgtcgtggtttatatcatatccataggaatctaaagaaacctctttatcatttggacctaaaacctgccaacatattactaagtaaaaccatgcaaccaaagcttgcagattttgggttatctaggatctttcggaatgaagaactaacacgaacgactaaaagtcctctaggaactcttgggtaccagccaccagaatacattgaaagaggtgaagtctcagaaaaattcgacatattcagcttaggtgtcgtaatgatacacctggtttcgggacgtggaggcttcgaaagatatgcatgcatgcatagtgaagaatttatcaatcaggtaaaaacaaactggaggaaaagatttaagcaattacagaggaattccttacgtaaagtcaaagtgtactgccacgaggtagagacatgcactcggatagcactgaattgtgtggagaaagacacacagaaaaggcctgatatagatatggtcatcaataatctaaaggaccgtaagacccatagattcaagagtacttggacaagtagttttcggcaggatggaagaatgtatggaagctatatgccatattcaaacagatatttaaacaaattgatgtcaggctctatttgcaccgaaacaaaattttatcgaagagaaaaattaccgaatgttggagaagaattcattatagggagaaaagaagagaaacagaaaatagtggcatctttactacagagcatgacacaacacatcactatccttcctatctatggcattggaggaattggcaagacaaccattgcaaagttgatttactatgatacaaatttcaatagttactctcgagtatgggtctatgtttcaccgaaatttgacttgaagaaagttggaaacactgtaatttcacaactctctagtgaggagagccaaattaatgaaacacaaatgatacatagttgcctgatgaaattactttctggtaaaaaggttctgattgttttagatgacttgtgggaggatagtttatttcaactgaataatttgaaggatatgctaagttatggtgatagcatcaatgtaatagttatagtaaccacacgcagtaaacatgttgcagagaatgttagcactaatgttgagccacacaagatagaacccttgacagatagcatgtgctgggatataatgaaacaaagaagcaactttgaagctaaaaatcacaaagaacatttggcacatataggaatggagatcgctgtaaagtgtggaggtgtggctttggcagctcaatcccttgggttcatgttgaagcccatggaattatgtgatgaatggattgaagtcagagacagtgacatctggaataaatctatttcgaaggatgccaattcaccaaaccatgtgcttgcatccttgatgttaagttgtaccaaaatggatcgatgcttgatattatgctttatctactgtgcaatctttccaaaaggtcatcatatagtcaaagaagaactaatacaacaatggatttctttgggtttcatccagccaacaaaattacactccaatatgcagatatgtgagaagtatattttgcagctcataggattgtctttcattcaagatacaatgtcaccaaaggtgctgcagtagcctggaagtgatgacagacatatatggaggctttcttctactggtgtttgcacagccaagtcagcttatgggggtttcttcattggagccacggtttttggtccttcggatctaatctggaaatcgtgggccccaaagaaatgtcgttttttcccctatggctggttgctcttgacaaatgttggagtgccgaccgtctagccagacggggtttacaggcagcaccctatgtgttgtttgttttgtgaccaagatgaggaaaccatcaaccatcttctggtttcttgctccttctctcggcaattttggttcgtgctgttacaaatggtgggtcttcaacgcctatctccacagccagacacgtccttcttcctagaatggtggtcaggttctgctgcagtggtggatgagcaatttcagcagggtttctactacatcatcctgcttggtgcttggctcctttggaagcaccgtaaccgatgtgtcttcgatgggattgggatcaaacccgatgtgcagcatgtgttgtccttagccacagaggaaatgagactttgggggctagctggtgcgaagggaattaggatgttgacttgttggcgagtaatcctctagcttgatccaggtcatgtttctttgttctggtcgagatttgtgagtgtgttgtttttctattctttttcttttttctttgtaatctgttttggggttctcagttctctatcccttttcatcttcttaatacaaagatacacagttgtcctgcgtgtttgaaaaaaaaatacttttaaacatagttaatgaactagtacatcaacattcaaaatttagttgatgttc

SEQ ID NO: 27924 - DNA, 5591 bp, Zea Mays
caacaagttaaaaggcactcacactaccatcgctttccgcgtccgccgttttaacaatcgcattgtcagatctacttcgatctcacttctggttaactgagggcgttcctcgatcggatctcctgctccggctccggctcctgctccagctgaatggataacatgctaggcgacttgtacaagccagatgacggcgacgacttctacagcaaaaaataccgcgacgagctagagaatgtgtcattccaactattagaagaaattacagatggtttctctgagagtcgagagctcggccgaggatcctttggagtggtttacaggggattgactaaaaatggtgattacgttgctgtgaagaagcttcatgctaatgtcactgatcttaaccataagcagtttcaaaatgagttatataaccttgcaaaacttaagcatgaaaacattgtacggatttatggctattgctatgaaattaagaaaacatttatggagcacgatagaagaaaaattcttgtcgaagagccgcgtatagcgctctgccttgagtatttacacaatggaagccttcaagatcatatttcggatgagttttctggtcttgactgggacacacgctacaggattatggaaggggtctgtcgtggtttatatcatatccataggaatctaaagaaacctctttatcatttggacctaaaacctgccaacatattactaagtaaaaccatgcaaccaaagcttgcagattttgggttatctaggatctttcggaatgaagaactaacacgaacgactaaaagtcctctaggaactcttgggtaccagccaccagaatacattgaaagaggtgaagtctcagaaaaattcgacatattcagcttaggtgtcgtaatgatacacctggtttcgggacgtggaggcttcgaaagatatgcatgcatgcatagtgaagaatttatcaatcaggtaaaaacaaactggaggaaaagatttaagcaattacagaggaattccttacgtaaagtcaaagtgtactgccacgaggtagagacatgcactcggatagcactgaattgtgtggagaaagacacacagaaaaggcctgatatagatatggtcatcaataatctaaaggaccgtaagacccatagattcaagagtacttggacaagtagttttcggcaggatggaagaatgtatggaagctatatgccatattcaaacagatatttaaacaaattgatgtcaggctctatttgcaccgaaacaaaattttatcgaagagaaaaattaccgaatgttggagaagaattcattatagggagaaaagaagagaaacagaaaatagtggcatctttactacagagcatgacacaacacatcactatccttcctatctatggcattggaggaattggcaagacaaccattgcaaagttgatttactatgatacaaatttcaatagttactctcgagtatgggtctatgtttcaccgaaatttgacttgaagaaagttggaaacactgtaatttcacaactctctagtgaggagagccaaattaatgaaacacaaatgatacatagttgcctgatgaaattactttctggtaaaaaggttctgattgttttagatgacttgtgggaggatagtttatttcaactgaataatttgaaggatatgctaagttatggtgatagcatcaatgtaatagttatagtaaccacacgcagtaaacatgttgcagagaatgttagcactaatgttgagccacacaagatagaacccttgacagatagcatgtgctgggatataatgaaacaaagaagcaactttgaagctaaaaatcacaaagaacatttggcacatataggaatggagatcgctgtaaagtgtggaggtgtggctttggcagctcaatcccttgggttcatgttgaagcccatggaattatgtgatgaatggattgaagtcagagacagtgacatctggaataaatctatttcgaaggatgccaattcaccaaaccatatatgtgagaagtatattttgcagctcataggattgtctttcattcaagatacaatgtcaccaaagtattctcaagcatacaaaaaaggcctcacattgttcaccatgcacgatctcgtgcatgatttggcaagattactaacggctggtgaaattctggatgcttccaatattgggactatggatgcgaggcatgttgcccgcgagcctgcaactaggtcattatttcatgggtacatgcatgctaagtcaaactttcgtagcttcatacgtaccaattcaaatatatacacataccggcgacggcgagagccagaaggtagcggacagcaatacaaatatgcattgctcactaattgtcacaagcccctagaggtattgacggattcgcccaatatgataagggcactgcattttcgggattgtcatggctcgaaaggactaaaagattatgcatttttgcctgcaaagttgtccctaaaagttctggatttaagtgggtgcaacatagcctacctgccagcttctatcggtgaattggctgtattgaggtatctcaatgctccagagattaaaaatgaaatgctcccagactctctgagcaaactgtcaaaattaatatacctcaacctaagtgggtccaatatttcagcactgcctgattcaattggtgatatcgaaggtctaatgcatcttgatatatcaaattgtgtgcttttgtgtgagctcccagaatcatttgtggacctaaaaaatctggtatatctagatttatcacattgccagatcaaaattacagcaagagtttttagtggtctcaccaatatccagcatttgaatttatcaaaaagtcttattcatggaggtgacgggttggaggggctgcaggaagccgttggtggtctcaccgaacttcggtatttaaatctatcagggtgctttgaaaatctgaggccagatgaggtattaagttttgttgaccgtatttgtaggcttacaaatctggtgcacttggatttgtctttcaatttgggtcttgtcagtgtgcctgaaagtattggcagcctcaggaagctgcacaccctggatctcttgtgctgccgaaacctagtgacgcttccaaaatgtatgttcaacatggatagcatgaagatgttaaatgttacctgctgtcctcatctagatcagtctacgctcccccgatacaggtattttaccttgccgtactttgaggtccatgctgatgatggcgaatctaccagcaatattggtttgcttcggtatgtgaatcctactcatgagttgtacataagtgggcttgataacacaatatctgcagaagaggttgacagtataaacctaagccaaaaacaggggatccagtcgttgagtctttcatggactagagatgctcagagatctgtggaggacatggaagtcctgggaaagctagtgccacctgatactttaaaatgctttgagctaagaggttatgatagtatgagctttccaacatgggttatgggcatcacgctctatcttcctcgccttaccaaggttgtattgtgggagctgcgtaaatgcaatagtctaccaccactgggccagttaccaacactacaaaagctagttataggaggaatggacagcactttgacagttgatgagggtttctgctgcgccggcccgggagcctttcctctattacaggaacttcaactatgccaaatggagaacctggaagtgtggaacacaacatactcctgtggccagagcaatgaggatgtgcaggaattcatgttcccaaaccttagggaactgttaattcgtgattgccccaagttgagactgaaaccatgcccacctaaaactgtgggatggaagatagagaacagcgacaatgtactgtcgtcatgggatgaggagggagagatcgaccttgcagcattgttcccatcaaggaaagagtttaagaaactttgggaagggaaaacaaaagtgccagcagcttgtagcgcacaatttgaaaaatgcagaaaacctggagcttcctacaatgcttgtcctgaacgcgtggaggtgaaatcgagcaagctgcctttgggaaaatggaggctgttccggcacctccttcccacctatgatttaaggatctcgtgctgcacttatgcgacaagcggctcgtcacaagagatcatccaaggcctcgccttcatcgaatcattatgcctagaagacgatgctcagtctgagcttccgaattggttgggtgagctcacttctcttgaaacgttggagatatcgaagtacccagggctagaggcaccactggatggcatgaagcaactcgcccacctccggaagctgtcgctgataaattgtagaagcatgtcagcactaccgcaatggttgggagaactcatctctctcaaagaactgatcatctcagagtggccaaacctgagcgattttccggagagtatgcagctcctcacctccctcaagatgctacgtttggagcggtgtcccagaattactgcccttccaggatggctgggcgacctcgcttctctcaaaatactagtcatcagcaattgcaagggcatcgtgtctctgccagacagcatacagaagatcaccaggcttgtacgagtataaattgggggagcctgaaacatgctatctgctttgcaactcatttacaggtgctgcagtagcctggaagtgatgacagacatatatggaggctttcttctactggtgtttgcacagccaagtcagcttatgggggtttcttcattggagccacggtttttggtccttcggatctaatctggaaatcgtgggccccaaagaaatgtcgttttttcccctatggctggttgctcttgacaaatgttggagtgccgaccgtctagccagacggggtttacaggcagcaccctatgtgttgtttgttttgtgaccaagatgaggaaaccatcaaccatcttctggtttcttgctccttctctcggcaattttggttcgtgctgttacaaatggtgggtcttcaacgcctatctccacagccagacacgtccttcttcctagaatggtggtcaggttctgctgcagtggtggatgagcaatttcagcagggtttctactacatcatcctgcttggtgcttggctcctttggaagcaccgtaaccgatgtgtcttcgatgggattgggatcaaacccgatgtgcagcatgtgttgtccttagccacagaggaaatgagactttgggggctagctggtgcgaagggaattaggatgttgacttgttggcgagtaatcctctagcttgatccaggtcatgtttctttgttctggtcgagatttgtgagtgtgttgtttttctattctttttcttttttctttgtaatctgttttggggttctcagttctctatcccttttcatcttcttaatacaaagatacacagttgtcctgcgtgtttgaaaaaaaaatacttttaaacatagttaatgaactagtacatcaacattcaaaatttagttgatgttc

SEQ ID NO: 27925 - DNA, 5778 bp, Zea Mays
caacaagttaaaaggcactcacactaccatcgctttccgcgtccgccgttttaacaatcgcattgtcagatctacttcgatctcacttctggttaactgagggcgttcctcgatcggatctcctgctccggctccggctcctgctccagctgaatggataacatgctaggcgacttgtacaagccagatgacggcgacgacttctacagcaaaaaataccgcgacgagctagagaatgtgtcattccaactattagaagaaattacagatggtttctctgagagtcgagagctcggccgaggatcctttggagtggtttacaggggattgactaaaaatggtgattacgttgctgtgaagaagcttcatgctaatgtcactgatcttaaccataagcagtttcaaaatgagttatataaccttgcaaaacttaagcatgaaaacattgtacggatttatggctattgctatgaaattaagaaaacatttatggagcacgatagaagaaaaattcttgtcgaagagccgcgtatagcgctctgccttgagtatttacacaatggaagccttcaagatcatatttcggatgagttttctggtcttgactgggacacacgctacaggattatggaaggggtctgtcgtggtttatatcatatccataggaatctaaagaaacctctttatcatttggacctaaaacctgccaacatattactaagtaaaaccatgcaaccaaagcttgcagattttgggttatctaggatctttcggaatgaagaactaacacgaacgactaaaagtcctctaggaactcttgggtaccagccaccagaatacattgaaagaggtgaagtctcagaaaaattcgacatattcagcttaggtgtcgtaatgatacacctggtttcgggacgtggaggcttcgaaagatatgcatgcatgcatagtgaagaatttatcaatcaggtaaaaacaaactggaggaaaagatttaagcaattacagaggaattccttacgtaaagtcaaagtgtactgccacgaggtagagacatgcactcggatagcactgaattgtgtggagaaagacacacagaaaaggcctgatatagatatggtcatcaataatctaaaggaccgtaagacccatagattcaagagtacttggacaagtagttttcggcaggatggaagaatgtatggaagctatatgccatattcaaacagatatttaaacaaattgatgtcaggctctatttgcaccgaaacaaaattttatcgaagagaaaaattaccgaatgttggagaagaattcattatagggagaaaagaagagaaacagaaaatagtggcatctttactacagagcatgacacaacacatcactatccttcctatctatggcattggaggaattggcaagacaaccattgcaaagttgatttactatgatacaaatttcaatagttactctcgagtatgggtctatgtttcaccgaaatttgacttgaagaaagttggaaacactgtaatttcacaactctctagtgaggagagccaaattaatgaaacacaaatgatacatagttgcctgatgaaattactttctggtaaaaaggttctgattgttttagatgacttgtgggaggatagtttatttcaactgaataatttgaaggatatgctaagttatggtgatagcatcaatgtaatagttatagtaaccacacgcagtaaacatgttgcagagaatgttagcactaatgttgagccacacaagatagaacccttgacagatagcatgtgctgggatataatgaaacaaagaagcaactttgaagctaaaaatcacaaagaacatttggcacatataggaatggagatcgctgtaaagtgtggaggtgtggctttggcagctcaatcccttgggttcatgttgaagcccatggaattatgtgatgaatggattgaagtcagagacagtgacatctggaataaatctatttcgaaggatgccaattcaccaaaccatgtgcttgcatccttgatgttaagttgtaccaaaatggatcgatgcttgatattatgctttatctactgtgcaatctttccaaaaggtcatcatatagtcaaagaagaactaatacaacaatggatttctttgggtttcatccagccaacaaaattacactccaatatgcagatatgtgagaagtatattttgcagctcataggattgtctttcattcaagatacaatgtcaccaaagtattctcaagcatacaaaaaaggcctcacattgttcaccatgcacgatctcgtgcatgatttggcaagattactaacggctggtgaaattctggatgcttccaatattgggactatggatgcgaggcatgttgcccgcgagcctgcaactaggtcattatttcatgggtacatgcatgctaagtcaaactttcgtagcttcatacgtaccaattcaaatatatacacataccggcgacggcgagagccagaaggtagcggacagcaatacaaatatgcattgctcactaattgtcacaagcccctagaggtattgacggattcgcccaatatgataagggcactgcattttcgggattgtcatggctcgaaaggactaaaagattatgcatttttgcctgcaaagttgtccctaaaagttctggatttaagtgggtgcaacatagcctacctgccagcttctatcggtgaattggctgtattgaggtatctcaatgctccagagattaaaaatgaaatgctcccagactctctgagcaaactgtcaaaattaatatacctcaacctaagtgggtccaatatttcagcactgcctgattcaattggtgatatcgaaggtctaatgcatcttgatatatcaaattgtgtgcttttgtgtgagctcccagaatcatttgtggacctaaaaaatctggtatatctagatttatcacattgccagatcaaaattacagcaagagtttttagtggtctcaccaatatccagcatttgaatttatcaaaaagtcttattcatggaggtgacgggttggaggggctgcaggaagccgttggtggtctcaccgaacttcggtatttaaatctatcagggtgctttgaaaatctgaggccagatgaggtattaagttttgttgaccgtatttgtaggcttacaaatctggtgcacttggatttgtctttcaatttgggtcttgtcagtgtgcctgaaagtattggcagcctcaggaagctgcacaccctggatctcttgtgctgccgaaacctagtgacgcttccaaaatgtatgttcaacatggatagcatgaagatgttaaatgttacctgctgtcctcatctagatcagtctacgctcccccgatacaggtattttaccttgccgtactttgaggtccatgctgatgatggcgaatctaccagcaatattggtttgcttcggtatgtgaatcctactcatgagttgtacataagtgggcttgataacacaatatctgcagaagaggttgacagtataaacctaagccaaaaacaggggatccagtcgttgagtctttcatggactagagatgctcagagatctgtggaggacatggaagtcctgggaaagctagtgccacctgatactttaaaatgctttgagctaagaggttatgatagtatgagctttccaacatgggttatgggcatcacgctctatcttcctcgccttaccaaggttgtattgtgggagctgcgtaaatgcaatagtctaccaccactgggccagttaccaacactacaaaagctagttataggaggaatggacagcactttgacagttgatgagggtttctgctgcgccggcccgggagcctttcctctattacaggaacttcaactatgccaaatggagaacctggaagtgtggaacacaacatactcctgtggccagagcaatgaggatgtgcaggaattcatgttcccaaaccttagggaactgttaattcgtgattgccccaagttgagactgaaaccatgcccacctaaaactgtgggatggaagatagagaacagcgacaatgtactgtcgtcatgggatgaggagggagagatcgaccttgcagcattgttcccatcaaggaaagagtttaagaaactttgggaagggaaaacaaaagtgccagcagcttgtagcgcacaatttgaaaaatgcagaaaacctggagcttcctacaatgcttgtcctgaacgcgtggaggtgaaatcgagcaagctgcctttgggaaaatggaggctgttccggcacctccttcccacctatgatttaaggatctcgtgctgcacttatgcgacaagcggctcgtcacaagagatcatccaaggcctcgccttcatcgaatcattatgcctagaagacgatgctcagtctgagcttccgaattggttgggtgagctcacttctcttgaaacgttggagatatcgaagtacccagggctagaggcaccactggatggcatgaagcaactcgcccacctccggaagctgtcgctgataaattgtagaagcatgtcagcactaccgcaatggttgggagaactcatctctctcaaagaactgatcatctcagagtggccaaacctgagcgattttccggagagtatgcagctcctcacctccctcaagatgctacgtttggagcggtgtcccagaattactgcccttccaggatggctgggcgacctcgcttctctcaaaatactagtcatcagcaattgcaagggcatcgtgtctctgccagacagcatacagaagatcaccaggcttgtacgagtataaattgggggagcctgaaacatgctatctgctttgcaactcatttacagggtgcactctctgtaggtgctgcagtagcctggaagtgatgacagacatatatggaggctttcttctactggtgtttgcacagccaagtcagcttatgggggtttcttcattggagccacggtttttggtccttcggatctaatctggaaatcgtgggccccaaagaaatgtcgttttttcccctatggctggttgctcttgacaaatgttggagtgccgaccgtctagccagacggggtttacaggcagcaccctatgtgttgtttgttttgtgaccaagatgaggaaaccatcaaccatcttctggtttcttgctccttctctcggcaattttggttcgtgctgttacaaatggtgggtcttcaacgcctatctccacagccagacacgtccttcttcctagaatggtggtcaggttctgctgcagtggtggatgagcaatttcagcagggtttctactacatcatcctgcttggtgcttggctcctttggaagcaccgtaaccgatgtgtcttcgatgggattgggatcaaacccgatgtgcagcatgtgttgtccttagccacagaggaaatgagactttgggggctagctggtgcgaagggaattaggatgttgacttgttggcgagtaatcctctagcttgatccaggtcatgtttctttgttctggtcgagatttgtgagtgtgttgtttttctattctttttcttttttctttgtaatctgttttggggttctcagttctctatcccttttcatcttcttaatacaaagatacacagttgtcctgcgtgtttgaaaaaaaaatacttttaaacatagttaatgaactagtacatcaacattcaaaatttagttgatgttc

SEQ ID NO: 27926 - DNA, 2111 bp, Zea Mays
ctcctcaacaagttaaaaggcactcacactaccatcgctttccgcgtccgccgttttaacaatcgcattgtcagatctacttcgatctcacttctggttaactgagggcgttcctcgatcggatctcctgctccggctccggctcctgctccagctgaatggataacatgctaggcgacttgtacaagccagatgacggcgacgacttctacagcaaaaaataccgcgacgagctagagaatgtgtcattccaactattagaagaaattacagatggtttctctgagagtcgagagctcggccgaggatcctttggagtggtttacaggggattgactaaaaatggtgattacgttgctgtgaagaagcttcatgctaatgtcactgatcttaaccataagcagtttcaaaatgagttatataaccttgcaaaacttaagcatgaaaacattgtacggatttatggctattgctatgaaattaagaaaacatttatggagcacgatagaagaaaaattcttgtcgaagagccgcgtatagcgctctgccttgagtatttacacaatggaagccttcaagatcatatttcggatgagttttctggtcttgactgggacacacgctacaggattatggaaggggtctgtcgtggtttatatcatatccataggaatctaaagaaacctctttatcatttggacctaaaacctgccaacatattactaagtaaaaccatgcaaccaaagcttgcagattttgggttatctaggatctttcggaatgaagaactaacacgaacgactaaaagtcctctaggaactcttgggtaccagccaccagaatacattgaaagaggtgaagtctcagaaaaattcgacatattcagcttaggtgtcgtaatgatacacctggtttcgggacgtggaggcttcgaaagatatgcatgcatgcatagtgaagaatttatcaatcaggtaaaaacaaactggaggaaaagatttaagcaattacagaggaattccttacgtaaagtcaaagtgtactgccacgaggtagagacatgcactcggatagcactgaattgtgtggagaaagacacacagaaaaggcctgatatagatatggtcatcaataatctaaaggaccgtaagacccatagattcaagagtacttggacaagtagttttcggcaggatggaagaatgtatggaagctatatgccatattcaaacagatatttaaacaaattgatgtcaggctctatttgcaccgaaacaaaattttatcgaagagaaaaattaccgaatgttggagaagaattcattatagggagaaaagaagagaaacagaaaatagtggcatctttactacagagcatgacacaacacatcactatccttcctatctatggcattggaggaattggcaagacaaccattgcaaagttgatttactatgatacaaatttcaatagttactctcgagtatgggtctatgtttcaccgaaatttgacttgaagaaagttggaaacactgtaatttcacaactctctagtgaggagagccaaattaatgaaacacaaatgatacatagttgcctgatgaaattactttctggtaaaaaggttctgattgttttagatgacttgtgggaggatagtttatttcaactgaataatttgaaggatatgctaagttatggtgatagcatcaatgtaatagttatagtaaccacacgcagtaaacatgttgcagagaatgttagcactaatgttgagccacacaagatagaacccttgacagatagcatgtgctgggatataatgaaacaaagaagcaactttgaagctaaaaatcacaaagaacatttggcacatataggaatggagatcgctgtaaagtgtggaggtgtggctttggcagctcaatcccttgggttcatgttgaagcccatggaattatgtgatgaatggattgaagtcagagacagtgacatctggaataaatctatttcgaaggatgccaattcaccaaaccatatatgtgagaagtatattttgcagctcataggattgtctttcattcaagatacaatgtcaccaaagtcatga

SEQ ID NO: 27927 - DNA, 2103 bp, Zea Mays
ccaaaaactcgaacctccgtgactgggtcggccacggcaatctcgaaatcaacgagatcggcgaccaacacggagatctcgaacctcaggaaagatccaacacaaccgaggtggaggtggtctcgaggcagcggtgttgaattgacgatgtgtgacatttgggaggaattccgggcggcgctttgcatatccggtggaaaccgccgcccgcccccaaccctccctcccccgaatctcgccggcggcggtgacgaagatggcggtggtgtcgaaagtggcggcggccaggaggagggggacatcatcagtgcgctacccgacgacgtcctcctcttcatcctcagccgcctcccgtccgccgccgccgcgcggaccagcgtcctctccaaccgctggcgcctcctctgggcgcagctcccggtgctgtggttcccgctccccgccgaaccggcccgcgcgctgccctcgcccgctaccgccgcgcggaccagggaccgctcccaccgttggcgccgccgcctcttggcgcatctcccagcgctgcggttcccgctccccgtcggaccggcccgcgcgctgccctcgcttgcctccgctcgcgccgcactcacccaacactcggcaccctcgctctggatcctgaggatagacgctaacgacgcggacccggtggacgcggccgcggtactccgcctcgccgcgccccgcctcaccaacgcgctctttctccgcaacgtggtacccgaggatcggaagaaggccgtagtgatggaagtcattgagctgccctgcttcgacagggctgcacatcttttcctcgacttaggttaccttcgcctcgcatttccaccgtcgggcgtgttcacgaagctcactgtgctagttctgagccacgtccggttccaaggcgccttggacatcggcgacaccttgtcgtcggcccgctgcccttcgctgcgactactccatctcttcgacgcccaaggggtgtccaaccttggcatctgttcggagtctctcgtcagtatggttctgcataacctgaaagggttacagcagctcagggttgtgtcgccaatgctgagagatctgcatatgtttaattgcttcttcaagaggcaaccggtggccagcatcactgctccagtggctgacatcactgctccgattctggaaaagttcgggtggcttgatgaatatgatccgaggtgggtccagctgggtgaattgtcccagctacaggtactggcgatctccttctttgcaggtgcatggtatggattggttgaacatcagtacaaccggggcagtgtgaagttgttgcaacgctttagggagatccgcgatcttcacatcacgatcttctatccaattgctcaaacctaacacttgtaatttcattgcttcacggtaatgaaattcggtcatgctgttgtgaaaaaagatgtgattctttactggagacatctgtgccattactcagcagaacaagtctgaagtagttctgcagcattttataacgtttatcccttgtgagaaaatcatttattcttgaaagttgctttatttcttgctgcatataaaattttcttgtggcctaatatgaatttgcagaagatcgtttacttccactactgcacggaaggcctgacctcgctgctggctaagaaattacacctgatccttctaacatgtggacatgctattggctcttgtgtgttccatctccttaagatttctactaggataagaagtctgtttctggatatacgtgaatccattaaggaacgagctgcttgttcaccagactgtgcttgtcaccagcagcatgactgggaaagcgaggagctcgtgctgaactctctccaggaactgaacgtttgcggacttagagcaaaccgtgacttcatgtttgtgaaacgactgctgggctggatgggagcgctcaaatcagttaccataatcttcgatcctaaagccactgtccacgaggagctctgcgaggagctactgggcctctctggaccagagacttgcgtgaagatttacctgtatcgcgatggggcaaagaaatatattctaccgttgtacctatttggttga

SEQ ID NO: 27928 - DNA, 3106 bp, Zea Mays
tggcaacacccgaccgtagcgcggcatctccgtcctcgtcgtcaatccctgcgggtgtgcaacagtagcgttcagaacccaccatcattggagttctcagcagcggatatctcgtggtcaatggtggagggctggagggattctatggataggcttgcgctgattccatattctagggtgaatgactttgtcagaggagagtcgaacaacaaagattgtccatcaagatttcatgttgaagcacggagaaggcgtcctccgacaatgaactgcaagcccaaagttgatgggatacttgagtatattctgtattggtgttcttttggtccagatgattataggaagggtggtaatgtacggcctagcaggcccatcgcggaaaagagaaaaacacctgctggccgccctaatacaaagaggggatgtgtgtgccattttattgtgaagcgcttgattgttgaaccatctgtggctcttgtgatatataaccacaataagcatgtagataagaaaggcatgccatgccatggttctatggacaagatggctgtagggacaaaggcaatgtttgcaccatacatatctgatgagttgcgtcttcaagttatgtctttgctctatgttggcattccagtggagaccataatgcagaggcatactgaaatggttgaaaagcaaggaggtccatcaaacagggacgatcttcttactcatagatatgttaggagactggaaaggaaaatacgtcgttctgtttatgagcttgatgatgatgacgctattagtattggcttatgggttgaaaataaccaggattgtgtgttcttctatgaagatttttcggatacagacacctttgtcttgggcatccagacagattggcagctacagcaaatgattcagtttggcagccatagtttaatggcttctgattcaaagtttggaacaaacaagctaaagtatcctgtacatagcatccttgttttcgatcagcacaaaaatgcaattcctgttgcgtggattataacccccaattttgcacatggtgaaatatataaatgggtgggtgctctttatgatcgagcgcatacaaaagatcctacttggcaattgggtggcttcattattgatggtcccttgactgacgttcgcacaataagagaagtattccattgccctgtgctgatcagtttatggcgtatccggcatgcttggcataaaaatttggttaacaaatgttcagacattgagaagcgatcgacaatggccaaacgtcttggagatgcaatttctattatatgcagaggaactggtgatgttgaattatttgaagcctttctgcaagattttgttgagtgtgctgggtttcttgactacttcaaagctgtatggcttccaagacttggggcatggataactgtcttaaaggccacggcattggctagtgcacaggtagcttcagcaatagagagttaccatcacctgctaaaacttcggctgctgaatgaggcagatgaaagtgtctactggcgtgctgattggttggtcgataagttgggtacaaaggtccattcttactactggctggatgaattctcaggaaagaacagtttttcgcgttactggaggagtgagtggagtagtggcccaaacccatggtgccagggaatgcagattccagattccgatgtcgtcattgaaggcaattatgccagtgtggtcagccagaagaacaaggagaagtcccatgtcgtactgaatccaggttctgagtttgcgttgtgcgattgtagctggtcaatgaaggggaacctttgcaaacatgtaataaagtcggcaaaggtctgccgtgacaggggattggcactgccatcgttggccatgttccactattaccaggcattggcaaatcttgttcattgtccacccagtgatactttgattagtgaccatgcaatggctctggcagtttctgttaaaacacagctagatgcagtgttgtgcgctgttaatggaagttcttcaattaggccaggtttccaggatccacagtcaacgagtaagacaagagaagctgaaattgaggaagccaactctgagaatggtgtgtgcacaagtcaaccccagcctggtgctggtgatgatgaggatcaggccattcggactggcaagagaagaaagttaggggacgcttctggtgacactgaagatggttccatatatcaggacagtctggctcgcaagaaatgcaagtcaggggaagcttccggtgacgatgaagaggcctccacagaagagggcagtcgggcttgtgaaagtaggaagccaggagaagcttctactaacaatgaagaggtttccataggccagggcagtagagatcatgagaaaagaaagtcgggagaacctcctggcaatgaaggaacttcagcaacgcaagctacggaaccttctgagactgaaaccagccaagcaaccaatggactggttaggtccctcctcccctcttcggaatgcacctagaacgccttgcgggtcttgtaaattcctagttggattagtcaactgatgaattaaacagcagctgagcttaaaaaaaactagtagctgcgtctgttaagtgtgaacggaagcataaatcagttcatttatcattatgaatgggggggggggggggggtcgtgtgcattatgcaggacaacaattgcaagtcccagtttaactgtttggcacgatgttcaaaatctaatgatcccatgttcttttttttggtaaatgaagcaataccatatcatatggttacctaaacctaccgaattaaggtactgttttgctgtatatagcattcacacttctctagaatagcttgttatgcataagtgattactacttattattacttcctcccgtccctgtgttctggattgaactagagatacaaagttaatctcagttcctatgctttttttatcctaattttgtatctctgatgttcggatgaatttgtttgtgatgttcaaatacagtaacttaaatggcttggcacggctttgatcagcacatctgtagaaaaaaactgtaataaagtaataacagtgtggaaatg

SEQ ID NO: 27929 - DNA, 3101 bp, Zea Mays
tggcaacacccgaccgtagcgcggcatctccgtcctcgtcgtcaatccctgcgggtgtgcaacagtagcgaacccaccatcattggagttctcagcagcggatatctcgtggtcaatggtggagggctggagggattctatggataggcttgcgctgattccatattctagggtgaatgactttgtcagaggagagtcgaacaacaaagattgtccatcaagatttcatgttgaagcacggagaaggcgtcctccgacaatgaactgcaagcccaaagttgatgggatacttgagtatattctgtattggtgttcttttggtccagatgattataggaagggtggtaatgtacggcctagcaggcccatcgcggaaaagagaaaaacacctgctggccgccctaatacaaagaggggatgtgtgtgccattttattgtgaagcgcttgattgttgaaccatctgtggctcttgtgatatataaccacaataagcatgtagataagaaaggcatgccatgccatggttctatggacaagatggctgtagggacaaaggcaatgtttgcaccatacatatctgatgagttgcgtcttcaagttatgtctttgctctatgttggcattccagtggagaccataatgcagaggcatactgaaatggttgaaaagcaaggaggtccatcaaacagggacgatcttcttactcatagatatgttaggagactggaaaggaaaatacgtcgttctgtttatgagcttgatgatgatgacgctattagtattggcttatgggttgaaaataaccaggattgtgtgttcttctatgaagatttttcggatacagacacctttgtcttgggcatccagacagattggcagctacagcaaatgattcagtttggcagccatagtttaatggcttctgattcaaagtttggaacaaacaagctaaagtatcctgtacatagcatccttgttttcgatcagcacaaaaatgcaattcctgttgcgtggattataacccccaattttgcacatggtgaaatatataaatgggtgggtgctctttatgatcgagcgcatacaaaagatcctacttggcaattgggtggcttcattattgatggtcccttgactgacgttcgcacaataagagaagtattccattgccctgtgctgatcagtttatggcgtatccggcatgcttggcataaaaatttggttaacaaatgttcagacattgagaagcgatcgacaatggccaaacgtcttggagatgcaatttctattatatgcagaggaactggtgatgttgaattatttgaagcctttctgcaagattttgttgagtgtgctgggtttcttgactacttcaaagctgtatggcttccaagacttggggcatggataactgtcttaaaggccacggcattggctagtgcacaggtagcttcagcaatagagagttaccatcacctgctaaaacttcggctgctgaatgaggcagatgaaagtgtctactggcgtgctgattggttggtcgataagttgggtacaaaggtccattcttactactggctggatgaattctcaggaaagaacagtttttcgcgttactggaggagtgagtggagtagtggcccaaacccatggtgccagggaatgcagattccagattccgatgtcgtcattgaaggcaattatgccagtgtggtcagccagaagaacaaggagaagtcccatgtcgtactgaatccaggttctgagtttgcgttgtgcgattgtagctggtcaatgaaggggaacctttgcaaacatgtaataaagtcggcaaaggtctgccgtgacaggggattggcactgccatcgttggccatgttccactattaccaggcattggcaaatcttgttcattgtccacccagtgatactttgattagtgaccatgcaatggctctggcagtttctgttaaaacacagctagatgcagtgttgtgcgctgttaatggaagttcttcaattaggccaggtttccaggatccacagtcaacgagtaagacaagagaagctgaaattgaggaagccaactctgagaatggtgtgtgcacaagtcaaccccagcctggtgctggtgatgatgaggatcaggccattcggactggcaagagaagaaagttaggggacgcttctggtgacactgaagatggttccatatatcaggacagtctggctcgcaagaaatgcaagtcaggggaagcttccggtgacgatgaagaggcctccacagaagagggcagtcgggcttgtgaaagtaggaagccaggagaagcttctactaacaatgaagaggtttccataggccagggcagtagagatcatgagaaaagaaagtcgggagaacctcctggcaatgaaggaacttcagcaacgcaagctacggaaccttctgagactgaaaccagccaagcaaccaatggactggttaggtccctcctcccctcttcggaatgcacctagaacgccttgcgggtcttgtaaattcctagttggattagtcaactgatgaattaaacagcagctgagcttaaaaaaaactagtagctgcgtctgttaagtgtgaacggaagcataaatcagttcatttatcattatgaatgggggggggggggggggtcgtgtgcattatgcaggacaacaattgcaagtcccagtttaactgtttggcacgatgttcaaaatctaatgatcccatgttcttttttttggtaaatgaagcaataccatatcatatggttacctaaacctaccgaattaaggtactgttttgctgtatatagcattcacacttctctagaatagcttgttatgcataagtgattactacttattattacttcctcccgtccctgtgttctggattgaactagagatacaaagttaatctcagttcctatgctttttttatcctaattttgtatctctgatgttcggatgaatttgtttgtgatgttcaaatacagtaacttaaatggcttggcacggctttgatcagcacatctgtagaaaaaaactgtaataaagtaataacagtgtggaaatg

SEQ ID NO: 27930 - DNA, 3183 bp, Zea Mays
aggtgccaccggcgtgggcgtgacccaccacgaggcggtgctggcaacacccgaccgtagcgcggcatctccgtcctcgtcgtcaatccctgcgggtgtgcaacagtagcgatgactaggtgggatgaaattttgactcttccagttcagaacccaccatcattggagttctcagcagcggatatctcgtggtcaatggtggagggctggagggattctatggataggcttgcgctgattccatattctagggtgaatgactttgtcagaggagagtcgaacaacaaagattgtccatcaagatttcatgttgaagcacggagaaggcgtcctccgacaatgaactgcaagcccaaagttgatgggatacttgagtatattctgtgtattggtgttcttttggtccagatgattataggaagggtggtaatgtacggcctagcaggcccatcgcggaaaagagaaaaacacctgctggccgccctaatacaaagaggggatgtgtgtgccattttattgtgaagcgcttgattgttgaaccatctgtggctcttgtgatatataaccacaataagcatgtagataagaaaggcatgccatgccatggttctatggacaagatggctgtagggacaaaggcaatgtttgcaccatacatatctgatgagttgcgtcttcaagttatgtctttgctctatgttggcattccagtggagaccataatgcagaggcatactgaaatggttgaaaagcaaggaggtccatcaaacagggacgatcttcttactcatagatatgttaggagactggaaaggaaaatacgtcgttctgtttatgagcttgatgatgatgacgctattagtattggcttatgggttgaaaataaccaggattgtgtgttcttctatgaagatttttcggatacagacacctttgtcttgggcatccagacagattggcagctacagcaaatgattcagtttggcagccatagtttaatggcttctgattcaaagtttggaacaaacaagctaaagtatcctgtacatagcatccttgttttcgatcagcacaaaaatgcaattcctgttgcgtggattataacccccaattttgcacatggtgaaatatataaatgggtgggtgctctttatgatcgagcgcatacaaaagatcctacttggcaattgggtggcttcattattgatggtcccttgactgacgttcgcacaataagagaagtattccattgccctgtgctgatcagtttatggcgtatccggcatgcttggcataaaaatttggttaacaaatgttcagacattgagaagcgatcgacaatggccaaacgtcttggagatgcaatttctattatatgcagaggaactggtgatgttgaattatttgaagcctttctgcaagattttgttgagtgtgctgggtttcttgactacttcaaagctgtatggcttccaagacttggggcatggataactgtcttaaaggccacggcattggctagtgcacaggtagcttcagcaatagagagttaccatcacctgctaaaacttcggctgctgaatgaggcagatgaaagtgtctactggcgtgctgattggttggtcgataagttgggtacaaaggtccattcttactactggctggatgaattctcaggaaagaacagtttttcgcgttactggaggagtgagtggagtagtggcccaaacccatggtgccagggaatgcagattccagattccgatgtcgtcattgaaggcaattatgccagtgtggtcagccagaagaacaaggagaagtcccatgtcgtactgaatccaggttctgagtttgcgttgtgcgattgtagctggtcaatgaaggggaacctttgcaaacatgtaataaagtcggcaaaggtctgccgtgacaggggattggcactgccatcgttggccatgttccactattaccaggcattggcaaatcttgttcattgtccacccagtgatactttgattagtgaccatgcaatggctctggcagtttctgttaaaacacagctagatgcagtgttgtgcgctgttaatggaagttcttcaattaggccaggtttccaggatccacagtcaacgagtaagacaagagaagctgaaattgaggaagccaactctgagaatggtgtgtgcacaagtcaaccccagcctggtgctggtgatgatgaggatcaggccattcggactggcaagagaagaaagttaggggacgcttctggtgacactgaagatggttccatatatcaggacagtctggctcgcaagaaatgcaagtcaggggaagcttccggtgacgatgaagaggcctccacagaagagggcagtcgggcttgtgaaagtaggaagccaggagaagcttctactaacaatgaagaggtttccataggccagggcagtagagatcatgagaaaagaaagtcgggagaacctcctggcaatgaaggaacttcagcaacgcaagctacggaaccttctgagactgaaaccagccaagcaaccaatggactggttaggtccctcctcccctcttcggaatgcacctagaacgccttgcgggtcttgtaaattcctagttggattagtcaactgatgaattaaacagcagctgagcttaaaaaaaactagtagctgcgtctgttaagtgtgaacggaagcataaatcagttcatttatcattatgaatgggggggggggggggggtcgtgtgcattatgcaggacaacaattgcaagtcccagtttaactgtttggcacgatgttcaaaatctaatgatcccatgttcttttttttggtaaatgaagcaataccatatcatatggttacctaaacctaccgaattaaggtactgttttgctgtatatagcattcacacttctctagaatagcttgttatgcataagtgattactacttattattacttcctcccgtccctgtgttctggattgaactagagatacaaagttaatctcagttcctatgctttttttatcctaattttgtatctctgatgttcggatgaatttgtttgtgatgttcaaatacagtaacttaaatggcttggcacggctttgatcagcacatctgtagaaaaaaactgtaataaagtaataacagtgtggaaatg

SEQ ID NO: 27931 - DNA, 3203 bp, Zea Mays
cagcacagatataacaaggcagcagccgccgccgccgccgcccgccgtaaccaggtgccaccggcgtgggcgtgacccaccacgaggcggtgctggcaacacccgaccgtagcgcggcatctccgtcctcgtcgtcaatccctgcgggtgtgcaacagtagcgatgactaggtgggatgaaattttgactcttccagttcagaacccaccatcattggagttctcagcagcggatatctcgtggtcaatggtggagggctggagggattctatggataggcttgcgctgattccatattctagggtgaatgactttgtcagaggagagtcgaacaacaaagattgtccatcaagatttcatgttgaagcacggagaaggcgtcctccgacaatgaactgcaagcccaaagttgatgggatacttgagtatattctgtattggtgttcttttggtccagatgattataggaagggtggtaatgtacggcctagcaggcccatcgcggaaaagagaaaaacacctgctggccgccctaatacaaagaggggatgtgtgtgccattttattgtgaagcgcttgattgttgaaccatctgtggctcttgtgatatataaccacaataagcatgtagataagaaaggcatgccatgccatggttctatggacaagatggctgtagggacaaaggcaatgtttgcaccatacatatctgatgagttgcgtcttcaagttatgtctttgctctatgttggcattccagtggagaccataatgcagaggcatactgaaatggttgaaaagcaaggaggtccatcaaacagggacgatcttcttactcatagatatgttaggagactggaaaggaaaatacgtcgttctgtttatgagcttgatgatgatgacgctattagtattggcttatgggttgaaaataaccaggattgtgtgttcttctatgaagatttttcggatacagacacctttgtcttgggcatccagacagattggcagctacagcaaatgattcagtttggcagccatagtttaatggcttctgattcaaagtttggaacaaacaagctaaagtatcctgtacatagcatccttgttttcgatcagcacaaaaatgcaattcctgttgcgtggattataacccccaattttgcacatggtgaaatatataaatgggtgggtgctctttatgatcgagcgcatacaaaagatcctacttggcaattgggtggcttcattattgatggtcccttgactgacgttcgcacaataagtttatggcgtatccggcatgcttggcataaaaatttggttaacaaatgttcagacattgagaagcgatcgacaatggccaaacgtcttggagatgcaatttctattatatgcagaggaactggtgatgttgaattatttgaagcctttctgcaagattttgttgagtgtgctgggtttcttgactacttcaaagctgtatggcttccaagacttggggcatggataactgtcttaaaggccacggcattggctagtgcacaggtagcttcagcaatagagagttaccatcacctgctaaaacttcggctgctgaatgaggcagatgaaagtgtctactggcgtgctgattggttggtcgataagttgggtacaaaggtccattcttactactggctggatgaattctcaggaaagaacagtttttcgcgttactggaggagtgagtggagtagtggcccaaacccatggtgccagggaatgcagattccagattccgatgtcgtcattgaaggcaattatgccagtgtggtcagccagaagaacaaggagaagtcccatgtcgtactgaatccaggttctgagtttgcgttgtgcgattgtagctggtcaatgaaggggaacctttgcaaacatgtaataaagtcggcaaaggtctgccgtgacaggggattggcactgccatcgttggccatgttccactattaccaggcattggcaaatcttgttcattgtccacccagtgatactttgattagtgaccatgcaatggctctggcagtttctgttaaaacacagctagatgcagtgttgtgcgctgttaatggaagttcttcaattaggccaggtttccaggatccacagtcaacgagtaagacaagagaagctgaaattgaggaagccaactctgagaatggtgtgtgcacaagtcaaccccagcctggtgctggtgatgatgaggatcaggccattcggactggcaagagaagaaagttaggggacgcttctggtgacactgaagatggttccatatatcaggacagtctggctcgcaagaaatgcaagtcaggggaagcttccggtgacgatgaagaggcctccacagaagagggcagtcgggcttgtgaaagtaggaagccaggagaagcttctactaacaatgaagaggtttccataggccagggcagtagagatcatgagaaaagaaagtcgggagaacctcctggcaatgaaggaacttcagcaacgcaagctacggaaccttctgagactgaaaccagccaagcaaccaatggactggttaggtccctcctcccctcttcggaatgcacctagaacgccttgcgggtcttgtaaattcctagttggattagtcaactgatgaattaaacagcagctgagcttaaaaaaaactagtagctgcgtctgttaagtgtgaacggaagcataaatcagttcatttatcattatgaatgggggggggggggggggtcgtgtgcattatgcaggacaacaattgcaagtcccagtttaactgtttggcacgatgttcaaaatctaatgatcccatgttcttttttttggtaaatgaagcaataccatatcatatggttacctaaacctaccgaattaaggtactgttttgctgtatatagcattcacacttctctagaatagcttgttatgcataagtgattactacttattattacttcctcccgtccctgtgttctggattgaactagagatacaaagttaatctcagttcctatgctttttttatcctaattttgtatctctgatgttcggatgaatttgtttgtgatgttcaaatacagtaacttaaatggcttggcacggctttgatcagcacatctgtagaaaaaaactgtaataaagtaataacagtgtggaaatg

SEQ ID NO: 27932 - DNA, 3280 bp, Zea Mays
cgcggatcaagagcgcgagtgccgttcaccagcgaggtggcgcggagagccgagagcaccagcacagatataacaaggcagcagccgccgccgccgccgcccgccgtaaccaggtgccaccggcgtgggcgtgacccaccacgaggcggtgctggcaacacccgaccgtagcgcggcatctccgtcctcgtcgtcaatccctgcgggtgtgcaacagtagcgatgactaggtgggatgaaattttgactcttccagttcagaacccaccatcattggagttctcagcagcggatatctcgtggtcaatggtggagggctggagggattctatggataggcttgcgctgattccatattctagggtgaatgactttgtcagaggagagtcgaacaacaaagattgtccatcaagatttcatgttgaagcacggagaaggcgtcctccgacaatgaactgcaagcccaaagttgatgggatacttgagtatattctgtgtattggtgttcttttggtccagatgattataggaagggtggtaatgtacggcctagcaggcccatcgcggaaaagagaaaaacacctgctggccgccctaatacaaagaggggatgtgtgtgccattttattgtgaagcgcttgattgttgaaccatctgtggctcttgtgatatataaccacaataagcatgtagataagaaaggcatgccatgccatggttctatggacaagatggctgtagggacaaaggcaatgtttgcaccatacatatctgatgagttgcgtcttcaagttatgtctttgctctatgttggcattccagtggagaccataatgcagaggcatactgaaatggttgaaaagcaaggaggtccatcaaacagggacgatcttcttactcatagatatgttaggagactggaaaggaaaatacgtcgttctgtttatgagcttgatgatgatgacgctattagtattggcttatgggttgaaaataaccaggattgtgtgttcttctatgaagatttttcggatacagacacctttgtcttgggcatccagacagattggcagctacagcaaatgattcagtttggcagccatagtttaatggcttctgattcaaagtttggaacaaacaagctaaagcatccttgttttcgatcagcacaaaaatgcaattcctgttgcgtggattataacccccaattttgcacatggtgaaatatataaatgggtgggtgctctttatgatcgagcgcatacaaaagatcctacttggcaattgggtggcttcattattgatggtcccttgactgacgttcgcacaataagagaagtattccattgccctgtgctgatcagtttatggcgtatccggcatgcttggcataaaaatttggttaacaaatgttcagacattgagaagcgatcgacaatggccaaacgtcttggagatgcaatttctattatatgcagaggaactggtgatgttgaattatttgaagcctttctgcaagattttgttgagtgtgctgggtttcttgactacttcaaagctgtatggcttccaagacttggggcatggataactgtcttaaaggccacggcattggctagtgcacaggtagcttcagcaatagagagttaccatcacctgctaaaacttcggctgctgaatgaggcagatgaaagtgtctactggcgtgctgattggttggtcgataagttgggtacaaaggtccattcttactactggctggatgaattctcaggaaagaacagtttttcgcgttactggaggagtgagtggagtagtggcccaaacccatggtgccagggaatgcagattccagattccgatgtcgtcattgaaggcaattatgccagtgtggtcagccagaagaacaaggagaagtcccatgtcgtactgaatccaggttctgagtttgcgttgtgcgattgtagctggtcaatgaaggggaacctttgcaaacatgtaataaagtcggcaaaggtctgccgtgacaggggattggcactgccatcgttggccatgttccactattaccaggcattggcaaatcttgttcattgtccacccagtgatactttgattagtgaccatgcaatggctctggcagtttctgttaaaacacagctagatgcagtgttgtgcgctgttaatggaagttcttcaattaggccaggtttccaggatccacagtcaacgagtaagacaagagaagctgaaattgaggaagccaactctgagaatggtgtgtgcacaagtcaaccccagcctggtgctggtgatgatgaggatcaggccattcggactggcaagagaagaaagttaggggacgcttctggtgacactgaagatggttccatatatcaggacagtctggctcgcaagaaatgcaagtcaggggaagcttccggtgacgatgaagaggcctccacagaagagggcagtcgggcttgtgaaagtaggaagccaggagaagcttctactaacaatgaagaggtttccataggccagggcagtagagatcatgagaaaagaaagtcgggagaacctcctggcaatgaaggaacttcagcaacgcaagctacggaaccttctgagactgaaaccagccaagcaaccaatggactggttaggtccctcctcccctcttcggaatgcacctagaacgccttgcgggtcttgtaaattcctagttggattagtcaactgatgaattaaacagcagctgagcttaaaaaaaactagtagctgcgtctgttaagtgtgaacggaagcataaatcagttcatttatcattatgaatgggggggggggggggggtcgtgtgcattatgcaggacaacaattgcaagtcccagtttaactgtttggcacgatgttcaaaatctaatgatcccatgttcttttttttggtaaatgaagcaataccatatcatatggttacctaaacctaccgaattaaggtactgttttgctgtatatagcattcacacttctctagaatagcttgttatgcataagtgattactacttattattacttcctcccgtccctgtgttctggattgaactagagatacaaagttaatctcagttcctatgctttttttatcctaattttgtatctctgatgttcggatgaatttgtttgtgatgttcaaatacagtaacttaaatggcttggcacggctttgatcagcacatctgtagaaaaaaactgtaataaagtaataacagtgtggaaatg

SEQ ID NO: 27933 - DNA, 3306 bp, Zea Mays
gacgcggcggccaccgcggatcaagagcgcgagtgccgttcaccagcgaggtggcgcggagagccgagagcaccagcacagatataacaaggcagcagccgccgccgccgccgcccgccgtaaccaggtgccaccggcgtgggcgtgacccaccacgaggcggtgctggcaacacccgaccgtagcgcggcatctccgtcctcgtcgtcaatccctgcgggtgtgcaacagtagcgatgactaggtgggatgaaattttgactcttccagttcagaacccaccatcattggagttctcagcagcggatatctcgtggtcaatggtggagggctggagggattctatggataggcttgcgctgattccatattctagggtgaatgactttgtcagaggagagtcgaacaacaaagattgtccatcaagatttcatgttgaagcacggagaaggcgtcctccgacaatgaactgcaagcccaaagttgatgggatacttgagtatattctgtattggtgttcttttggtccagatgattataggaagggtggtaatgtacggcctagcaggcccatcgcggaaaagagaaaaacacctgctggccgccctaatacaaagaggggatgtgtgtgccattttattgtgaagcgcttgattgttgaaccatctgtggctcttgtgatatataaccacaataagcatgtagataagaaaggcatgccatgccatggttctatggacaagatggctgtagggacaaaggcaatgtttgcaccatacatatctgatgagttgcgtcttcaagttatgtctttgctctatgttggcattccagtggagaccataatgcagaggcatactgaaatggttgaaaagcaaggaggtccatcaaacagggacgatcttcttactcatagatatgttaggagactggaaaggaaaatacgtcgttctgtttatgagcttgatgatgatgacgctattagtattggcttatgggttgaaaataaccaggattgtgtgttcttctatgaagatttttcggatacagacacctttgtcttgggcatccagacagattggcagctacagcaaatgattcagtttggcagccatagtttaatggcttctgattcaaagtttggaacaaacaagctaaagtatcctgtacatagcatccttgttttcgatcagcacaaaaatgcaattcctgttgcgtggattataacccccaattttgcacatggtgaaatatataaatgggtgggtgctctttatgatcgagcgcatacaaaagatcctacttggcaattgggtggcttcattattgatggtcccttgactgacgttcgcacaataagagaagtattccattgccctgtgctgatcagtttatggcgtatccggcatgcttggcataaaaatttggttaacaaatgttcagacattgagaagcgatcgacaatggccaaacgtcttggagatgcaatttctattatatgcagaggaactggtgatgttgaattatttgaagcctttctgcaagattttgttgagtgtgctgggtttcttgactacttcaaagctgtatggcttccaagacttggggcatggataactgtcttaaaggccacggcattggctagtgcacaggtagcttcagcaatagagagttaccatcacctgctaaaacttcggctgctgaatgaggcagatgaaagtgtctactggcgtgctgattggttggtcgataagttgggtacaaaggtccattcttactactggctggatgaattctcaggaaagaacagtttttcgcgttactggaggagtgagtggagtagtggcccaaacccatggtgccagggaatgcagattccagattccgatgtcgtcattgaaggcaattatgccagtgtggtcagccagaagaacaaggagaagtcccatgtcgtactgaatccaggttctgagtttgcgttgtgcgattgtagctggtcaatgaaggggaacctttgcaaacatgtaataaagtcggcaaaggtctgccgtgacaggggattggcactgccatcgttggccatgttccactattaccaggcattggcaaatcttgttcattgtccacccagtgatactttgattagtgaccatgcaatggctctggcagtttctgttaaaacacagctagatgcagtgttgtgcgctgttaatggaagttcttcaattaggccaggtttccaggatccacagtcaacgagtaagacaagagaagctgaaattgaggaagccaactctgagaatggtgtgtgcacaagtcaaccccagcctggtgctggtgatgatgaggatcaggccattcggactggcaagagaagaaagttaggggacgcttctggtgacactgaagatggttccatatatcaggacagtctggctcgcaagaaatgcaagtcaggggaagcttccggtgacgatgaagaggcctccacagaagagggcagtcgggcttgtgaaagtaggaagccaggagaagcttctactaacaatgaagaggtttccataggccagggcagtagagatcatgagaaaagaaagtcgggagaacctcctggcaatgaaggaacttcagcaacgcaagctacggaaccttctgagactgaaaccagccaagcaaccaatggactggttaggtccctcctcccctcttcggaatgcacctagaacgccttgcgggtcttgtaaattcctagttggattagtcaactgatgaattaaacagcagctgagcttaaaaaaaactagtagctgcgtctgttaagtgtgaacggaagcataaatcagttcatttatcattatgaatgggggggggggggggggtcgtgtgcattatgcaggacaacaattgcaagtcccagtttaactgtttggcacgatgttcaaaatctaatgatcccatgttcttttttttggtaaatgaagcaataccatatcatatggttacctaaacctaccgaattaaggtactgttttgctgtatatagcattcacacttctctagaatagcttgttatgcataagtgattactacttattattacttcctcccgtccctgtgttctggattgaactagagatacaaagttaatctcagttcctatgctttttttatcctaattttgtatctctgatgttcggatgaatttgtttgtgatgttcaaatacagtaacttaaatggcttggcacggctttgatcagcacatctgtagaaaaaaactgtaataaagtaataacagtgtggaaatg

SEQ ID NO: 27934 - DNA, 3549 bp, Zea Mays
cgcccgcgagctcttccactctcagctcccgtcccgaagccgcacccccgccagcggcggcgctcccgctcccgctcctccctgctcggcgattcggcgcggcgccgccacgcctccacctcacgcggccccgccctctcggcgctgctctctggcccctggcggcacgcccttccctcctccgttcctcagccgcaaggcgccaagcgggcggccctgcgtgcgcgggcgcgggcgcggaccctccgaggcagccagacgcggcggccaccgcggatcaagagcgcgagtgccgttcaccagcgaggtggcgcggagagccgagagcaccagcacagatataacaaggcagcagccgccgccgccgccgcccgccgtaaccaggtgccaccggcgtgggcgtgacccaccacgaggcggtgctggcaacacccgaccgtagcgcggcatctccgtcctcgtcgtcaatccctgcgggtgtgcaacagtagcgatgactaggtgggatgaaattttgactcttccagttcagaacccaccatcattggagttctcagcagcggatatctcgtggtcaatggtggagggctggagggattctatggataggcttgcgctgattccatattctagggtgaatgactttgtcagaggagagtcgaacaacaaagattgtccatcaagatttcatgttgaagcacggagaaggcgtcctccgacaatgaactgcaagcccaaagttgatgggatacttgagtatattctgtattggtgttcttttggtccagatgattataggaagggtggtaatgtacggcctagcaggcccatcgcggaaaagagaaaaacacctgctggccgccctaatacaaagaggggatgtgtgtgccattttattgtgaagcgcttgattgttgaaccatctgtggctcttgtgatatataaccacaataagcatgtagataagaaaggcatgccatgccatggttctatggacaagatggctgtagggacaaaggcaatgtttgcaccatacatatctgatgagttgcgtcttcaagttatgtctttgctctatgttggcattccagtggagaccataatgcagaggcatactgaaatggttgaaaagcaaggaggtccatcaaacagggacgatcttcttactcatagatatgttaggagactggaaaggaaaatacgtcgttctgtttatgagcttgatgatgatgacgctattagtattggcttatgggttgaaaataaccaggattgtgtgttcttctatgaagatttttcggatacagacacctttgtcttgggcatccagacagattggcagctacagcaaatgattcagtttggcagccatagtttaatggcttctgattcaaagtttggaacaaacaagctaaagcatccttgttttcgatcagcacaaaaatgcaattcctgttgcgtggattataacccccaattttgcacatggtgaaatatataaatgggtgggtgctctttatgatcgagcgcatacaaaagatcctacttggcaattgggtggcttcattattgatggtcccttgactgacgttcgcacaataagagaagtattccattgccctgtgctgatcagtttatggcgtatccggcatgcttggcataaaaatttggttaacaaatgttcagacattgagaagcgatcgacaatggccaaacgtcttggagatgcaatttctattatatgcagaggaactggtgatgttgaattatttgaagcctttctgcaagattttgttgagtgtgctgggtttcttgactacttcaaagctgtatggcttccaagacttggggcatggataactgtcttaaaggccacggcattggctagtgcacaggtagcttcagcaatagagagttaccatcacctgctaaaacttcggctgctgaatgaggcagatgaaagtgtctactggcgtgctgattggttggtcgataagttgggtacaaaggtccattcttactactggctggatgaattctcaggaaagaacagtttttcgcgttactggaggagtgagtggagtagtggcccaaacccatggtgccagggaatgcagattccagattccgatgtcgtcattgaaggcaattatgccagtgtggtcagccagaagaacaaggagaagtcccatgtcgtactgaatccaggttctgagtttgcgttgtgcgattgtagctggtcaatgaaggggaacctttgcaaacatgtaataaagtcggcaaaggtctgccgtgacaggggattggcactgccatcgttggccatgttccactattaccaggcattggcaaatcttgttcattgtccacccagtgatactttgattagtgaccatgcaatggctctggcagtttctgttaaaacacagctagatgcagtgttgtgcgctgttaatggaagttcttcaattaggccaggtttccaggatccacagtcaacgagtaagacaagagaagctgaaattgaggaagccaactctgagaatggtgtgtgcacaagtcaaccccagcctggtgctggtgatgatgaggatcaggccattcggactggcaagagaagaaagttaggggacgcttctggtgacactgaagatggttccatatatcaggacagtctggctcgcaagaaatgcaagtcaggggaagcttccggtgacgatgaagaggcctccacagaagagggcagtcgggcttgtgaaagtaggaagccaggagaagcttctactaacaatgaagaggtttccataggccagggcagtagagatcatgagaaaagaaagtcgggagaacctcctggcaatgaaggaacttcagcaacgcaagctacggaaccttctgagactgaaaccagccaagcaaccaatggactggttaggtccctcctcccctcttcggaatgcacctagaacgccttgcgggtcttgtaaattcctagttggattagtcaactgatgaattaaacagcagctgagcttaaaaaaaactagtagctgcgtctgttaagtgtgaacggaagcataaatcagttcatttatcattatgaatgggggggggggggggggtcgtgtgcattatgcaggacaacaattgcaagtcccagtttaactgtttggcacgatgttcaaaatctaatgatcccatgttcttttttttggtaaatgaagcaataccatatcatatggttacctaaacctaccgaattaaggtactgttttgctgtatatagcattcacacttctctagaatagcttgttatgcataagtgattactacttattattacttcctcccgtccctgtgttctggattgaactagagatacaaagttaatctcagttcctatgctttttttatcctaattttgtatctctgatgttcggatgaatttgtttgtgatgttcaaatacagtaacttaaatggcttggcacggctttgatcagcacatctgtagaaaaaaactgtaataaagtaataacagtgtggaaatg

SEQ ID NO: 27935 - DNA, 2230 bp, Zea Mays
cttcctatggcagtgatggatgacaacaggatcgatctcgctcggtggttccgcttctaccaccatctccgccgtgggaaggcctgggcagcgtgtatccgcatggtcctttaaacaagtaggtgacttctctgaggacaaccgatctgggatcaatcactcgttgcaccggatcagcgctatccggaaccggaaagctcaaatcataggcctcacttgccgtgttggtcgagctatatctggcagtgcagagatgatccgggaccttgtggtgagtggtggttcaatattggtgattggacctcctggagttgggaaaaccactctgatcagggaaatagctagaattttggcagatgaaggtaagaaacgtgtgatcatagtggacacatctaatgaaataggaggtgatggggatgtacctcactctggcattggacgtgctaggagaatgcaagttcccaaagttactatgcagcacaacgtaatgatcgaagcagttgaaaatcacatgccggaagtaattgttatcgatgagattggtacagaacttgaggcaatggcagctaccactattgctcagagaggtgttcaactagttggaactgctcatggtgtgacaatcgagagcataattaaaaatccttgtttgcaaatgctcgttggagggattgagagtgtgactcttggtgatgaggaagcaaaaaagcggaaggtgcagaaaaccattctcgagagaaaaggacccccaacatttttatgcgctgttgagatgatatcgaaaactgaatgtcgagttcatcacaggttagatgccacagtggatgctattcttgcagggaagcctcctaagtttgaagctcgcaagatgcataataagtctaccgagtttgaaatgccgttggtgatacctgatagagagtatgaaatagaatcactgccactctatcaggaagttatggtcacgaggtcattatcatcagatggcaacttcagcgatgattttgctgcatccaggcaaacaaaaagcaagagtatgccatcagaagataattttggtgataattttgtttatacaaggaaagcaaaagggaataaacctgtgcatggaaagtctctagtccaagtatacacataccagatttcagaagctgatattttacaagtagcaacaatgatgggatttgatgatgaactagatgtaacagatgacattggagcagctgatgtgattcttgcatcgagttctgaaatgaagcagaatccttggattcataatgttgccaaataccacaagcttcccatatttgttgtcaagactaatacgatggctcaaatagttaaggctatcagaatgattgttggaagggacaacacatcatcaagtaagcagcctgaggttatggagggagagatagagattgaggatgatgctccgaaacgtaagccatctttggaggaaattgatgccttggaggaggctcgtcttgcaatcgagtacatcgttattccaggtggggagccagttgagctcctcccaagatgttcagaaatagttgctcggcagctggagctcgtagagagctaccagctacttgctgaaacctttggaagtgactccaattctaggttacagattctccccatgaaaataaccaagaggggttctagtaaagacaatggagcatcaaagcccactaaacaaaccggatcagatttgatcgtcagtgagaatggtggtggctcaagtttttctcggctgccatttctgccaaagtgatcgtctagatcttctgatcaccactgtcgaaaatgtacatcattcctctctcttgttgttcattgtacaacattgtgcagtgttgtaaatagtgtgtcgaatgttgaagaagcgaaagagcaaaagctaactgcaattgccttccattcttttgctggaataaaatccgttcatttctggtgtcagccaggtcagctcacatgctcatgtggaaaaaaattgcacgcggccgtgccgcacgaggccgccggtgcggcccggcaccgattaacgacgcgtggatattcaacggcatctgtatctcatggataaagcctcggacgtatacgcagctcggctaagcctcggacgtatacgcggcttggcttacagaacggctcgctttaccatcgttgcttccatacgcttccatacagatacgtatcttggcttccaaaaaacatgtcctgc

SEQ ID NO: 27936 - DNA, 2161 bp, Zea Mays
gtagctgcacgaggcacgagctgatttaattgatcggcgttacatcatggtaggtgacttctctgaggacaaccgatctgggatcaatcactcgttgcaccggatcagcgctatccggaaccggaaagctcaaatcataggcctcacttgccgtgttggtcgagctatatctggcagtgcagagatgatccgggaccttgtggtgagtggtggttcaatattggtgattggacctcctggagttgggaaaaccactctgatcagggaaatagctagaattttggcagatgaaggtaagaaacgtgtgatcatagtggacacatctaatgaaataggaggtgatggggatgtacctcactctggcattggacgtgctaggagaatgcaagttcccaaagttactatgcagcacaacgtaatgatcgaagcagttgaaaatcacatgccggaagtaattgttatcgatgagattggtacagaacttgaggcaatggcagctaccactattgctcagagaggtgttcaactagttggaactgctcatggtgtgacaatcgagagcataattaaaaatccttgtttgcaaatgctcgttggagggattgagagtgtgactcttggtgatgaggaagcaaaaaagcggaaggtgcagaaaaccattctcgagagaaaaggacccccaacatttttatgcgctgttgagatgatatcgaaaactgaatgtcgagttcatcacaggttagatgccacagtggatgctattcttgcagggaagcctcctaagtttgaagctcgcaagatgcataataagtctaccgagtttgaaatgccgttggtgatacctgatagagagtatgaaatagaatcactgccactctatcaggaagttatggtcacgaggtcattatcatcagatggcaacttcagcgatgattttgctgcatccaggcaaacaaaaagcaagagtatgccatcagaagataattttggtgataattttgtttatacaaggaaagcaaaagggaataaacctgtgcatggaaagtctctagtccaagtatacacataccagatttcagaagctgatattttacaagtagcaacaatgatgggatttgatgatgaactagatgtaacagatgacattggagcagctgatgtgattcttgcatcgagttctgaaatgaagcagaatccttggattcataatgttgccaaataccacaagcttcccatatttgttgtcaagactaatacgatggctcaaatagttaaggctatcagaatgattgttggaagggacaacacatcatcaagtaagcagcctgaggttatggagggagagatagagattgaggatgatgctccgaaacgtaagccatctttggaggaaattgatgccttggaggaggctcgtcttgcaatcgagtacatcgttattccaggtggggagccagttgagctcctcccaagatgttcagaaatagttgctcggcagctggagctcgtagagagctaccagctacttgctgaaacctttggaagtgactccaattctaggttacagattctccccatgaaaataaccaagaggggttctagtaaagacaatggagcatcaaagcccactaaacaaaccggatcagatttgatcgtcagtgagaatggtggtggctcaagtttttctcggctgccatttctgccaaagtgatcgtctagatcttctgatcaccactgtcgaaaatgtacatcattcctctctcttgttgttcattgtacaacattgtgcagtgttgtaaatagtgtgtcgaatgttgaagaagcgaaagagcaaaagctaactgcaattgccttccattcttttgctggaataaaatccgttcatttctggtgtcagccaggtcagctcacatgctcatgtggaaaaaaattgcacgcggccgtgccgcacgaggccgccggtgcggcccggcaccgattaacgacgcgtggatattcaacggcatctgtatctcatggataaagcctcggacgtatacgcagctcggctaagcctcggacgtatacgcggcttggcttacagaacggctcgctttaccatcgttgcttccatacgcttccatacagatacgtatcttggcttccaaaaaacatgtcctgc

SEQ ID NO: 27937 - DNA, 3047 bp, Zea Mays
gatctgctcgcggtcgcaatacgcccatcgaatcttccttcctccgattccctctcgtctaccctctccccaccactccaggccgcgcgcaccacctgttcggccaaatatcccacgccgctacataaacccgcgcgccatttcccgcctgcctccccaagctacccagctacctacctaccttccccctgcgccgtcactagcgaaccggcaccatgctccgggcgctcaacccgtccccgtcccagctccgcgcgcgtccggcgtgccgcgccgcgccgcgccggcgcccgcgcggggcctgggcgcgcccccgtgccgcggcggtcccgcagcagccgccggtgcgccggccctccggagaccggctgcgcgcgccgtcacggggcgccgccgccgccgaccagctgccggcgcctgatgttggcgcggcggcgcccggggcgcggggcgagctggaggcgttcctggagattgtgcccgcgaggatgcggcgcgggctggcgcggcaccaggagctgcgggacctcgtcgaggtcatcatggacctcggccgccgcccgatcgcgcggttcccgtccggggactgggccatctccgaccagcccgtcaccgccgatgacctccgccaggccgtcgccaaggtaggtgacttctctgaggacaaccgatctgggatcaatcactcgttgcaccggatcagcgctatccggaaccggaaagctcaaatcataggcctcacttgccgtgttggtcgagctatatctggcagtgcagagatgatccgggaccttgtggtgagtggtggttcaatattggtgattggacctcctggagttgggaaaaccactctgatcagggaaatagctagaattttggcagatgaaggtaagaaacgtgtgatcatagtggacacatctaatgaaataggaggtgatggggatgtacctcactctggcattggacgtgctaggagaatgcaagttcccaaagttactatgcagcacaacgtaatgatcgaagcagttgaaaatcacatgccggaagtaattgttatcgatgagattggtacagaacttgaggcaatggcagctaccactattgctcagagaggtgttcaactagttggaactgctcatggtgtgacaatcgagagcataattaaaaatccttgtttgcaaatgctcgttggagggattgaggtgcagtttcgtcctctattactctttaaccaattgatttgcatgctgctggatttagcaacattctgaaggggcattaaagttccacggtcaattacttcgttttgaagcttcacatgttagattttaccttggtttatattttaagcattggtgacccagtgcacctacttcatatatatttttttaaaattggattcaattgtggaccctattagcaatttaacttatatcaactcaatctcttcaatattttgtttgtggaaatattgaccttaatttcttctgtagagtgtgactcttggtgatgaggaagcaaaaaagcggaaggtgcagaaaaccattctcgagagaaaaggacccccaacatttttatgcgctgttgagatgatatcgaaaactgaatgtcgagttcatcacaggttagatgccacagtggatgctattcttgcagggaagcctcctaagtttgaagctcgcaagatgcataataagtctaccgagtttgaaatgccgttggtgatacctgatagagagtatgaaatagaatcactgccactctatcaggaagttatggtcacgaggtcattatcatcagatggcaacttcagcgatgattttgctgcatccaggcaaacaaaaagcaagagtatgccatcagaagataattttggtgataattttgtttatacaaggaaagcaaaagggaataaacctgtgcatggaaagtctctagtccaagtatacacataccagatttcagaagctgatattttacaagtagcaacaatgatgggatttgatgatgaactagatgtaacagatgacattggagcagctgatgtgattcttgcatcgagttctgaaatgaagcagaatccttggattcataatgttgccaaataccacaagcttcccatatttgttgtcaagactaatacgatggctcaaatagttaaggctatcagaatgattgttggaagggacaacacatcatcaagtaagcagcctgaggttatggagggagagatagagattgaggatgatgctccgaaacgtaagccatctttggaggaaattgatgccttggaggaggctcgtcttgcaatcgagtacatcgttattccaggtggggagccagttgagctcctcccaagatgttcagaaatagttgctcggcagctggagctcgtagagagctaccagctacttgctgaaacctttggaagtgactccaattctaggttacagattctccccatgaaaataaccaagaggggttctagtaaagacaatggagcatcaaagcccactaaacaaaccggatcagatttgatcgtcagtgagaatggtggtggctcaagtttttctcggctgccatttctgccaaagtgatcgtctagatcttctgatcaccactgtcgaaaatgtacatcattcctctctcttgttgttcattgtacaacattgtgcagtgttgtaaatagtgtgtcgaatgttgaagaagcgaaagagcaaaagctaactgcaattgccttccattcttttgctggaataaaatccgttcatttctggtgtcagccaggtcagctcacatgctcatgtggaaaaaaattgcacgcggccgtgccgcacgaggccgccggtgcggcccggcaccgattaacgacgcgtggatattcaacggcatctgtatctcatggataaagcctcggacgtatacgcagctcggctaagcctcggacgtatacgcggcttggcttacagaacggctcgctttaccatcgttgcttccatacgcttccatacagatacgtatcttggcttccaaaaaacatgtcctgc

SEQ ID NO: 27938 - DNA, 3160 bp, Zea Mays
cattggaactctctgctccgatctgctcgcggtcgcaatacgcccatcgaatcttccttcctccgattccctctcgtctaccctctccccaccactccaggccgcgcgcaccacctgttcggccaaatatcccacgccgctacataaacccgcgcgccatttcccgcctgcctccccaagctacccagctacctacctaccttccccctgcgccgtcactagcgaaccggcaccatgctccgggcgctcaacccgtccccgtcccagctccgcgcgcgtccggcgtgccgcgccgcgccgcgccggcgcccgcgcggggcctgggcgcgcccccgtgccgcggcggtcccgcagcagccgccggtgcgccggccctccggagaccggctgcgcgcgccgtcacggggcgccgccgccgccgaccagctgccggcgcctgatgttggcgcggcggcgcccggggcgcggggcgagctggaggcgttcctggagattgtgcccgcgaggatgcggcgcgggctggcgcggcaccaggagctgcgggacctcgtcgaggtcatcatggacctcggccgccgcccgatcgcgcggttcccgtccggggactgggccatctccgaccagcccgtcaccgccgatgacctccgccaggccgtcgccaaggtaggtgacttctctgaggacaaccgatctgggatcaatcactcgttgcaccggatcagcgctatccggaaccggaaagctcaaatcataggcctcacttgccgtgttggtcgagctatatctggcagtgcagagatgatccgggaccttgtggtgagtggtggttcaatattggtgattggacctcctggagttgggaaaaccactctgatcagggaaatagctagaattttggcagatgaaggtaagaaacgtgtgatcatagtggacacatctaatgaaataggaggtgatggggatgtacctcactctggcattggacgtgctaggagaatgcaagttcccaaagttactatgcagcacaacgtaatgatcgaagcagttgaaaatcacatgccggaagtaattgttatcgatgagattggtacagaacttgaggcaatggcagctaccactattgctcagagaggtgttcaactagttggaactgctcatggtgtgacaatcgagagcataattaaaaatccttgtttgcaaatgctcgttggagggattgagagtgtgactcttggtgatgaggaagcaaaaaagcggaaggtgcagaaaaccattctcgagagaaaaggacccccaacatttttatgcgctgttgagatgatatcgaaaactgaatgtcgagttcatcacaggttagatgccacagtggatgctattcttgcagggaagcctcctaagtttgaagctcgcaagatgcataataagtctaccgagtttgaaatgccgttggtgatacctgatagagagtatgaaatagaatcactgccactctatcaggaagttatggtcacgaggtcattatcatcagatggcaacttcagcgatgattttgctgcatccaggcaaacaaaaagcaagagtatgccatcagaagataattttggtgataattttgtttatacaaggaaagcaaaagggaataaacctgtgcatggaaagtctctagtccaagtatacacataccagatttcagaagctgatattttacaagtagcaacaatgatgggatttgatgatgaactagatgtaacagatgacattggagcagctgatgtgattcttgcatcgagttctgaaatgaagcagaatccttggattcataatgttgccaaataccacaagcttcccatatttgttgtcaagactaatacgatggctcaaatagttaaggctatcagaatgattgttggaagggacaacacatcatcaagtaagcagcctgaggttatggagggagagatagagattgaggatgatgctccgaaacgtaagccatctttggaggaaattgatgccttggaggtaatcacttttaccacatacttgcctctgaaagataactgaaatgattttatgttttaattgaaattttgatttgtcatttgttagtaatttgatttcccttcttgattgaacattattttctcatttatttctccttgaaccattataaaacgctgactacacggatgatcttattcatatgagtatatgacgattccatgtcaatgatgagaacgggtttttacatgctatcatcatactatgacttcggatattctgccaaaacattaaaataatgtctatgtatatctgtttcttgttccacttcatgcaaaatggagcttctaaacaccaaactagcgttgatacataacaattatgttgcactctttacacgatgcaggaggctcgtcttgcaatcgagtacatcgttattccaggtggggagccagttgagctcctcccaagatgttcagaaatagttgctcggcagctggagctcgtagagagctaccagctacttgctgaaacctttggaagtgactccaattctaggttacagattctccccatgaaaataaccaagaggggttctagtaaagacaatggagcatcaaagcccactaaacaaaccggatcagatttgatcgtcagtgagaatggtggtggctcaagtttttctcggctgccatttctgccaaagtgatcgtctagatcttctgatcaccactgtcgaaaatgtacatcattcctctctcttgttgttcattgtacaacattgtgcagtgttgtaaatagtgtgtcgaatgttgaagaagcgaaagagcaaaagctaactgcaattgccttccattcttttgctggaataaaatccgttcatttctggtgtcagccaggtcagctcacatgctcatgtggaaaaaaattgcacgcggccgtgccgcacgaggccgccggtgcggcccggcaccgattaacgacgcgtggatattcaacggcatctgtatctcatggataaagcctcggacgtatacgcagctcggctaagcctcggacgtatacgcggcttggcttacagaacggctcgctttaccatcgttgcttccatacgcttccatacagatacgtatcttggcttccaaaaaacatgtcctgc

SEQ ID NO: 27939 - DNA, 333 bp, Zea Mays
ataaatcatacaacgtatccattaatttaactagcatccataaatatagactacatatatatataaatgcctcaacaggcttgcggaactaattagaccaaacactcatggacgaaatacttcacttgaccttattacagtctaactaataagttgctagcagctcatacttgtattagacgacgcactaatagcttgtagtgcttatttgagaggcgccggtgagaaacaaggaacatagcaaccaaccttccacctgtgtatagctttggaactgctgaaaacactcacttccttgctgtccatgtcatagcaaccaaccttccacctgtg

SEQ ID NO: 27940 - DNA, 2409 bp, Zea Mays
gatccatggaccagtccgacgtaacccaaaatttaaacggcctgacccgtgtcgcggaggacgcccgaatgtacaccctataccgctggttcccgttcccaagatagagctgccccagacgctccagaatccatccaatacctttccatcgattcttggcatcgccctctctctaaaccccaactcctcgactcgagcaatccctaggtctccgcgcgaggcggtggcggctgtgaggggattttgattgatttggctcgagatggcggaggacaaggtgcggcggatcttcgtcggcgggttgtcctggaagaccacggagcgcacgctcgagcgcaccttcggtcagtacggcaatgtcatcgaggcacaggaacaatgttccaagcatgaggtgtatagtcaagatggcccctcacaagctcacaaggaattggaggatccgcccggtcacacaaatactgcaaagcatacagttgatgtgttcaaactttaaaatacaaatacataatgtcacagtacaaatacagaatggaagctggtacatataacaggaatcaggagaactaccttcattaggtcagctcggtgcctacaaacacctaattgcagtgaacctataggtacaatacccgaattccttctttctttgatgagatgtattgacctattacacaaaccagcaaaatcaacgtgccagaaagaatattggcctgcttagcttcattgttgttgcccaagttcccagcagaacaagtacagacaaaaggctgctccttcctcaagctaacaaaagctctacgtgttcttccaagagaagtgcttcggtcacaaccaccaaagcagtagaaacaaacaaagcgagaacaaagggagcgcaaagggaggaagaaggggacgcgcttcgggagcaaagggaggaagaaggggatctaaaagcagggatctcagacctgagagcacacggcgggttggtgccgtctccgctgatcgaggcggttgaatctctgcgccatgcccctgctaggattgcttgtcgccatctccctcaacgttgttgccaccacctcgcccaagcacggtggggagttcgggcatgggcgtggggtgctggctcggactggcgctgtacaccatgagctctgtcctcgtcttcgccacgtggatggtggtcggtgcggtgccatgccaggacctggcgtccgtggccaccggcgcgccgccgaagcaggcgcagtgggcggcgctcatgtccgcgctccaggagcgaatcgtgcaaggaaagggggagccgggcacgcgggcaaccatggatggaagccggcgcggccgggggaccggggcgtggctgccatggattggtcgcggcagccatggatggaagctttgtgggcaagattcgcggcggatttggcagaccggtgattcgcggccatggatgtgatttgtgggtaatgcagaatctccatctcgcgtcgtgcaaggaaagggggagccgggcgcgcggacagccatggatggaagccggcacggctgggggaccgggtcgcggctgccatggatggaagctttgtgggcgagattcgtggcggagattcgcgaccatggatgcaagcccagcgcgtggagaaaggcaaaaaggcagaaccgtgcaccaatttctgagtactctaaacactgatctagctaatgtattggtagcatcatgatattttccttcaacgggaatgacctctttcaatatgaatgtacatagatcctcaattatgccatacaatacacctttggccatgttcttcggctttcctggttgaaaattctataaagaaagtttataaacatcatatatttacactcgataacacatttgtatcttaaatgacataaatacatacatgactattactaataatacctggcaagggtttgtgatgtatcgtctgttttgtctcatgaactcgcacacatagaacccacataggacaggtcccgatggttgcttgtggcaccacataaggctggatgtcgaagctttccattgtttttgtcctcatcagaagcatgccagctcataagtttggcatcctcagggttagctaacaaacacctcaatcgatcaacgatggggaggtaccacatcaccaaagcagaaatctttttgagcgcataataatctacttctttttctttgcttgtgggttttgaactttgttgggtcttcttttgggttttctttcactttttccctttatacacaaatgcaacacactctttctatcgatagtctttattcgtcttgtacctacttgcaccacactttggacaactctccaagtctttgtaatcatcacatcgataaaggatgcattgatttctacacgcgtggatcttctccacacccataatgag

SEQ ID NO: 27941 - DNA, 3248 bp, Zea Mays
gatccatggaccagtccgacgtaacccaaaatttaaacggcctgacccgtgtcgcggaggacgcccgaatgtacaccctataccgctggttcccgttcccaagatagagctgccccagacgctccagaatccatccaatacctttccatcgattcttggcatcgccctctctctaaaccccaactcctcgactcgagcaatccctaggtctccgcgcgaggcggtggcggctgtgaggggattttgattgatttggctcgagatggcggaggacaaggtgcggcggatcttcgtcggcgggttgtcctggaagaccacggagcgcacgctcgagcgcaccttcggtcagtacggcaatgtcatcgaggcacagtcttgcaattttaatctgacagcaactgctgattcagagaggctgcagtcacttccatttctatatgttaggatcttaacaaagttgcaggaaaagaaattcactaatcaattgagctcactggttagcatctgtgggatgatggggtcagtaaaagtcaattggagaatacataagagtataagacaactgccgacagctttagagcacagaaaagaatcatcacgggcatgattaatgaactccacgaaccaaacatggtcgccagtgctggaatgaacttgtggcaaaatttggttgcatcattgttctggatcagtttgatacgaaacacagagaaactatttgtcctttcagtagtgaggcaccactggtgatgctggagagtgctgtatgctcatctgtgcctacttctgcttcaaagagcattattctcagtttccattgtgcccttccaattgcaatggaaatgcttagttattcatgcaaaagaaaagccaagattagaaaaaaaaatgcatttagacttttggattatgttttcctgtatacaactgggccaaaagtaatcggtttcagttcagtttactggattggagttcactggtacttgcagcacatggtcctcacctggaagtgttcagactggccaatgtcatttgtggtcacatactcacatgcttgattattcagttctgagttctgatctttggctgtaccgctatagtaatctttaatgttctttaccagtggatggtcaaagcagttttttgatttgcatgcaatatttgagctgtggcataagaattgactgttaactcttgtagaggtgggacaatttcactggttttgcagaatgttcataagctgtttgatttcatatatcaccctactgcatgtgaacttcctattgatagaatttttggttgctcactattatatagttcctatcttcccattggttcattttcatcatatgtataggttgtagtgaaaagggaaacaggccgctcgaggggatttggatttgtcacattctcagaacctcgggctgtggatgctgccattcgtggaatgcataatgcggaactggatggccgtaatatttctgtgaacaaagctcatcctaggattgctgacgatgactatggctatggtggtggtggtggtggtggttactcgtctggtgctagaggtggatatcgtagtggcggtgatgtagttccagcagtgagtgatgaatgtttcaaatgcggccattctggacatgatgtagttccagcagtgagtgatgaatgtttcaaatgcggccgttctggacattgggctcgtgaatgcccttattcagatggcagtggtagaactggaagatattctcccgcttcaaggtatggtggtggcgctgggggacgtggtgaccgcgttggaggatcagatcgttttgctcgctatgatgatgaccgatatgatggtggccggtctgtagacagcagggatacttattatggtgctgggcgagatcgttatgctagggatcgccatctgccagcaacagaccaccattctggtgacaggtacagtggtgcagatcgttacacgtccagtggctttgccatagaaaggagctatgagagagatggaggcaggtccactggaacttactaccgtgatgacccgaggggcactggtggctatggcagaggtggttcacgtggcggcggcggcgggcctgctcgctttggtgggagttaccgagataggcctgctccgtatgaccgtcctagcaggggcggggcagctcgtgcttatgatgatcgttactgaagaatgtttccttgaagtagaacagagatgttggtgtattttagttttgcatcagtatttgcacttgccagcttgatccttcaattctatgctattcagcagcgcagtttgttttagtggtctctgaagacaatggttcagtatgtcagttactatcagtatgttggtaccataatctgtaggcagtgatcctggtccatttgacatgtttgtgtaattgcttggagtctgcactaaataatgaactaatcgcagcatgtgatctttgaatcagcctggtgttctgcttactgagatagctgtgccacattctgcattgtggatgaactttgcaccgataattctgagatgtgctgtgcggcaatgtgcagatcgatctgttcagctcttgatgctgttgggttttgttggtctaatatcaggaaggtttaattctgcttctagtctgggttgagtaagatggtgggaatctgagtctcagaaaaactgtggttcatgcagtcaggtgatggttatgatgttttcctgatgcagatgaatgcgttatgttactgatttactagcgatgtctggtgcagatccgcagataaatttggcttctttgctttgttctctggcttattctaaattttctttcaaagggttgttattcatttgaagattattattttttgttcgcggcttgccactgattggagttggattgcacacataagataacgatgtgttcaccatacaagatgtgatcccacgtcctcttaacagaaacagtgttggcagctgcaagcatacaaaagatgtactacacgacagggattaagttgcagcatatgaccctagctcatcaggatggcgtctgcatcctaggccttcgaggctccgattttgggggggcattggccatcggacgcattgtgggctgtgggggcaagttgccaccaaggaacaccctttgtattagatgatattgggtcggttaaatccatcccaatctattctaatacactctaatccaccacagcgatctttgcaagacctttgaagaagctct

SEQ ID NO: 27942 - DNA, 2314 bp, Zea Mays
gtcccgtcccgttctgcctccacacgccgccagaacgagaatccccctccccgtcccggcgtccccggctcccgagctccccctccagcctccccttccccggctcggccgcaccccgtccccggttcgttagagcgcgagcgcgcggcagccggccagccccaggcagccggcgccccgcggccaggttggctctcgctctcccctccggcacacctcgtccccggttgtccggctccggctccggatcagcagcgccccgagcacgagcgggaacgcgcgaacgccgggacgcggcagggtgcggcggggcggggcagctaggctctgaggcacggcagacggcttgcagtcaagatctctcaccagctgaattgccgattcacacatccagccatctcgacaacttgggtacacacgggacttcatcttaagagaatttagaacaaaaaagagagcatgtcagacctgcttcctgaagatgtacttgtcaacatcattggtcgtcttgcaccacgctaccttgccatatcccggtgcgtttgcaagacatggtgcaccaccattgatgcccataatctgctgcgtatggatctactcccacactcagtgtctggactctttattaacttcaatgagttaagcatgtcggaattcttatcccgcccctcaaaaggaccagcaatatctgttaacccggccacacgacagtgggcgctgctgcccccacgcccaagcccaaatatgcctgagcacttttgtcacgggatgtaccttgtctttgaccccacattgtcatcacattatgaggtattcctgatccctcaggtctcatacaattccaacttagaccctgcaatagaggaattggaatggccaccttcgccttgcatcgtacaagtgttgtcatcaaggacaaagttgtgggaggagaggttgtttgttcgagaaggagaggctgcaggtaatgtcgctgacattcggttggattttcaagctgttcaggagaatgctgtctattggcggggagtactttatgtaaattaccaatccaaatttattatgaggatatcattgtcaaatgataaataccaagtaatcaagccacctgtagattttgaatggtttgaatttgaaaatgaatccaggctatccaaaaacctttatttgggaaaatcagagaaaggggtgtactgtgctttgcgttatccgtcaaccgtttccttttcgatttacattctcgatgaatctgacggcaaaacggagtggataatgaagcctcactattatctcgggagtcaaggaattgacgggcctggaccctggactctacaagatatcaactataactgggacacccagtatgaagacagtatggaggaaaagttcgagtgggactccgacagcgataatgttgtcgagaacagaagcaacggtggatatccttgccttcctcgtatagaacttcttgggtttcacccctacaaggatgttgtcttcttgagcgacacgctgagacgaggattggcctatcacctagacagctcaaagatccaagacctgggtaacctccatccaacatattatggaactgaacaggggattcagccatttctactgacggctttcccatacacaccctggaggggatggtttccagaagacacataatggtacatacagagtaccgaacacataaagaaggcattagctgatctgaaaccgaagttctgaccgggcatggcgaaggtccctccttcacggtttcctgatgctgctgccgctctggatcgacagacttcagcttgagagtagtttagccagctgcttagcgccgtggacgtggggatggacacgtcgcattgcgcgcttagtggctggttttgtgcgttgtttggctaagtttttttttttttggttagaataaaagggagaagagaaaacactccagttgcgcagcaccaaaaccggttcaccactctcttgtcatttgttttgtttgttctcatcggggcgtgccaaaattttgctttctggcagctagcctagcggacccaatggtagattcatccttggggaggatggcagttagggaaaggttgtgctatgcgaccgtggagcgtggatgtggatgatgctggtaggcagaaaaaggtttcggagggcgattgggatcggttgcgagcgaccagattttgatgcgcaccccagcagcatctcagggcagcgtagtcggtctccgcccaaggcgatgcgatggtatttagggtcctaacgaattctgaacaagtatttgaatcataattcattacca

SEQ ID NO: 27943 - DNA, 2294 bp, Zea Mays
gtcccgtcccgttctgcctccacacgccgccagaacgagaatccccctccccgtcccggcgtccccggctcccgagctccccctccagcctccccttccccggctcggccgcaccccgtccccggttcgttagagcgcgagcgcgcggcagccggccagccccaggcagccggcgccccgcggccaggttggctctcgctctcccctccggcacacctcgtccccggttgtccggctccggctccggatcagcagcgccccgagcacgagcgggaacgcgcgaacgccgggacgcggcagggtgcggcggggcggggcagctaggctctgaggcacggcagacggcttgcagtcaagatctctcaccagctgaattgccgattcacacatccagccatctcgacaacttgggtacacacgggacttcatcttaagagaatttagaacaaaaaagagagcatgtcagacctgcttcctgaagatgtacttgtcaacatcattggtcgtcttgcaccacgctaccttgccatatcccggtgcgtttgcaagacatggtgcaccaccattgatgcccataatctgctgcgtatggatctactcccacactcagtgtctggactctttattaacttcaatgagttaagcatgtcggaattcttatcccgcccctcaaaaggaccagcaatatctggtaaatttgactatttgcctagcgcgggccaagtcatagaccactgcaacgggctcatcttgttacacgaatgtgtagttaacccggccacacgacagtgggcgctgctgcccccacgcccaagcccaaatatgcctgagcacttttgtcacgggatgtaccttgtctttgaccccacattgtcatcacattatgaggtattcctgatccctcaggtctcatacaattccaacttagaccctgcaatagaggaattggaatggccaccttcgccttgcatcgtacaagtgttgtcatcaaggacaaagttgtgggaggagaggttgtttgttcgagaaggagaggctgcaggatatcattgtcaaatgataaataccaagtaatcaagccacctgtagattttgaatggtttgaatttgaaaatgaatccaggctatccaaaaacctttatttgggaaaatcagagaaaggggtgtactgtgctttgcgttatccgtcaaccgtttccttttcgatttacattctcgatgaatctgacggcaaaacggagtggataatgaagcctcactattatctcgggagtcaaggaattgacgggcctggaccctggactctacaagatatcaactataactgggacacccagtatgaagacagtatggaggaaaagttcgagtgggactccgacagcgataatgttgtcgagaacagaagcaacggtggatatccttgccttcctcgtatagaacttcttgggtttcacccctacaaggatgttgtcttcttgagcgacacgctgagacgaggattggcctatcacctagacagctcaaagatccaagacctgggtaacctccatccaacatattatggaactgaacaggggattcagccatttctactgacggctttcccatacacaccctggaggggatggtttccagaagacacataatggtacatacagagtaccgaacgtaagacataaagaaggcattagctgatctgaaaccgaagttctgaccgggcatggcgaaggtccctccttcacggtttcctgatgctgctgccgctctggatcgacagacttcagcttgagagtagtttagccagctgcttagcgccgtggacgtggggatggacacgtcgcattgcgcgcttagtggctggttttgtgcgttgtttggctaagtttttttttttttggttagaataaaagggagaagagaaaacactccagttgcgcagcaccaaaaccggttcaccactctcttgtcatttgttttgtttgttctcatcggggcgtgccaaaattttgctttctggcagctagcctagcggacccaatggtagattcatccttggggaggatggcagttagggaaaggttgtgctatgcgaccgtggagcgtggatgtggatgatgctggtaggcagaaaaaggtttcggagggcgattgggatcggttgcgagcgaccagattttgatgcgcaccccagcagcatctcagggcagcgtagtcggtctccgcccaaggcgatgcgatggtatttagggtcctaacgaattctgaacaagtatttgaatcataattcattacca

SEQ ID NO: 27944 - DNA, 2319 bp, Zea Mays
gtcccgtcccgttctgcctccacacgccgccagaacgagaatccccctccccgtcccggcgtccccggctcccgagctccccctccagcctccccttccccggctcggccgcaccccgtccccggttcgttagagcgcgagcgcgcggcagccggccagccccaggcagccggcgccccgcggccaggttggctctcgctctcccctccggcacacctcgtccccggttgtccggctccggctccggatcagcagcgccccgagcacgagcgggaacgcgcgaacgccgggacgcggcagggtgcggcggggcggggcagctaggctctgaggcacggcagacggcttgcagtcaagatctctcaccagctgaattgccgattcacacatccagccatctcgacaacttgggtacacacgggacttcatcttaagagaatttagaacaaaaaagagagcatgtcagacctgcttcctgaagatgtacttgtcaacatcattggtcgtcttgcaccacgctaccttgccatatcccggtgcgtttgcaagacatggtgcaccaccattgatgcccataatctgctgcgtatggatctactcccacactcagtgtctggactctttattaacttcaatgagttaagcatgtcggaattcttatcccgcccctcaaaaggaccagcaatatctgttaacccggccacacgacagtgggcgctgctgcccccacgcccaagcccaaatatgcctgagcacttttgtcacgggatgtaccttgtctttgaccccacattgtcatcacattatgaggtattcctgatccctcaggtctcatacaattccaacttagaccctgcaatagaggaattggaatggccaccttcgccttgcatcgtacaagtgttgtcatcaaggacaaagttgtgggaggagaggttgtttgttcgagaaggagaggctgcaggtaatgtcgctgacattcggttggattttcaagctgttcaggagaatgctgtctattggcggggagtactttatgtaaattaccaatccaaatttattatgaggatatcattgtcaaatgataaataccaagtaatcaagccacctgtagattttgaatggtttgaatttgaaaatgaatccaggctatccaaaaacctttatttgggaaaatcagagaaaggggtgtactgtgctttgcgttatccgtcaaccgtttccttttcgatttacattctcgatgaatctgacggcaaaacggagtggataatgaagcctcactattatctcgggagtcaaggaattgacgggcctggaccctggactctacaagatatcaactataactgggacacccagtatgaagacagtatggaggaaaagttcgagtgggactccgacagcgataatgttgtcgagaacagaagcaacggtggatatccttgccttcctcgtatagaacttcttgggtttcacccctacaaggatgttgtcttcttgagcgacacgctgagacgaggattggcctatcacctagacagctcaaagatccaagacctgggtaacctccatccaacatattatggaactgaacaggggattcagccatttctactgacggctttcccatacacaccctggaggggatggtttccagaagacacataatggtacatacagagtaccgaacgtaagacataaagaaggcattagctgatctgaaaccgaagttctgaccgggcatggcgaaggtccctccttcacggtttcctgatgctgctgccgctctggatcgacagacttcagcttgagagtagtttagccagctgcttagcgccgtggacgtggggatggacacgtcgcattgcgcgcttagtggctggttttgtgcgttgtttggctaagtttttttttttttggttagaataaaagggagaagagaaaacactccagttgcgcagcaccaaaaccggttcaccactctcttgtcatttgttttgtttgttctcatcggggcgtgccaaaattttgctttctggcagctagcctagcggacccaatggtagattcatccttggggaggatggcagttagggaaaggttgtgctatgcgaccgtggagcgtggatgtggatgatgctggtaggcagaaaaaggtttcggagggcgattgggatcggttgcgagcgaccagattttgatgcgcaccccagcagcatctcagggcagcgtagtcggtctccgcccaaggcgatgcgatggtatttagggtcctaacgaattctgaacaagtatttgaatcataattcattacca

SEQ ID NO: 27945 - DNA, 2093 bp, Zea Mays
ggaggccagacgccgagtcccgtcccgttctgcctccacacgccgccagaacgagaatccccctccccgtcccggcgtccccggctcccgagctccccctccagcctccccttccccggctcggccgcaccccgtccccggttcgttagagcgcgagcgcgcggcagccggccagccccaggcagccggcgccccgcggccaggttggctctcgctctcccctccggcacacctcgtccccggttgtccggctccggctccggatcagcagcgccccgagcacgagcgggaacgcgcgaacgccgggacgcggcagggtgcggcggggcggggcagctaggctctgaggcacggcagacggcttgcagtcaagatctctcaccagctgaattgccgattcacacatccagccatctcgacaacttgggtacacacgggacttcatcttaagagaatttagaacaaaaaagagagcatgtcagacctgcttcctgaagatgtacttgtcaacatcattggtcgtcttgcaccacgctaccttgccatatcccggtgcgtttgcaagacatggtgcaccaccattgatgcccataatctgctgcgtctcatacaattccaacttagaccctgcaatagaggaattggaatggccaccttcgccttgcatcgtacaagtgttgtcatcaaggacaaagttgtgggaggagaggttgtttgttcgagaaggagaggctgcaggtaatgtcgctgacattcggttggattttcaagctgttcaggagaatgctgtctattggcggggagtactttatgtaaattaccaatccaaatttattatgaggatatcattgtcaaatgataaataccaagtaatcaagccacctgtagattttgaatggtttgaatttgaaaatgaatccaggctatccaaaaacctttatttgggaaaatcagagaaaggggtgtactgtgctttgcgttatccgtcaaccgtttccttttcgatttacattctcgatgaatctgacggcaaaacggagtggataatgaagcctcactattatctcgggagtcaaggaattgacgggcctggaccctggactctacaagatatcaactataactgggacacccagtatgaagacagtatggaggaaaagttcgagtgggactccgacagcgataatgttgtcgagaacagaagcaacggtggatatccttgccttcctcgtatagaacttcttgggtttcacccctacaaggatgttgtcttcttgagcgacacgctgagacgaggattggcctatcacctagacagctcaaagatccaagacctgggtaacctccatccaacatattatggaactgaacaggggattcagccatttctactgacggctttcccatacacaccctggaggggatggtttccagaagacacataatggtacatacagagtaccgaacgtaagacataaagaaggcattagctgatctgaaaccgaagttctgaccgggcatggcgaaggtccctccttcacggtttcctgatgctgctgccgctctggatcgacagacttcagcttgagagtagtttagccagctgcttagcgccgtggacgtggggatggacacgtcgcattgcgcgcttagtggctggttttgtgcgttgtttggctaagtttttttttttttggttagaataaaagggagaagagaaaacactccagttgcgcagcaccaaaaccggttcaccactctcttgtcatttgttttgtttgttctcatcggggcgtgccaaaattttgctttctggcagctagcctagcggacccaatggtagattcatccttggggaggatggcagttagggaaaggttgtgctatgcgaccgtggagcgtggatgtggatgatgctggtaggcagaaaaaggtttcggagggcgattgggatcggttgcgagcgaccagattttgatgcgcaccccagcagcatctcagggcagcgtagtcggtctccgcccaaggcgatgcgatggtatttagggtcctaacgaattctgaacaagtatttgaatcataattcattacca

SEQ ID NO: 27946 - DNA, 1524 bp, Zea Mays
catcacggaagtacaggcaccagcaaggcacggagcaaggcaggcagaggtaccaagtgcaatggggaaagaagttgttgatatgtctactgatgaagaatcagattgcgtagttatgtgtccacctaacagaaatgctgatcatgaggaagctgtgagtggcagccatgatgaagattcttcaggaaggcaagagaacccttatgctgtgaactcacatatgaacacccgtggccaggaagatgtgtctgtaaacccagacctgctcaagctgattcatcagcaggagtcttctgtcagcaattcaccatcaaaacctgcaggagctagacagcaagggtctagccatactgtccctgagtcatgcactattgcacctgaaagaaggtcatctggagcaggaacttgtgctccaatttcttatcccaccagcagcggggaaaaactttcagatataagtagctcctcaccaagaagcatgacaaagagtccatcagtcacatgcaggaagcctctccaatctgacaatacttctcacagtcaagaagaggactcatattctgtcacttcttcaactgtaacttcagcgagagctggaaaaactaagaagacaacggttgctgttgcacctacatttgtctgtgataatcgtgctgagaagagaggagagttttacacaaaattagaagaaaagcgcaaggctttggaagaggagaaactccaagcagaggccagaaagcaggaagaggaagaagaagctctaagacaactgaggaagaacttggtcgtccgagcgaaacccgtgccgagcttctaccaagaacccccaccaaaggttgaacttaagaaggtgcctccaactcgtgccaagtcaccaaagctgacgcggaggaagagctgcagcgacacgcctcacacaccagagggaggaaacggcggcggcggcgcagtgtgctgccggctgcaccgccacagcatcgggaactccaaagacatcggcagcaaggcacaatgctctccaaagactggaccagctgctaagtccagggcgcccccaaatccagggaagacccgagggcttccatgaagaaagcgggacagcagacaagcgccgccgctgtacaaacctgacccgtgaagcatccattgccatgccgtttttcatcttaatccatataccctcacatcacccggaaagatggcctcatgccccggcaacagacagcgtgcctggtgctggattgtttttttttgggcgttgcccttgtaagaacctggctgcctgccagagaccgtgcgctgtgtccgtgtctgtaaatttgctgcaagttttgtatggggtgaccgagtcggtcctgtgtgagaaccaaacggccgggcatattgtcattgcgtggggggcagcattcgctgatactatgtaatgtacctgagtgagctgtaacctgttgtgggcatattggcaaagcgattctgattgatgtcgaaaaaaattgaccaggtcatgcatgattcttttctttt

SEQ ID NO: 27947 - DNA, 876 bp, Zea Mays
tgccttcaaccatatcacaaatgcggaggaatttgtggaggcaagacgaacagctgcacttaataatgttccttcttgtatgtggtctccggtaccacctcttgagttaaaaggagtatctgctgatgcactaaatgcaaatgctggctttgttactttcgttgtttaccctcggcatgttgagggtaaaaagctagatagaacagtttggaatttgttgacatttcatgcttatgtaagctatcatgtaaagtgttctgaaggattcatgcataccaggatgaggcgcagggttgagtcgctgatccaggcgttggaccgggcgaagtctgatgctgagaagttgaagaagttggtacacggtggatctttcaaaagactgagcctgaagaacgagggggactcgcgtttctgaagggaattggcaaatgttgttgttttccatttggctaatgacttctgttgtgggaagcttacttccgttcagttttgggagcgaaggctcggaaccggttaaatccatgccattgaattttaatgtaaattcgcgttgcttttacatatttactagcctgaaatctctcggcgtatcagttccatgacacatcgcctttgcaaccggagagcctgctgcctgcatcttggtgcaagtagtttgtttttgccatgagatgtctgagtctgatcttttttggcattaataaatgtgttgttcttggatcacatgatgtagtagggagttgaggcttggttgaatcacatgaccactcacggtcacggtacagcatcggctgagttatgtcgagcagccgcattcatttttttataagcttgatggtgtattgttttataagcttcggctgagttacgctcgaa

SEQ ID NO: 27948 - DNA, 1834 bp, Zea Mays
attagtcgttcgatcataacacagacgatcagtttgcctgtgtttgattgagacgagagcagcagagcgccaccacgcagcacgcacggacgccatcgaggaaccctagaccagagcacatcacacggccggcgactggcgccccctcttcggtccccagcgcggcgacgccctcctgcttgagcaggtgtcctcttctgtctgcttgagcaggtgacttcctgggctttaggtactcgctttcgcttccaaccagcgcgtcctcagccagcgctggaggccgcccagccgcgcctgcgaccgcagaccgcgcgtcctcactcagccagcgctggagatctcctgtccgcccagccgcgcctgcgacagtgcgaccgccctcctgcccccagcactgcaagatgatactgctccagtccccatcgaggttcctgctccagatcctgcaagaccgtgttctcagtggcgagaagggcatggacattgactgtcacacggtagagttcgatgatgtccggtatcatatccagttttctatgaggaatccaaaggtaatggtgttgtcagttgctttgcctctgccacctcctgaagcgattctgtatgatgggctaccactaggtgccattgaagctataaaagcagcatatgggccagttgtgcagattcttgatcctccaaaggacgggtttgatctcacaatgaagataaatttgacaaaacttccgctagatgaagagcaaaggaatactatcttgacacaaattgcatctattagagaggttgtgttgggtgcaccactgaagctcctgctgaaacatttagcctcaaagacagttgcacctaatgttaacaaccttgttgctcttgttcaccgccctaatgaatcatttttccttgctccccaggcagataaagttactattgtgtatccaatgagattccaggactccattgatattgttttagcaacttccttcctgcaggaatttgtggaggcaagacgaacagctgcacttaataatgttccttcttgtatgtggtctccggtaccacctcttgagttaaaaggagtatctgctgatgcactaaatgcaaatgctggctttgttactttcgttgtttaccctcggcatgttgagggtaaaaagctagatagaacagtttggaatttgttgacatttcatgcttatgtaagctatcatgtaaagtgttctgaaggattcatgcataccaggatgaggcgcagggttgagtcgctgatccaggcgttggaccgggcgaagtctgatgctgagaagttgaagaagttggtacacggtggatctttcaaaagactgagcctgaagaacgagggggactcgcgtttctgaagggaattggcaaatgttgttgttttccatttggctaatgacttctgttgtgggaagcttacttccgttcagttttgggagcgaaggctcggaaccggttaaatccatgccattgaattttaatgtaaattcgcgttgcttttacatatttactagcctgaaatctctcggcgtatcagttccatgacacatcgcctttgcaaccggagagcctgctgcctgcatcttggtgcaagtagtttgtttttgccatgagatgtctgagtctgatcttttttggcattaataaatgtgttgttcttggatcacatgatgtagtagggagttgaggcttggttgaatcacatgaccactcacggtcacggtacagcatcggctgagttatgtcgagcagccgcattcatttttttataagcttgatggtgtattgttttataagcttcggctgagttacgctcgaa

SEQ ID NO: 27949 - DNA, 3419 bp, Zea Mays
cctgcgcccctttgctgtctcaaacctaccttaaacccttgttagtttctagaaccttccagacctccagttcccgacctcggcgccatggacctggacccagaggggatcttccgcgacgacagcgatgaagacgaagacagtgtccaggagagggaggcgaacaaggagatggttgtctaccttgtcgacgcctcgcccaaaatgttcacccctgccaccacccaggacaatgaaaagcaggagacacatttccataccattgttaactgcatcacagagtctctgaagacacaaattattggtagatcttatgatgaagtcgcaatatgtttctttaacactaaagagaagaagaatttacaggactcagccggtgtttatgtttataatgtcggagacagagagcaacttgatagacctactgcaaaactcatcaaggatttttctttgatagaagattcttttatgagcaccattggaagtcgatatggaataacagctggatctcgggagaataccctgtataatgctctttgggttgctcaggcgctgttgcgcaagggatctgtgaagaccgtgagtaaacgaattcttatattcaccaatgaagatgatccttttggtactattacaggagcagtgaaaactgatatgattaggacaacacttcaacgtgcaaaggatgcacaagatcttggcctgtctattgaacttcttccactgagcccgcctgatgaccagttcaacatgtccctgttttatgcagatttgattggtctggatggagatgagatgaccgaatatttgccatctgctggtgataagcacatatattagtatccagtgggacgagactgggaatagctaagccacatgaatacatgattttggagctgaagtttatcagtgatctgattgaatacgtaaggctaattctcgctgagataagaggcgttgagaggtctttcatatgcaatgatactggggctctacttcaggatgcacagacacgtttccagatgtacaatgacacaattgtcaaattttctgtacgtgaactctctgaggttaaaagggttgcaagccatcatcttcgccttataggtttcaagccattggattgcttgaaagattaccataacttaagaccatcgacatttatttatccgagtgatgagcgtatatttggaagcacctgtgttttcgttgctttacatagctcaatgttacgtcttggaaggtttgcacttgcattttatgggaatccaactcgaccacaactcatagcccttgttgctcaagaagaggttacttcgtctggtcgtcagtttgaaccgcctggcatgcacatgatctatcttccatactccgatgatattagatatcctgaagaagttcatgtgacttctgatgatgcaccgcgtgcaacagatgaacaaatcaagaaagcttcgaacatattcaaacgtattgatctgataaatttctctgcatgccaatttgctaacccagaaatttacctacagagtcagggtcaactgccaggggtagccaatgctattgaggaattcaagacttcagtctatggtgaaaattatgaccaagaggaggcagaagcggcagcagggaaagcttcccgtggtaatgcttcaaaaaagcggaaggaggtcactgatgcagctgcgcagataagtgctgcttatgattgggcagaacttgcagacaatggaaaactgaaggaaatgaccacggtggaattgagatcctacctgaccgcgcatgatctcccggtttctggtaagaaagatgtacttatcagcaggatcttgactcacctgggttttatgctcagggtactgttgcatgctgcgaaatggctttggcttcaaatgagcttggagacaggagaagctgatgaagtcatgtgttgggcaatccttgtcatctataggcactgcaagatgatactgctccagtccccatcgaggttcctgctccagatcctgcaagaccgtgttctcagtggcgagaagggcatggacattgactgtcacacggtagagttcgatgatgtccggtatcatatccagttttctatgaggaatccaaaggtaatggtgttgtcagttgctttgcctctgccacctcctgaagcgattctgtatgatgggctaccactaggtgccattgaagctataaaagcagcatatgggccagttgtgcagattcttgatcctccaaaggacgggtttgatctcacaatgaagataaatttgacaaaacttccgctagatgaaggttctagagttcccttctcaagagcaaaggaatactatcttgacacaaattgcatctattagagaggttgtgttgggtgcaccactgaagctcctgctgaaacatttagcctcaaagacagttgcacctaatgttaacaaccttgttgctcttgttcaccgccctaatgaatcatttttccttgctccccaggcagataaagttactattgtgtatccaatgagattccaggactccattgatattgttttagcaacttccttcctgcaggaatttgtggaggcaagacgaacagctgcacttaataatgttccttcttgtatgtggtctccggtaccacctcttgagttaaaaggagtatctgctgatgcactaaatgcaaatgctggctttgttactttcgttgtttaccctcggcatgttgagggtaaaaagctagatagaacagtttggaatttgttgacatttcatgcttatgtaagctatcatgtaaagtgttctgaaggattcatgcataccaggatgaggcgcagggttgagtcgctgatccaggcgttggaccgggcgaagtctgatgctgagaagttgaagaagttggtacacggtggatctttcaaaagactgagcctgaagaacgagggggactcgcgtttctgaagggaattggcaaatgttgttgttttccatttggctaatgacttctgttgtgggaagcttacttccgttcagttttgggagcgaaggctcggaaccggttaaatccatgccattgaattttaatgtaaattcgcgttgcttttacatatttactagcctgaaatctctcggcgtatcagttccatgacacatcgcctttgcaaccggagagcctgctgcctgcatcttggtgcaagtagtttgtttttgccatgagatgtctgagtctgatcttttttggcattaataaatgtgttgttcttggatcacatgatgtagtagggagttgaggcttggttgaatcacatgaccactcacggtcacggtacagcatcggctgagttatgtcgagcagccgcattcatttttttataagcttgatggtgtattgttttataagcttcggctgagttacgctcgaa

SEQ ID NO: 27950 - DNA, 3892 bp, Zea Mays
gagacaaggccaaaatcatcgctgcgccgccagtggacgcgttcgactccggccgccgcccctgctcctcctgcccacccgcaccggccattgccctcgcctgctctgccacccgcaccttccaccgcccccgcgtgctcctccgcaggtctggccgttgcacccacctgctccccaccaccgccgccccacccacttatccaccgttgccggtcgtcgccccacctgctcccccactgacaccggtcgagaaccttccagacctccagttcccgacctcggcgccatggacctggacccagaggggatcttccgcgacgacagcgatgaagacgaagacagtgtccaggagagggaggcgaacaaggagatggttgtctaccttgtcgacgcctcgcccaaaatgttcacccctgccaccacccaggacaatgaaaagcaggagacacatttccataccattgttaactgcatcacagagtctctgaagacacaaattattggtagatcttatgatgaagtcgcaatatgtttctttaacactaaagagaagaagaatttacaggactcagccggtgtttatgtttataatgtcggagacagagagcaacttgatagacctactgcaaaactcatcaaggatttttctttgatagaagattcttttatgagcaccattggaagtcgatatggaataacagctggatctcgggagaataccctgtataatgctctttgggttgctcaggcgctgttgcgcaaggggagcagtgaaaactgatatgattaggacaacacttcaacgtgcaaaggatgcacaagatcttggcctgtctattgaacttcttccactgagcccgcctgatgaccagttcaacatgtccctgttttatgcagtaagtctccataattgttttttttccttttctctatgtgctaactgctgaacaatttcaattgcccaggatttgattggtctggatggagatgagatgaccgaatatttgccatctgctggtgataagctagaggatatgactaatcaactgagaaaacggataatgaagaagcgcagaatcaaaactctttcatttgcgattaccaatgatgtgtgcatagaagtcaatacatatgcgctggtccgtcctactactacagggacaatcacatggcttgattcactaagtaacctcccattaaaggttgagaggtctttcatatgcaatgatactggggctctacttcaggatgcacagacacgtttccagatgtacaatgacacaattgtcaaattttctgtacgtgaactctctgaggttaaaagggttgcaagccatcatcttcgccttataggtttcaagccattggattgcttgaaagattaccataacttaagaccatcgacatttatttatccgagtgatgagcgtatatttggaagcacctgtgttttcgttgctttacatagctcaatgttacgtcttggaaggtttgcacttgcattttatgggaatccaactcgaccacaactcatagcccttgttgctcaagaagaggttacttcgtctggtcgtcagtttgaaccgcctggcatgcacatgatctatcttccatactccgatgatattagatatcctgaagaagtaaggactaacgttgtatttcaactttacgatctctgtaagctaattttcttgcttggtttgcaggttcatgtgacttctgatgatgcaccgcgtgcaacagatgaacaaatcaagaaagcttcgaacatattcaaacgtattgatctgataaatttctctgcatgccaatttgctaacccagctttgcaaagacactatgggatcttggaggccttagctttaggcgaagatgagatgcctgatataaaggatgagaccctgcctgacgaagaaggcttgtctaagccaggggtagccaatgctattgaggaattcaagacttcagtctatggtgaaaattatgaccaagaggaggcagaagcggcagcagggaaagcttcccgtggtaatgcttcaaaaaagcggaaggaggtcactgatgcagctgcgcagataagtgctgcttatgattgggcagaacttgcagacaatggaaaactgaaggaaatgaccacggtggaattgagatcctacctgaccgcgcatgatctcccggtttctggtaagaaagatgtacttatcagcaggatcttgactcacctgggttttatgctcagggtactgttgcatgctgcgaaatggctttggcttcaaatgagcttggagacaggagaagctgatgaagtcatgtgttgggcaatccttgtcatctatagggtgacttcctgggctttaggtactcgctttcgcttccaaccagcgcgtcctcagccagcgctggaggccgcccagccgcgcctgcgaccgcagaccgcgcgtcctcactcagccagcgctggagatctcctgtccgcccagccgcgcctgcgacagtgcgaccgccctcctgcccccagtggcgagaagggcatggacattgactgtcacacggtagagttcgatgatgtccggtatcatatccagttttctatgaggaatccaaaggtaatggtgttgtcagttgctttgcctctgccacctcctgaagcgattctgtatgatgggctaccactaggtgccattgaagctataaaagcagcatatgggccagttgtgcagattcttgatcctccaaaggacgggtttgatctcacaatgaagataaatttgacaaaacttccgctagatgaagagcaaaggaatactatcttgacacaaattgcatctattagagaggttgtgttgggtgcaccactgaagctcctgctgaaacatttagcctcaaagacagttgcacctaatgttaacaaccttgttgctcttgttcaccgccctaatgaatcatttttccttgctccccaggcagataaagttactattgtgtatccaatgagattccaggactccattgatattgttttagcaacttccttcctgcaggaatttgtggaggcaagacgaacagctgcacttaataatgttccttcttgtatgtggtctccggtaccacctcttgagttaaaaggagtatctgctgatgcactaaatgcaaatgctggctttgttactttcgttgtttaccctcggcatgttgagggtaaaaagctagatagaacagtttggaatttgttgacatttcatgcttatgtaagctatcatgtaaagtgttctgaaggattcatgcataccaggatgaggcgcagggttgagtcgctgatccaggcgttggaccgggcgaagtctgatgctgagaagttgaagaagttggtacacggtggatctttcaaaagactgagcctgaagaacgagggggactcgcgtttctgaagggaattggcaaatgttgttgttttccatttggctaatgacttctgttgtgggaagcttacttccgttcagttttgggagcgaaggctcggaaccggttaaatccatgccattgaattttaatgtaaattcgcgttgcttttacatatttactagcctgaaatctctcggcgtatcagttccatgacacatcgcctttgcaaccggagagcctgctgcctgcatcttggtgcaagtagtttgtttttgccatgagatgtctgagtctgatcttttttggcattaataaatgtgttgttcttggatcacatgatgtagtagggagttgaggcttggttgaatcacatgaccactcacggtcacggtacagcatcggctgagttatgtcgagcagccgcattcatttttttataagcttgatggtgtattgttttataagcttcggctgagttacgctcgaa

SEQ ID NO: 27951 - DNA, 3330 bp, Zea Mays
gtggtttcccacaaaaaaaacggcgccacggtagcgagtttctagaaccttcccacgccctgcgcccctttgctgtctcatacctgtcttaaaccctagctagtttctaggaccttcccacgccctgcgcccctttgctgtctcaaacctaccttaaacccttgttagtttctagaaccttccagacctccagttcccgacctcggcgccatggacctggacccagaggggatcttccgcgacgacagcgatgaagacgaagacagtgtccaggagagggaggcgaacaaggagatggttgtctaccttgtcgacgcctcgcccaaaatgttcacccctgccaccacccaggacaatgaaaagcaggagacacatttccataccattgttaactgcatcacagagtctctgaagacacaaattattggtagatcttatgatgaagtcgcaatatgtttctttaacactaaagagaagaagaatttacaggactcagccggtgtttatgtttataatgtcggagacagagagcaacttgatagacctactgcaaaactcatcaaggatttttctttgatagaagattcttttatgagcaccattggaagtcgatatggaataacagctggatctcgggagaataccctgtataatgctctttgggttgctcaggcgctgttgcgcaagggatctgtgaagaccgatgcacaagatcttggcctgtctattgaacttcttccactgagcccgcctgatgaccagttcaacatgtccctgttttatgcagatttgattggtctggatggagatgagatgaccgaatatttgccatctgctggtgataagctagaggatatgactaatcaactgagaaaacggataatgaagaagcgcagaatcaaaactctttcatttgcgattaccaatgatgtgtgcatagaagtcaatacatatgcgctggtccgtcctactactacagggacaatcacatggcttgattcactaagtaacctcccattaaaggttgagaggtctttcatatgcaatgatactggggctctacttcaggatgcacagacacgtttccagatgtacaatgacacaattgtcaaattttctgtacgtgaactctctgaggttaaaagggttgcaagccatcatcttcgccttataggtttcaagccattggattgcttgaaagattaccataacttaagaccatcgacatttatttatccgagtgatgagcgtatatttggaagcacctgtgttttcgttgctttacatagctcaatgttacgtcttggaaggtttgcacttgcattttatgggaatccaactcgaccacaactcatagcccttgttgctcaagaagaggttacttcgtctggtcgtcagtttgaaccgcctggcatgcacatgatctatcttccatactccgatgatattagatatcctgaagaagttcatgtgacttctgatgatgcaccgcgtgcaacagatgaacaaatcaagaaagcttcgaacatattcaaacgtattgatctgataaatttctctgcatgccaatttgctaacccagaaatttacctacagagtcagggtcaactgccaggggtagccaatgctattgaggaattcaagacttcagtctatggtgaaaattatgaccaagaggaggcagaagcggcagcagggaaagcttcccgtggtaatgcttcaaaaaagcggaaggaggtcactgatgcagctgcgcagataagtgctgcttatgattgggcagaacttgcagacaatggaaaactgaaggaaatgaccacggtggaattgagatcctacctgaccgcgcatgatctcccggtttctggtaagaaagatgtacttatcagcaggatcttgactcacctgggttttatgctcagggtactgttgcatgctgcgaaatggctttggcttcaaatgagcttggagacaggagaagctgatgaagtcatgtgttgggcaatccttgtcatctatagggtgacttcctgggctttaggtactcgctttcgcttccaaccagcgcgtcctcagccagcgctggaggccgcccagccgcgcctgcgaccgcagaccgcgcgtcctcactcagccagcgctggagatctcctgtccgcccagccgcgcctgcgacagtgcgaccgccctcctgcccccagtggcgagaagggcatggacattgactgtcacacggtagagttcgatgatgtccggtatcatatccagttttctatgaggaatccaaaggtaatggtgttgtcagttgctttgcctctgccacctcctgaagcgattctgtatgatgggctaccactaggtgccattgaagctataaaagcagcatatgggccagttgtgcagattcttgatcctccaaaggacgggtttgatctcacaatgaagataaatttgacaaaacttccgctagatgaagagcaaaggaatactatcttgacacaaattgcatctattagagaggttgtgttgggtgcaccactgaagctcctgctgaaacatttagcctcaaagacagttgcacctaatgttaacaaccttgttgctcttgttcaccgccctaatgaatcatttttccttgctccccaggcagataaagttactattgtgtatccaatgagattccaggactccattgatattgttttagcaacttccttcctgcagcttgagaaacagagggagcgttgggttcctacggcactgacgcgccatggtcatgatgtcacggtgctccccaagcacgtccgcgtgagtgagcaggatcgagggagcaacatcctctctgggctccggcggcaatgcaaaggtgaggctgcattgcagagagtacggtgtgaaggtgacacgagttggacaaaacagagaagtgtgaaatgtgtggacagtgttgttccagatgtgtggacgagaaggaggcctgaagaggtggcccagtagcctgggtggagtgactatctgttacgtacgtcgtagcggctgtaatatgggcgattgtctgtcatagctggttggagatgttgccgctaagcatgatctccggcgatttagaacactggttctatcagatttgtgccttggaaaagcatttgcaaatattgggctcttcaccattgtaagtgcttcatatgggtagcagacctcaacagatgttggactgcaaataggcttgagaaaggaatcttgccacacccaagatcctgccccttttgtgatcaggatgaggaacaatccagaatttcttaacttcatgcgtttttgcaagatgtgcag

SEQ ID NO: 27952 - DNA, 2110 bp, Zea Mays
cctgcgcccctttgctgtctcaaacctaccttaaacccttgttagtttctagaaccttccagacctccagttcccgacctcggcgccatggacctggacccagaggggatcttccgcgacgacagcgatgaagacgaagacagtgtccaggagagggaggcgaacaaggagatggttgtctaccttgtcgacgcctcgcccaaaatgttcacccctgccaccacccaggacaatgaaaagcaggagacacatttccataccattgttaactgcatcacagagtctctgaagacacaaattattggtagatcttatgatgaagtcgcaatatgtttctttaacactaaagagaagaagaatttacaggactcagccggtgtttatgtttataatgtcggagacagagagcaacttgatagacctactgcaaaactcatcaaggatttttctttgatagaagattcttttatgagcaccattggaagtcgatatggaataacagctggatctcgggagaataccctgtataatgctctttgggttgctcaggcgctgttgcgcaagggatctgtgaagaccgatgcacaagatcttggcctgtctattgaacttcttccactgagcccgcctgatgaccagttcaacatgtccctgttttatgcagatttgattggtctggatggagatgagatgaccgaatatttgccatctgctggtgataagcacatatattagtatccagtgggacgagactgggaatagctaagccacatgaatacatgattttggagctgaagtttatcagtgatctgattgaatacgtaaggctaattctcgctgagataagaggcgttgagaggtctttcatatgcaatgatactggggctctacttcaggatgcacagacacgtttccagatgtacaatgacacaattgtcaaattttctgtacgtgaactctctgaggttaaaagggttgcaagccatcatcttcgccttataggtttcaagccattggattgcttgaaagattaccataacttaagaccatcgacatttatttatccgagtgatgagcgtatatttggaagcacctgtgttttcgttgctttacatagctcaatgttacgtcttggaaggtttgcacttgcattttatgggaatccaactcgaccacaactcatagcccttgttgctcaagaagaggttacttcgtctggtcgtcagtttgaaccgcctggcatgcacatgatctatcttccatactccgatgatattagatatcctgaagaagttcatgtgacttctgatgatgcaccgcgtgcaacagatgaacaaatcaagaaagcttcgaacatattcaaacgtattgatctgataaatttctctgcatgccaatttgctaacccagctttgcaaagacactatgggatcttggaggccttagctttaggcgaagatgagatgcctgatataaaggatgagaccctgcctgacgaagaaggcttgtctaagccaggggtagccaatgctattgaggaattcaagacttcagtctatggtgaaaattatgaccaagaggaggcagaagcggcagcagggaaagcttcccgtggtaatgcttcaaaaaagcggaaggaggtcactgatgcagctgcgcagataagtgctgcttatgattgggcagaacttgcagacaatggaaaactgaaggaaatgaccacggtggaattgagatcctacctgaccgcgcatgatctcccggtttctggtaagaaagatgtacttatcagcaggatcttgactcacctgggtaagtgaagccgggtatccgaactgttagtttcctgagacccgactgacatctgtagtgctgtctcgcggatccttgtggaccgtaatcctcccccgtgcaggctacgtgccgattttttgtatagcgacaggacagcaccagttgccaatgtaacctgtgttaagtttcgtcttgtggtatcatctgcttgtcattgtcaacatgaaacataatgtaattctggatacttagacccacaatatggagcataactgcataaggtatgttaaagcataggccctctttagcatggcta

SEQ ID NO: 27953 - DNA, 2021 bp, Zea Mays
cctgcgcccctttgctgtctcaaacctaccttaaacccttgttagtttctagaaccttccagacctccagttcccgacctcggcgccatggacctggacccagaggggatcttccgcgacgacagcgatgaagacgaagacagtgtccaggagagggaggcgaacaaggagatggttgtctaccttgtcgacgcctcgcccaaaatgttcacccctgccaccacccaggacaatgaaaagcaggagacacatttccataccattgttaactgcatcacagagtctctgaagacacaaattattggtagatcttatgatgaagtcgcaatatgtttctttaacactaaagagaagaagaatttacaggactcagccggtgtttatgtttataatgtcggagacagagagcaacttgatagacctactgcaaaactcatcaaggatttttctttgatagaagattcttttatgagcaccattggaagtcgatatggaataacagctggatctcgggagaataccctgtataatgctctttgggttgctcaggcgctgttgcgcaagggatctgtgaagaccgatgcacaagatcttggcctgtctattgaacttcttccactgagcccgcctgatgaccagttcaacatgtccctgttttatgcagatttgattggtctggatggagatgagatgaccgaatatttgccatctgctgatttagatggtgtttatttaatggcacatatattagtatccagtgggacgagactgggaatagctaagccacatgaatacatgattttggagctgaagtttatcagtgatctgattgaatacgttgagaggtctttcatatgcaatgatactggggctctacttcaggatgcacagacacgtttccagatgtacaatgacacaattgtcaaattttctgtacgtgaactctctgaggttaaaagggttgcaagccatcatcttcgccttataggtttcaagccattggattgcttgaaagattaccataacttaagaccatcgacatttatttatccgagtgatgagcgtatatttggaagcacctgtgttttcgttgctttacatagctcaatgttacgtcttggaaggtttgcacttgcattttatgggaatccaactcgaccacaactcatagcccttgttgctcaagaagaggttacttcgtctggtcgtcagtttgaaccgcctggcatgcacatgatctatcttccatactccgatgatattagatatcctgaagaagttcatgtgacttctgatgatgcaccgcgtgcaacagatgaacaaatcaagaaagcttcgaacatattcaaacgtattgatctgataaatttctctgcatgccaatttgctaacccagaaatttacctacagagtcagggtcaactgccaggggtagccaatgctattgaggaattcaagacttcagtctatggtgaaaattatgaccaagaggaggcagaagcggcagcagggaaagcttcccgtggtaatgcttcaaaaaagcggaaggaggtcactgatgcagctgcgcagataagtgctgcttatgattgggcagaacttgcagacaatggaaaactgaaggaaatgaccacggtggaattgagatcctacctgaccgcgcatgatctcccggtttctggtaagaaagatgtacttatcagcaggatcttgactcacctgggtaagtgaagccgggtatccgaactgttagtttcctgagacccgactgacatctgtagtgctgtctcgcggatccttgtggaccgtaatcctcccccgtgcaggctacgtgccgattttttgtatagcgacaggacagcaccagttgccaatgtaacctgtgttaagtttcgtcttgtggtatcatctgcttgtcattgtcaacatgaaacataatgtaattctggatacttagacccacaatatggagcataactgcataaggtatgttaaagcataggccctctttagcatggcta

SEQ ID NO: 27954 - DNA, 2061 bp, Zea Mays
cctgcgcccctttgctgtctcaaacctaccttaaacccttgttagtttctagaaccttccagacctccagttcccgacctcggcgccatggacctggacccagaggggatcttccgcgacgacagcgatgaagacgaagacagtgtccaggagagggaggcgaacaaggagatggttgtctaccttgtcgacgcctcgcccaaaatgttcacccctgccaccacccaggacaatgaaaagcaggagacacatttccataccattgttaactgcatcacagagtctctgaagacacaaattattggtagatcttatgatgaagtcgcaatatgtttctttaacactaaagagaagaagaatttacaggactcagccggtgtttatgtttataatgtcggagacagagagcaacttgatagacctactgcaaaactcatcaaggatttttctttgatagaagattcttttatgagcaccattggaagtcgatatggaataacagctggatctcgggagaataccctgtataatgctctttgggttgctcaggcgctgttgcgcaagggatctgtgaagaccgtgagtaaacgaattcttatattcaccaatgaagatgatccttttggtactattacaggagcagtgaaaactgatatgattaggacaacacttcaacgtgcaaaggatgcacaagatcttggcctgtctattgaacttcttccactgagcccgcctgatgaccagttcaacatgtccctgttttatgcagatttgattggtctggatggagatgagatgaccgaatatttgccatctgctggtgataagcacatatattagtatccagtgggacgagactgggaatagctaagccacatgaatacatgattttggagctgaagtttatcagtgatctgattgaatacgtaaggctaattctcgctgagataagaggcgttgagaggtctttcatatgcaatgatactggggctctacttcaggatgcacagacacgtttccagatgtacaatgacacaattgtcaaattttctgtacgtgaactctctgaggttaaaagggttgcaagccatcatcttcgccttataggtttcaagccattggattgcttgaaagattaccataacttaagaccatcgacatttatttatccgagtgatgagcgtatatttggaagcacctgtgttttcgttgctttacatagctcaatgttacgtcttggaaggttcatgtgacttctgatgatgcaccgcgtgcaacagatgaacaaatcaagaaagcttcgaacatattcaaacgtattgatctgataaatttctctgcatgccaatttgctaacccagctttgcaaagacactatgggatcttggaggccttagctttaggcgaagatgagatgcctgatataaaggatgagaccctgcctgacgaagaaggcttgtctaagccaggggtagccaatgctattgaggaattcaagacttcagtctatggtgaaaattatgaccaagaggaggcagaagcggcagcagggaaagcttcccgtggtaatgcttcaaaaaagcggaaggaggtcactgatgcagctgcgcagataagtgctgcttatgattgggcagaacttgcagacaatggaaaactgaaggaaatgaccacggtggaattgagatcctacctgaccgcgcatgatctcccggtttctggtaagaaagatgtacttatcagcaggatcttgactcacctgggtaagtgaagccgggtatccgaactgttagtttcctgagacccgactgacatctgtagtgctgtctcgcggatccttgtggaccgtaatcctcccccgtgcaggctacgtgccgattttttgtatagcgacaggacagcaccagttgccaatgtaacctgtgttaagtttcgtcttgtggtatcatctgcttgtcattgtcaacatgaaacataatgtaattctggatacttagacccacaatatggagcataactgcataaggtatgttaaagcataggccctctttagcatggcta

SEQ ID NO: 27955 - DNA, 2186 bp, Zea Mays
gcgagtttctagaaccttcccacgccctgcgcccctttgctgtctcatacctgtcttaaaccctagctagtttctaggaccttcccacgccctgcgcccctttgctgtctcaaacctaccttaaacccttgttagtttctagaaccttccagacctccagttcccgacctcggcgccatggacctggacccagaggggatcttccgcgacgacagcgatgaagacgaagacagtgtccaggagagggaggcgaacaaggagatggttgtctaccttgtcgacgcctcgcccaaaatgttcacccctgccaccacccaggacaatgaaaagcaggagacacatttccataccattgttaactgcatcacagagtctctgaagacacaaattattggtagatcttatgatgaagtcgcaatatgtttctttaacactaaagagaagaagaatttacaggactcagccggtgtttatgtttataatgtcggagacagagagcaacttgatagacctactgcaaaactcatcaaggatttttctttgatagaagattcttttatgagcaccattggaagtcgatatggaataacagctggatctcgggagaataccctgtataatgctctttgggttgctcaggcgctgttgcgcaagggatctgtgaagaccgatgcacaagatcttggcctgtctattgaacttcttccactgagcccgcctgatgaccagttcaacatgtccctgttttatgcagatttgattggtctggatggagatgagatgaccgaatatttgccatctgctgatttagatggtgtttatttaatggcacatatattagtatccagtgggacgagactgggaatagctaagccacatgaatacatgattttggagctgaagtttatcagtgatctgattgaatacgttgagaggtctttcatatgcaatgatactggggctctacttcaggatgcacagacacgtttccagatgtacaatgacacaattgtcaaattttctgtacgtgaactctctgaggttaaaagggttgcaagccatcatcttcgccttataggtttcaagccattggattgcttgaaagattaccataacttaagaccatcgacatttatttatccgagtgatgagcgtatatttggaagcacctgtgttttcgttgctttacatagctcaatgttacgtcttggaaggtttgcacttgcattttatgggaatccaactcgaccacaactcatagcccttgttgctcaagaagaggttacttcgtctggtcgtcagtttgaaccgcctggcatgcacatgatctatcttccatactccgatgatattagatatcctgaagaagttcatgtgacttctgatgatgcaccgcgtgcaacagatgaacaaatcaagaaagcttcgaacatattcaaacgtattgatctgataaatttctctgcatgccaatttgctaacccagctttgcaaagacactatgggatcttggaggccttagctttaggcgaagatgagatgcctgatataaaggatgagaccctgcctgacgaagaaggcttgtctaagccaggggtagccaatgctattgaggaattcaagacttcagtctatggtgaaaattatgaccaagaggaggcagaagcggcagcagggaaagcttcccgtggtaatgcttcaaaaaagcggaaggaggtcactgatgcagctgcgcagataagtgctgcttatgattgggcagaacttgcagacaatggaaaactgaaggaaatgaccacggtggaattgagatcctacctgaccgcgcatgatctcccggtttctggtaagaaagatgtacttatcagcaggatcttgactcacctgggtaagtgaagccgggtatccgaactgttagtttcctgagacccgactgacatctgtagtgctgtctcgcggatccttgtggaccgtaatcctcccccgtgcaggctacgtgccgattttttgtatagcgacaggacagcaccagttgccaatgtaacctgtgttaagtttcgtcttgtggtatcatctgcttgtcattgtcaacatgaaacataatgtaattctggatacttagacccacaatatggagcataactgcataaggtatgttaaagcataggccctctttagcatggcta

SEQ ID NO: 27956 - DNA, 2285 bp, Zea Mays
cgccacggtagcgagtttctagaaccttcccacgccctgcgcccctttgctgtctcatacctgtcttaaaccctagctagtttctaggaccttcccacgccctgcgcccctttgctgtctcaaacctaccttaaacccttgttagtttctagaaccttccagacctccagttcccgacctcggcgccatggacctggacccagaggggatcttccgcgacgacagcgatgaagacgaagacagtgtccaggagagggaggcgaacaaggagatggttgtctaccttgtcgacgcctcgcccaaaatgttcacccctgccaccacccaggacaatgaaaagcaggagacacatttccataccattgttaactgcatcacagagtctctgaagacacaaattattggtagatcttatgatgaagtcgcaatatgtttctttaacactaaagagaagaagaatttacaggactcagccggtgtttatgtttataatgtcggagacagagagcaacttgatagacctactgcaaaactcatcaaggatttttctttgatagaagattcttttatgagcaccattggaagtcgatatggaataacagctggatctcgggagaataccctgtataatgctctttgggttgctcaggcgctgttgcgcaagggatctgtgaagaccgtgagtaaacgaattcttatattcaccaatgaagatgatccttttggtactattacaggagcagtgaaaactgatatgattaggacaacacttcaacgtgcaaaggatgcacaagatcttggcctgtctattgaacttcttccactgagcccgcctgatgaccagttcaacatgtccctgttttatgcagatttgattggtctggatggagatgagatgaccgaatatttgccatctgctggtgataagcacatatattagtatccagtgggacgagactgggaatagctaagccacatgaatacatgattttggagctgaagtttatcagtgatctgattgaatacgttgagaggtctttcatatgcaatgatactggggctctacttcaggatgcacagacacgtttccagatgtacaatgacacaattgtcaaattttctgtacgtgaactctctgaggttaaaagggttgcaagccatcatcttcgccttataggtttcaagccattggattgcttgaaagattaccataacttaagaccatcgacatttatttatccgagtgatgagcgtatatttggaagcacctgtgttttcgttgctttacatagctcaatgttacgtcttggaaggtttgcacttgcattttatgggaatccaactcgaccacaactcatagcccttgttgctcaagaagaggttacttcgtctggtcgtcagtttgaaccgcctggcatgcacatgatctatcttccatactccgatgatattagatatcctgaagaagttcatgtgacttctgatgatgcaccgcgtgcaacagatgaacaaatcaagaaagcttcgaacatattcaaacgtattgatctgataaatttctctgcatgccaatttgctaacccagctttgcaaagacactatgggatcttggaggccttagctttaggcgaagatgagatgcctgatataaaggatgagaccctgcctgacgaagaaggcttgtctaagccaggggtagccaatgctattgaggaattcaagacttcagtctatggtgaaaattatgaccaagaggaggcagaagcggcagcagggaaagcttcccgtggtaatgcttcaaaaaagcggaaggaggtcactgatgcagctgcgcagataagtgctgcttatgattgggcagaacttgcagacaatggaaaactgaaggaaatgaccacggtggaattgagatcctacctgaccgcgcatgatctcccggtttctggtaagaaagatgtacttatcagcaggatcttgactcacctgggtaagtgaagccgggtatccgaactgttagtttcctgagacccgactgacatctgtagtgctgtctcgcggatccttgtggaccgtaatcctcccccgtgcaggctacgtgccgattttttgtatagcgacaggacagcaccagttgccaatgtaacctgtgttaagtttcgtcttgtggtatcatctgcttgtcattgtcaacatgaaacataatgtaattctggatacttagacccacaatatggagcataactgcataaggtatgttaaagcataggccctctttagcatggcta

SEQ ID NO: 27957 - DNA, 2377 bp, Zea Mays
gtttcccacaaaaaaaacggcgccacggtagcgagtttctagaaccttcccacgccctgcgcccctttgctgtctcatacctgtcttaaaccctagctagtttctaggaccttcccacgccctgcgcccctttgctgtctcaaacctaccttaaacccttgttagtttctagaaccttccagacctccagttcccgacctcggcgccatggacctggacccagaggggatcttccgcgacgacagcgatgaagacgaagacagtgtccaggagagggaggcgaacaaggagatggttgtctaccttgtcgacgcctcgcccaaaatgttcacccctgccaccacccaggacaatgaaaagcaggagacacatttccataccattgttaactgcatcacagagtctctgaagacacaaattattggtagatcttatgatgaagtcgcaatatgtttctttaacactaaagagaagaagaatttacaggactcagccggtgtttatgtttataatgtcggagacagagagcaacttgatagacctactgcaaaactcatcaaggatttttctttgatagaagattcttttatgagcaccattggaagtcgatatggaataacagctggatctcgggagaataccctgtataatgctctttgggttgctcaggcgctgttgcgcaagggatctgtgaagaccgtgagtaaacgaattcttatattcaccaatgaagatgatccttttggtactattacaggagcagtgaaaactgatatgattaggacaacacttcaacgtgcaaaggatgcacaagatcttggcctgtctattgaacttcttccactgagcccgcctgatgaccagttcaacatgtccctgttttatgcagatttgattggtctggatggagatgagatgaccgaatatttgccatctgctggctagaggatatgactaatcaactgagaaaacggataatgaagaagcgcagaatcaaaactctttcatttgcgattaccaatgatgtgtgcatagaagtcaatacatatgcgctggtccgtcctactactacagggacaatcacatggcttgattcactaagtaacctcccattaaaggttgagaggtctttcatatgcaatgatactggggctctacttcaggatgcacagacacgtttccagatgtacaatgacacaattgtcaaattttctgtacgtgaactctctgaggttaaaagggttgcaagccatcatcttcgccttataggtttcaagccattggattgcttgaaagattaccataacttaagaccatcgacatttatttatccgagtgatgagcgtatatttggaagcacctgtgttttcgttgctttacatagctcaatgttacgtcttggaaggtttgcacttgcattttatgggaatccaactcgaccacaactcatagcccttgttgctcaagaagaggttacttcgtctggtcgtcagtttgaaccgcctggcatgcacatgatctatcttccatactccgatgatattagatatcctgaagaagttcatgtgacttctgatgatgcaccgcgtgcaacagatgaacaaatcaagaaagcttcgaacatattcaaacgtattgatctgataaatttctctgcatgccaatttgctaacccagctttgcaaagacactatgggatcttggaggccttagctttaggcgaagatgagatgcctgatataaaggatgagaccctgcctgacgaagaaggcttgtctaagccaggggtagccaatgctattgaggaattcaagacttcagtctatggtgaaaattatgaccaagaggaggcagaagcggcagcagggaaagcttcccgtggtaatgcttcaaaaaagcggaaggaggtcactgatgcagctgcgcagataagtgctgcttatgattgggcagaacttgcagacaatggaaaactgaaggaaatgaccacggtggaattgagatcctacctgaccgcgcatgatctcccggtttctggtaagaaagatgtacttatcagcaggatcttgactcacctgggtaagtgaagccgggtatccgaactgttagtttcctgagacccgactgacatctgtagtgctgtctcgcggatccttgtggaccgtaatcctcccccgtgcaggctacgtgccgattttttgtatagcgacaggacagcaccagttgccaatgtaacctgtgttaagtttcgtcttgtggtatcatctgcttgtcattgtcaacatgaaacataatgtaattctggatacttagacccacaatatggagcataactgcataaggtatgttaaagcataggccctctttagcatggcta

SEQ ID NO: 27958 - DNA, 2387 bp, Zea Mays
gtggtttcccacaaaaaaaacggcgccacggtagcgagtttctagaaccttcccacgccctgcgcccctttgctgtctcatacctgtcttaaaccctagctagtttctaggaccttcccacgccctgcgcccctttgctgtctcaaacctaccttaaacccttgttagtttctagaaccttccagacctccagttcccgacctcggcgccatggacctggacccagaggggatcttccgcgacgacagcgatgaagacgaagacagtgtccaggagagggaggcgaacaaggagatggttgtctaccttgtcgacgcctcgcccaaaatgttcacccctgccaccacccaggacaatgaaaagcaggagacacatttccataccattgttaactgcatcacagagtctctgaagacacaaattattggtagatcttatgatgaagtcgcaatatgtttctttaacactaaagagaagaagaatttacaggactcagccggtgtttatgtttataatgtcggagacagagagcaacttgatagacctactgcaaaactcatcaaggatttttctttgatagaagattcttttatgagcaccattggaagtcgatatggaataacagctggatctcgggagaataccctgtataatgctctttgggttgctcaggcgctgttgcgcaagggatctgtgaagaccgtgagtaaacgaattcttatattcaccaatgaagatgatccttttggtactattacaggagcagtgaaaactgatatgattaggacaacacttcaacgtgcaaaggatgcacaagatcttggcctgtctattgaacttcttccactgagcccgcctgatgaccagttcaacatgtccctgttttatgcagatttgattggtctggatggagatgagatgaccgaatatttgccatctgctggtgataagctagaggatatgactaatcaactgagaaaacggataatgaagaagcgcagaatcaaaactctttcatttgcgattaccaatgatgtgtgcatagaagtcaatacatatgcgctggtccgtcctactactacagggacaatcacatggcttgattcactaagtaacctcccattaaaggttgagaggtctttcatatgcaatgatactggggctctacttcaggatgcacagacacgtttccagatgtacaatgacacaattgtcaaattttctgtacgtgaactctctgaggttaaaagggttgcaagccatcatcttcgccttataggtttcaagccattggattgcttgaaagattaccataacttaagaccatcgacatttatttatccgagtgatgagcgtatatttggaagcacctgtgttttcgttgctttacatagctcaatgttacgtcttggaaggtttgcacttgcattttatgggaatccaactcgaccacaactcatagcccttgttgctcaagaagaggttacttcgtctggtcgtcagtttgaaccgcctggcatgcacatgatctatcttccatactccgatgatattagatatcctgaagaagttcatgtgacttctgatgatgcaccgcgtgcaacagatgaacaaatcaagaaagcttcgaacatattcaaacgtattgatctgataaatttctctgcatgccaatttgctaacccagctttgcaaagacactatgggatcttggaggccttagctttaggcgaagatgagatgcctgatataaaggatgagaccctgcctgacgaagaaggcttgtctaagccaggggtagccaatgctattgaggaattcaagacttcagtctatggtgaaaattatgaccaagaggaggcagaagcggcagcagggaaagcttcccgtggtaatgcttcaaaaaagcggaaggaggtcactgatgcagctgcgcagataagtgctgcttatgattgggcagaacttgcagacaatggaaaactgaaggaaatgaccacggtggaattgagatcctacctgaccgcgcatgatctcccggtttctggtaagaaagatgtacttatcagcaggatcttgactcacctgggtaagtgaagccgggtatccgaactgttagtttcctgagacccgactgacatctgtagtgctgtctcgcggatccttgtggaccgtaatcctcccccgtgcaggctacgtgccgattttttgtatagcgacaggacagcaccagttgccaatgtaacctgtgttaagtttcgtcttgtggtatcatctgcttgtcattgtcaacatgaaacataatgtaattctggatacttagacccacaatatggagcataactgcataaggtatgttaaagcataggccctctttagcatggcta

SEQ ID NO: 27959 - DNA, 896 bp, Zea Mays
ggcgtcctcaagatcttcctggagcaatgctgctggtttaggggttcttcgcgcgcgcatccggtcaggcctccaaggtcggtggccatggctcagtgtcgccatcacctcctcctcatggttattgctgctccgttcaacacagcacatgtccaaggagttggggcaggaagaatttggcatatacaacctgggcagtccaagcacaaatagcccttcattgccttcattgggttcatctaatatagtagcaatgacatcttgtggacgtgaaaatgggagtatgcatggtttgcattctggacttctcacatcaatgagcccgttcagagaggcttcatttctgggtctatcatctaccctaccacagagcctgtcctcgcccattggaattgcttctgctgcaactcatagtaagtaggctccccttggtgagctcagccactctcttagtcggatgaataggcatgtgaattatggttttcaaggcttgggtgctattcatccccattctcttcctgatgttcacaatggagcaaataatggcaccccttacaatctgaacaccatcacacctgttggtgtcaataagaactcaagaacagctgaagcagttgacaacagacatcttcataaagtgggttctggaaatctcaatgggcactcatttgatcgtgccggtgaaggagttgtaaagtggtggtgatgaacacataattcacacaggtgagatagtcaaatgatgaatatatgcaccctggaaggctgctactaattacacattccttgaaccttcctgtaaaagcttagtatgaaagatgtaagctttatttgaaggcaagaacgcatggagatttttttcctggcagagtatagacctgtgctcctctttcgtc

SEQ ID NO: 27960 - DNA, 1078 bp, Zea Mays
atgtcggggcgcgacaagggcgggaagggcctgggcaagggcggcgcgctgcgccaccggaaggtgctccgcgataacatcccggggatcacgaatctgacgatccggcggctggcgcgcaggggcggcgtgaagcgcatctccgggctcatctacgaggagacccgcggcgtcctcaagatcttcctggagcaatgctgctggtttaggggttcttcgcgcgcgcatccggtcaggcctccaaggtcggtggccatggctcagtgtcgccatcacctcctcctcatggttattgctgctccgcggcaggcgagagccatggggaagcctttgctgtcctcatagatgtcgcattgcaccactacctgcgggtccagcaagccgaccaccagttcaacacagcacatgtccaaggagttggggcaggaagaatttggcatatacaacctgggcagtccaagcacaaatagcccttcattgccttcattgggttcatctaatatagtagcaatgacatcttgtggacgtgaaaatgggagtatgcatggtttgcattctggacttctcacatcaatgagcccgttcagagaggcttcatttctgggtctatcatctaccctaccacagagcctgtcctcgcccattggaattgcttctgctgcaactcatagcttgggtgctattcatccccattctcttcctgatgttcacaatggagcaaataatggcaccccttacaatctgaacaccatcacacctgttggtgtcaataagaactcaagaacagctgaagcagttgacaacagacatcttcataaagtgggttctggaaatctcaatgggcactcatttgatcgtgccggtgaaggagttgtaaagtggtggtgatgaacacataattcacacaggtgagatagtcaaatgatgaatatatgcaccctggaaggctgctactaattacacattccttgaaccttcctgtaaaagcttagtatgaaagatgtaagctttatttgaaggcaagaacgcatggagatttttttcctggcagagtatagacctgtgctcctctttcgtc

SEQ ID NO: 27961 - DNA, 530 bp, Zea Mays
gcgcagtgctcctcttctttccttccccttcccatctccgccgccgccgccccttactcctccagagttgcgcctcctcctcctcctctccagtggcgccgtcccccgcgccccttcctcctcgcagtcacggccgcgcggcacgtgctccgcctcgccgtcgccgttgccgttgccgtcgccgccgccaagtaaagagagacagggagattgcccggaagaggcagcagagctgaatgtatgctgtgggttctctaggggcgcctgtgtgtgtggctgtgtctatggaacaacacggacgacgaatcctcccatctcacgagaacagcctgggctggtctttagcatcctttcactgctgctgttgttacaataataataataatatactgagaagcgagaatcggctagatataatataatcccgtgtattttctccttgggagccaggtcatattgcacgcttcacttccaaccgtgctgttgtaatgattaagggtctgtttggttgggctgtggctgtgaaaaaa

SEQ ID NO: 27962 - DNA, 1235 bp, Zea Mays
ctgaccccccgcacacaaaccctagtaacctccacctatatagtctcttcccactgcgtcaagcctccattcgcaccaccgccgcgccgcccaaatcacagccaccgccgccatggccgcctccagccgccctctcgtctccgtgaaagccctggagggcgacatggtcacggacgcccccggcatcgccttaccgcccgtcttcggggcaccgatccgcccggacgtggtccgcttcacccacaagctgctgtcctgcaacaagcgccagccttacgcagtctcccgccgcgctggccaccagacgtcggccgagtcctggggtacgggccgcgctgtgtcccgtatcccccgtgtccccggcggcggcacccaccgcgccggccagggagcattcggcaacatgtgccgcggcggacgcatgttcgcgcccaccaagatctggcgcaagtggcaccgccgcgtcaacgtcaacctccgccgcgtcgccgtcgcctcggcgctcgccgccaccgccgtcccggccctcgtccaggcgcgcggccaccgcatcgagaccgttcccgagatgcccctggttatctccgactcggcagagtccatcgagaagacctcccaggcgctcaagatcctgaagcaggtcggcgcctacgccgacgccgagaaggccaaggactccgtcggcatccgccccggcaagggtaagatgcgcaaccgccgctacattaaccgcaagggcccgctcgtcgtctacggcacagaaggctccaaggtcgtcaaggccttccgcaacctccccggcgtggacgtcgccaacgtcgagcgcctcaacctgctcgacctcgcccccggtggccacctcgggcgctttgtgatctggaccgagagcgcgttcaagaagctcgaggaggtgtatgggagcttcgacgcgccgtcgcagaagaagaagggctttgttctgccgaggcccaagatggccaacgctgacctgggcaggattatcaactctgacgaggtgcagtctgtggttaagccactcaacaaggaggtgaagcgcagggagaagaggaagaacccgctcaagaacatggctgctgtgctcaagctgaacccctacctcggcactgcccggaagatggccacccttgctgaggctgcccgagtcaaggcccggaaggagaagcttgattccaagaggaccaagcttacctcgaacgtgactgagattaatgttc

SEQ ID NO: 27963 - DNA, 2676 bp, Zea Mays
acccgcacctgcactgcagcacacgcgccgccgaagcgctctgcccacctcgctcccctccagtggccgccggcgcggctcagcggtccatcctcctgacgccacctgcaacggcgccaggcggtgatccattccaactcgcggtcatctcaagtgggtgcggcaaccatgcccaaggttaagaatccccacgttttcatggacatatcaatcagtggaggcagcgccgagaggatcacatttgagctactcgcaaatgtagttccaaagacagcggagaacttcagagcactctgtactggtgaaagtggacttggggcatctacacagaaaccactctattataagggaacacatattcatcgcatagttaaagggtttgttgttcagggtggtgatttttcaagaggagatggaaaaggtggagagagcatttatggtggaaaatttccagatgaaaacttcagattactgcacaatcagcctggtgttctgtccatggcaaattccggcccagacaccaatgggtcacagttttttattacattcaaggctctacctcatcttgatgggtattgcttcttgttcttcagtcacctagctttattggattctcagttctctaaccacaaccaaacactaatactgtcataaaatttattaatgacatgtggcaagtaatgatcgttgcattaagtataaagttttagaaatacacgtttacaacatgtcacatcacacccctatatatcgtactgcactttctttgatactatagtatagtatttaatgctgttagtttctagttatctgtgatgtcttgtcttatatttcctgcctattctccatggcccagcaaccttaaatgaatttcaagctataatatttgtagcaaacatgtggtctttgggaaggtggtcagtggaatagctttgcttaaaaagcttgaagcagttggtagtgaaactggaaatccttcttatcaagtgaaaattgtagactgtggtgaagtttccaacacaaattctccggatctgctaaagggagagaaagatagtggctctgattcagaatcagattcatcaatggatactagctcatccagtgatcataggcgtaagagaagaaaaggatctaagaaggataagcgcaagcccacaaagagaaagggtaaacatacaaggagtaagagaaagagtagaggatccaaaaggcgatctagacggagccatgggagttcaagtgatgattcagtaagctcaaagacagataacagcagttctgacagtgaaaagggtggccatcataccaagcgttccttgccgaaagataaagagagtaccaaaatgacaatttcagaacaaggaagaacttttcaagaagcggacaaagacgaacaaacagttactaccatcaatcgatcacaatcacatgatggaagtaaaccctcaaacaaagatggcaacagggctgatgaaagatctggaaattacaattcagaagataggaatggtccaggtggaagctccaggaacaatcccattcaggttgatgtaaatttaacgaaaccagtaaatgtagatggcaacactggtggtgataatgcagaggctggcatgtctagaactggtgaaggaaggcaccttccaagcaatgattctgtgtccaccaatggtaaagatttaggtgtgggttctgcagacaatgggcaacctcaacgaatcaggaaaggacgtggttttactcagaagtatgggtatgcacgccgatacaggacgccatctcccgagcgtccccctgttcgaccccgctacgatggagggagagatgatagatggaacaatttcaataggtatgaaagaaatggtccttacagtagacgctcgccagtaaggagataccatggctcgccaagagccaatagcccatccaggtacccaagaagagaacgaatgaggagtaggtcacgcagcccagtgaggcgccatgaccgtggagggtatcaccgccccagcccaagacgtagccgcagccctgcagaaccgagacagaatgtgaatgataggcctcgatcaggtcatggcggaggcgatcctgaccacagccctcctgccaacaggtccagatcgaagagccgggaccccttgggacccagatctcctgatgctgccccagccaagagggagagctccagatacaaccgcaggcgcagcagcagctcaaggtccagcagccctgatggaaacaaaggcctggtttcgtactgagaagtaacggcacaacagtttgcaggctccatggaccatgtttcttgctagtttagcatcatgtactcttttgtaatggattctgaacttgaactgctttcgatgcaggtgtagatttatatgttctgttagatttgaatgtttcttatgccagatatttatagaactactgagtagagcaggggaaaggctcgagcctcgtgaactggcttgagcttgctaaggcttggagaggctcgcgagtttgtaagcctgaatcgagactacttttatgactcgctcaaacgccgagccctgagcgaacttgagtcgactcgggagtctgcctaataatattgtgctacgttgttatattattatgtttttaatttattttcttattttttatggattcaatgctaaatttagt

SEQ ID NO: 27964 - DNA, 2475 bp, Zea Mays
acccgcacctgcactgcagcacacgcgccgccgaagcgctctgcccacctcgctcccctccagtggccgccggcgcggctcagcggtccatcctcctgacgccacctgcaacggcgccaggcggtgatccattccaactcgcggtcatctcaagtgggtgcggcaaccatgcccaaggttaagaatccccacgttttcatggacatatcaatcagtggaggcagcgccgagaggatcacatttgagctactcgcaaatgtagttccaaagacagcggagaacttcagagcactctgtactggtgaaagtggacttggggcatctacacagaaaccactctattataagggaacacatattcatcgcatagttaaagggtttgttgttcagggtggtgatttttcaagaggagatggaaaaggtggagagagcatttatggtggaaaatttccagatgaaaacttcagattactgcacaatcagcctggtgttctgtccatggcaaattccggcccagacaccaatgggtcacagttttttattacattcaaggctctacctcatcttgatgggtattgcttcttgttcttcagtcacctagctttattggattctcagttctctaaccacaaccaaacactaatactgtcataaaatttattaatgacatgtggcaagtaatgatcgttgcattaagtataaagttttagaaatacacgtttacaacatgtcacatcacacccctatatatcgtactgcactttctttgatactatagtatagtatttaatgctgttagtttctagttatctgtgatgtcttgtcttatatttcctgcctattctccatggcccagcaaccttaaatgaatttcaagctataatatttgtagcaaacatgtggtctttgggaaggtggtcagtggaatagctttgcttaaaaagcttgaagcagttggtagtgaaactggaaatccttcttatcaagtgaaaattgtagactgtggtgaagtttccaacacaaattctccggatctgctaaagggagagaaagtaagctcaaagacagataacagcagttctgacagtgaaaagggtggccatcataccaagcgttccttgccgaaagataaagagagtaccaaaatgacaatttcagaacaaggaagaacttttcaagaagcggacaaagacgaacaaacagttactaccatcaatcgatcacaatcacatgatggaagtaaaccctcaaacaaagatggcaacagggctgatgaaagatctggaaattacaattcagaagataggaatggtccaggtggaagctccaggaacaatcccattcaggttgatgtaaatttaacgaaaccagtaaatgtagatggcaacactggtggtgataatgcagaggctggcatgtctagaactggtgaaggaaggcaccttccaagcaatgattctgtgtccaccaatggtaaagatttaggtgtgggttctgcagacaatgggcaacctcaacgaatcaggaaaggacgtggttttactcagaagtatgggtatgcacgccgatacaggacgccatctcccgagcgtccccctgttcgaccccgctacgatggagggagagatgatagatggaacaatttcaataggtatgaaagaaatggtccttacagtagacgctcgccagtaaggagataccatggctcgccaagagccaatagcccatccaggtacccaagaagagaacgaatgaggagtaggtcacgcagcccagtgaggcgccatgaccgtggagggtatcaccgccccagcccaagacgtagccgcagccctgcagaaccgagacagaatgtgaatgataggcctcgatcaggtcatggcggaggcgatcctgaccacagccctcctgccaacaggtccagatcgaagagccgggaccccttgggacccagatctcctgatgctgccccagccaagagggagagctccagatacaaccgcaggcgcagcagcagctcaaggtccagcagccctgatggaaacaaaggcctggtttcgtactgagaagtaacggcacaacagtttgcaggctccatggaccatgtttcttgctagtttagcatcatgtactcttttgtaatggattctgaacttgaactgctttcgatgcaggtgtagatttatatgttctgttagatttgaatgtttcttatgccagatatttatagaactactgagtagagcaggggaaaggctcgagcctcgtgaactggcttgagcttgctaaggcttggagaggctcgcgagtttgtaagcctgaatcgagactacttttatgactcgctcaaacgccgagccctgagcgaacttgagtcgactcgggagtctgcctaataatattgtgctacgttgttatattattatgtttttaatttattttcttattttttatggattcaatgctaaatttagt

SEQ ID NO: 27965 - DNA, 2506 bp, Zea Mays
acccgcacctgcactgcagcacacgcgccgccgaagcgctctgcccacctcgctcccctccagtggccgccggcgcggctcagcggtccatcctcctgacgccacctgcaacggcgccaggcggtgatccattccaactcgcggtcatctcaagtgggtgcggcaaccatgcccaaggttaagaatccccacgttttcatggacatatcaatcagtggaggcagcgccgagaggatcacatttgagctactcgcaaatgtagttccaaagacagcggagaacttcagagcactctgtgaaagtggacttggggcatctacacagaaaccactctattataagggaacacatattcatcgcatagttaaagggtttgttgttcagggtggtgatttttcaagaggagatggaaaaggtggagagagcatttatggtggaaaatttccagatgaaaacttcagattactgcacaatcagcctggtgttctgtccatggcaaattccggcccagacaccaatgggtcacagttttttattacattcaaggctctacctcatcttgatggcaaacatgtggtctttgggaaggtggtcagtggaatagctttgcttaaaaagcttgaagcagttggtagtgaaactggaaatccttcttatcaagtgaaaattgtagactgtggtgaagtttccaacacaaattctccggatctgctaaagggagagaaagaaaaaaaactaagaacggcagatggtaactccactgctgaagggagagccaaattaaaaaaaacatccggtgatcataagcaaaggaagaagagaaaacactattcgtctgattcatatagctcagatacttcagactcattgtcctattcttcagatagtggctctgattcagaatcagattcatcaatggatactagctcatccagtgatcataggcgtaagagaagaaaaggatctaagaaggataagcgcaagcccacaaagagaaagggtaaacatacaaggagtaagagaaagagtagaggatccaaaaggcgatctagacggagccatgggagttcaagtgatgattcagtaagctcaaagacagataacagcagttctgacagtgaaaagggtggccatcataccaagcgttccttgccgaaagataaagagagtaccaaaatgacaatttcagaacaaggaagaacttttcaagaagcggacaaagacgaacaaacagttactaccatcaatcgatcacaatcacatgatggaagtaaaccctcaaacaaagatggcaacagggctgatgaaagatctggaaattacaattcagaagataggaatggtccaggtggaagctccaggaacaatcccattcaggttgatgtaaatttaacgaaaccagtaaatgtagatggcaacactggtggtgataatgcagaggctggcatgtctagaactggtgaaggaaggcaccttccaagcaatgattctgtgtccaccaatggtaaagatttaggtgtgggttctgcagacaatgggcaacctcaacgaatcaggaaaggacgtggttttactcagaagtatgggtatgcacgccgatacaggacgccatctcccgagcgtccccctgttcgaccccgctacgatggagggagagatgatagatggaacaatttcaataggtatgaaagaaatggtccttacagtagacgctcgccagtaaggagataccatggctcgccaagagccaatagcccatccaggtacccaagaagagaacgaatgaggagtaggtcacgcagcccagtgaggcgccatgaccgtggagggtatcaccgccccagcccaagacgtagccgcagccctgcagaaccgagacagaatgtgaatgataggcctcgatcaggtcatggcggaggcgatcctgaccacagccctcctgccaacaggtccagatcgaagagccgggaccccttgggacccagatctcctgatgctgccccagccaagagggagagctccagatacaaccgcaggcgcagcagcagctcaaggtccagcagccctgatggaaacaaaggcctggtttcgtactgagaagtaacggcacaacagtttgcaggctccatggaccatgtttcttgctagtttagcatcatgtactcttttgtaatggattctgaacttgaactgctttcgatgcaggtgtagatttatatgttctgttagatttgaatgtttcttatgccagatatttatagaactactgagtagagcaggggaaaggctcgagcctcgtgaactggcttgagcttgctaaggcttggagaggctcgcgagtttgtaagcctgaatcgagactacttttatgactcgctcaaacgccgagccctgagcgaacttgagtcgactcgggagtctgcctaataatattgtgctacgttgttatattattatgtttttaatttattttcttattttttatggattcaatgctaaatttagt

SEQ ID NO: 27966 - DNA, 2826 bp, Zea Mays
acccgcacctgcactgcagcacacgcgccgccgaagcgctctgcccacctcgctcccctccagtggccgccggcgcggctcagcggtccatcctcctgacgccacctgcaacggcgccaggcggtgatccattccaactcgcggtcatctcaagtgggtgcggcaaccatgcccaaggttaagaatccccacgttttcatggacatatcaatcagtggaggcagcgccgagaggatcacatttgagctactcgcaaatgtagttccaaagacagcggagaacttcagagcactctgtgaaagtggacttggggcatctacacagaaaccactctattataagggaacacatattcatcgcatagttaaagggtttgttgttcagggtggtgatttttcaagaggagatggaaaaggtggagagagcatttatggtggaaaatttccagatgaaaacttcagattactgcacaatcagcctggtgttctgtccatggcaaattccggcccagacaccaatgggtcacagttttttattacattcaaggctctacctcatcttgatgggtattgcttcttgttcttcagtcacctagctttattggattctcagttctctaaccacaaccaaacactaatactgtcataaaatttattaatgacatgtggcaagtaatgatcgttgcattaagtataaagttttagaaatacacgtttacaacatgtcacatcacacccctatatatcgtactgcactttctttgatactatagtatagtatttaatgctgttagtttctagttatctgtgatgtcttgtcttatatttcctgcctattctccatggcccagcaaccttaaatgaatttcaagctataatatttgtagcaaacatgtggtctttgggaaggtggtcagtggaatagctttgcttaaaaagcttgaagcagttggtagtgaaactggaaatccttcttatcaagtgaaaattgtagactgtggtgaagtttccaacacaaattctccggatctgctaaagggagagaaagaaaaaaaactaagaacggcagatggtaactccactgctgaagggagagccaaattaaaaaaaacatccggtgatcataagcaaaggaagaagagaaaacactattcgtctgattcatatagctcagatacttcagactcattgtcctattcttcagatagtggctctgattcagaatcagattcatcaatggatactagctcatccagtgatcataggcgtaagagaagaaaaggatctaagaaggataagcgcaagcccacaaagagaaagggtaaacatacaaggagtaagagaaagagtagaggatccaaaaggcgatctagacggagccatgggagttcaagtgatgattcagtaagctcaaagacagataacagcagttctgacagtgaaaagggtggccatcataccaagcgttccttgccgaaagataaagagagtaccaaaatgacaatttcagaacaaggaagaacttttcaagaagcggacaaagacgaacaaacagttactaccatcaatcgatcacaatcacatgatggaagtaaaccctcaaacaaagatggcaacagggctgatgaaagatctggaaattacaattcagaagataggaatggtccaggtggaagctccaggaacaatcccattcaggttgatgtaaatttaacgaaaccagtaaatgtagatggcaacactggtggtgataatgcagaggctggcatgtctagaactggtgaaggaaggcaccttccaagcaatgattctgtgtccaccaatggtaaagatttaggtgtgggttctgcagacaatgggcaacctcaacgaatcaggaaaggacgtggttttactcagaagtatgggtatgcacgccgatacaggacgccatctcccgagcgtccccctgttcgaccccgctacgatggagggagagatgatagatggaacaatttcaataggtatgaaagaaatggtccttacagtagacgctcgccagtaaggagataccatggctcgccaagagccaatagcccatccaggtacccaagaagagaacgaatgaggagtaggtcacgcagcccagtgaggcgccatgaccgtggagggtatcaccgccccagcccaagacgtagccgcagccctgcagaaccgagacagaatgtgaatgataggcctcgatcaggtcatggcggaggcgatcctgaccacagccctcctgccaacaggtccagatcgaagagccgggaccccttgggacccagatctcctgatgctgccccagccaagagggagagctccagatacaaccgcaggcgcagcagcagctcaaggtccagcagccctgatggaaacaaaggcctggtttcgtactgagaagtaacggcacaacagtttgcaggctccatggaccatgtttcttgctagtttagcatcatgtactcttttgtaatggattctgaacttgaactgctttcgatgcaggtgtagatttatatgttctgttagatttgaatgtttcttatgccagatatttatagaactactgagtagagcaggggaaaggctcgagcctcgtgaactggcttgagcttgctaaggcttggagaggctcgcgagtttgtaagcctgaatcgagactacttttatgactcgctcaaacgccgagccctgagcgaacttgagtcgactcgggagtctgcctaataatattgtgctacgttgttatattattatgtttttaatttattttcttattttttatggattcaatgctaaatttagt

SEQ ID NO: 27967 - DNA, 2356 bp, Zea Mays
acccgcacctgcactgcagcacacgcgccgccgaagcgctctgcccacctcgctcccctccagtggccgccggcgcggctcagcggtccatcctcctgacgccacctgcaacggcgccaggcggtgatccattccaactcgcggtcatctcaagtgggtgcggcaaccatgcccaaggttaagaatccccacgttttcatggacatatcaatcagtggaggcagcgccgagaggatcacatttgagctactcgcaaatgtagttccaaagacagcggagaacttcagagcactctgtactggtgaaagtggacttggggcatctacacagaaaccactctattataagggaacacatattcatcgcatagttaaagggtttgttgttcagggtggtgatttttcaagaggagatggaaaaggtggagagagcatttatggtggaaaatttccagatgaaaacttcagattactgcacaatcagcctggtgttctgtccatggcaaattccggcccagacaccaatgggtcacagttttttattacattcaaggctctacctcatcttgatggcaaacatgtggtctttgggaaggtggtcagtggaatagctttgcttaaaaagcttgaagcagttggtagtgaaactggaaatccttcttatcaagtgaaaattgtagactgtggtgaagtttccaacacaaattctccggatctgctaaagggagagaaagatagtggctctgattcagaatcagattcatcaatggatactagctcatccagtgatcataggcgtaagagaagaaaaggatctaagaaggataagcgcaagcccacaaagagaaagggtaaacatacaaggagtaagagaaagagtagaggatccaaaaggcgatctagacggagccatgggagttcaagtgatgattcagtaagctcaaagacagataacagcagttctgacagtgaaaagggtggccatcataccaagcgttccttgccgaaagataaagagagtaccaaaatgacaatttcagaacaaggaagaacttttcaagaagcggacaaagacgaacaaacagttactaccatcaatcgatcacaatcacatgatggaagtaaaccctcaaacaaagatggcaacagggctgatgaaagatctggaaattacaattcagaagataggaatggtccaggtggaagctccaggaacaatcccattcaggttgatgtaaatttaacgaaaccagtaaatgtagatggcaacactggtggtgataatgcagaggctggcatgtctagaactggtgaaggaaggcaccttccaagcaatgattctgtgtccaccaatggtaaagatttaggtgtgggttctgcagacaatgggcaacctcaacgaatcaggaaaggacgtggttttactcagaagtatgggtatgcacgccgatacaggacgccatctcccgagcgtccccctgttcgaccccgctacgatggagggagagatgatagatggaacaatttcaataggtatgaaagaaatggtccttacagtagacgctcgccagtaaggagataccatggctcgccaagagccaatagcccatccaggtacccaagaagagaacgaatgaggagtaggtcacgcagcccagtgaggcgccatgaccgtggagggtatcaccgccccagcccaagacgtagccgcagccctgcagaaccgagacagaatgtgaatgataggcctcgatcaggtcatggcggaggcgatcctgaccacagccctcctgccaacaggtccagatcgaagagccgggaccccttgggacccagatctcctgatgctgccccagccaagagggagagctccagatacaaccgcaggcgcagcagcagctcaaggtccagcagccctgatggaaacaaaggcctggtttcgtactgagaagtaacggcacaacagtttgcaggctccatggaccatgtttcttgctagtttagcatcatgtactcttttgtaatggattctgaacttgaactgctttcgatgcaggtgtagatttatatgttctgttagatttgaatgtttcttatgccagatatttatagaactactgagtagagcaggggaaaggctcgagcctcgtgaactggcttgagcttgctaaggcttggagaggctcgcgagtttgtaagcctgaatcgagactacttttatgactcgctcaaacgccgagccctgagcgaacttgagtcgactcgggagtctgcctaataatattgtgctacgttgttatattattatgtttttaatttattttcttattttttatggattcaatgctaaatttagt

SEQ ID NO: 27968 - DNA, 2586 bp, Zea Mays
aacagaacgacggtggaaccctggtctcctccctcttcacccgcacctgcactgcagcacacgcgccgccgaagcgctctgcccacctcgctcccctccagtggccgccggcgcggctcagcggtccatcctcctgacgccacctgcaacggcgccaggcggtgatccattccaactcgcggtcatctcaagtgggtgcggcaaccatgcccaaggttaagaatccccacgttttcatggacatatcaatcagtggaggcagcgccgagaggatcacatttgagctactcgcaaatgtagttccaaagacagcggagaacttcagagcactctgtactggtgaaagtggacttggggcatctacacagaaaccactctattataagggaacacatattcatcgcatagttaaagggtttgttgttcagggtggtgatttttcaagaggagatggaaaaggtggagagagcatttatggtggaaaatttccagatgaaaacttcagattactgcacaatcagcctggtgttctgtccatggcaaattccggcccagacaccaatgggtcacagttttttattacattcaaggctctacctcatcttgatggcaaccttaaatgaatttcaagctataatatttgtagcaaacatgtggtctttgggaaggtggtcagtggaatagctttgcttaaaaagcttgaagcagttggtagtgaaactggaaatccttcttatcaagtgaaaattgtagactgtggtgaagtttccaacacaaattctccggatctgctaaagggagagaaagaaaaaaaactaagaacggcagatggtaactccactgctgaagggagagccaaattaaaaaaaacatccggtgatcataagcaaaggaagaagagaaaacactattcgtctgattcatatagctcagatacttcagactcattgtcctattcttcagatagtggctctgattcagaatcagattcatcaatggatactagctcatccagtgatcataggcgtaagagaagaaaaggatctaagaaggataagcgcaagcccacaaagagaaagggtaaacatacaaggagtaagagaaagagtagaggatccaaaaggcgatctagacggagccatgggagttcaagtgatgattcagtaagctcaaagacagataacagcagttctgacagtgaaaagggtggccatcataccaagcgttccttgccgaaagataaagagagtaccaaaatgacaatttcagaacaaggaagaacttttcaagaagcggacaaagacgaacaaacagttactaccatcaatcgatcacaatcacatgatggaagtaaaccctcaaacaaagatggcaacagggctgatgaaagatctggaaattacaattcagaagataggaatggtccaggtggaagctccaggaacaatcccattcaggttgatgtaaatttaacgaaaccagtaaatgtagatggcaacactggtggtgataatgcagaggctggcatgtctagaactggtgaaggaaggcaccttccaagcaatgattctgtgtccaccaatggtaaagatttaggtgtgggttctgcagacaatgggcaacctcaacgaatcaggaaaggacgtggttttactcagaagtatgggtatgcacgccgatacaggacgccatctcccgagcgtccccctgttcgaccccgctacgatggagggagagatgatagatggaacaatttcaataggtatgaaagaaatggtccttacagtagacgctcgccagtaaggagataccatggctcgccaagagccaatagcccatccaggtacccaagaagagaacgaatgaggagtaggtcacgcagcccagtgaggcgccatgaccgtggagggtatcaccgccccagcccaagacgtagccgcagccctgcagaaccgagacagaatgtgaatgataggcctcgatcaggtcatggcggaggcgatcctgaccacagccctcctgccaacaggtccagatcgaagagccgggaccccttgggacccagatctcctgatgctgccccagccaagagggagagctccagatacaaccgcaggcgcagcagcagctcaaggtccagcagccctgatggaaacaaaggcctggtttcgtactgagaagtaacggcacaacagtttgcaggctccatggaccatgtttcttgctagtttagcatcatgtactcttttgtaatggattctgaacttgaactgctttcgatgcaggtgtagatttatatgttctgttagatttgaatgtttcttatgccagatatttatagaactactgagtagagcaggggaaaggctcgagcctcgtgaactggcttgagcttgctaaggcttggagaggctcgcgagtttgtaagcctgaatcgagactacttttatgactcgctcaaacgccgagccctgagcgaacttgagtcgactcgggagtctgcctaataatattgtgctacgttgttatattattatgtttttaatttattttcttattttttatggattcaatgctaaatttagt

SEQ ID NO: 27969 - DNA, 1980 bp, Zea Mays
aacagaacgacggtggaaccctggtctcctccctcttcacccgcacctgcactgcagcacacgcgccgccgaagcgctctgcccacctcgctcccctccagtggccgccggcgcggctcagcggtccatcctcctgacgccacctgcaacggcgccaggcggtgatccattccaactcgcgctccgtcctggtatccaaacatgtggtctttgggaaggtggtcagtggaatagctttgcttaaaaagcttgaagcagttggtagtgaaactggaaatccttcttatcaagtgaaaattgtagactgtggtgaagtttccaacacaaattctccggatctgctaaagggagagaaagatagtggctctgattcagaatcagattcatcaatggatactagctcatccagtgatcataggcgtaagagaagaaaaggatctaagaaggataagcgcaagcccacaaagagaaagggtaaacatacaaggagtaagagaaagagtagaggatccaaaaggcgatctagacggagccatgggagttcaagtgatgattcagtaagctcaaagacagataacagcagttctgacagtgaaaagggtggccatcataccaagcgttccttgccgaaagataaagagagtaccaaaatgacaatttcagaacaaggaagaacttttcaagaagcggacaaagacgaacaaacagttactaccatcaatcgatcacaatcacatgatggaagtaaaccctcaaacaaagatggcaacagggctgatgaaagatctggaaattacaattcagaagataggaatggtccaggtggaagctccaggaacaatcccattcaggttgatgtaaatttaacgaaaccagtaaatgtagatggcaacactggtggtgataatgcagaggctggcatgtctagaactggtgaaggaaggcaccttccaagcaatgattctgtgtccaccaatggtaaagatttaggtgtgggttctgcagacaatgggcaacctcaacgaatcaggaaaggacgtggttttactcagaagtatgggtatgcacgccgatacaggacgccatctcccgagcgtccccctgttcgaccccgctacgatggagggagagatgatagatggaacaatttcaataggtatgaaagaaatggtccttacagtagacgctcgccagtaaggagataccatggctcgccaagagccaatagcccatccaggtacccaagaagagaacgaatgaggagtaggtcacgcagcccagtgaggcgccatgaccgtggagggtatcaccgccccagcccaagacgtagccgcagccctgcagaaccgagacagaatgtgaatgataggcctcgatcaggtcatggcggaggcgatcctgaccacagccctcctgccaacaggtccagatcgaagagccgggaccccttgggacccagatctcctgatgctgccccagccaagagggagagctccagatacaaccgcaggcgcagcagcagctcaaggtccagcagccctgatggaaacaaaggcctggtttcgtactgagaagtaacggcacaacagtttgcaggctccatggaccatgtttcttgctagtttagcatcatgtactcttttgtaatggattctgaacttgaactgctttcgatgcaggtgtagatttatatgttctgttagatttgaatgtttcttatgccagatatttatagaactactgagtagagcaggggaaaggctcgagcctcgtgaactggcttgagcttgctaaggcttggagaggctcgcgagtttgtaagcctgaatcgagactacttttatgactcgctcaaacgccgagccctgagcgaacttgagtcgactcgggagtctgcctaataatattgtgctacgttgttatattattatgtttttaatttattttcttattttttatggattcaatgctaaatttagt

SEQ ID NO: 27970 - DNA, 2139 bp, Zea Mays
cccaacagaacgacggtggaaccctggtctcctccctcttcacccgcacctgcactgcagcacacgcgccgccgaagcgctctgcccacctcgctcccctccagtggccgccggcgcggctcagcggtccatcctcctgacgccacctgcaacggcgccaggcggtgatccattccaactcgcgctccgtcctggtatccaaacatgtggtctttgggaaggtggtcagtggaatagctttgcttaaaaagcttgaagcagttggtagtgaaactggaaatccttcttatcaagtgaaaattgtagactgtggtgaagtttccaacacaaattctccggatctgctaaagggagagaaagaaaaaaaactaagaacggcagatggtaactccactgctgaagggagagccaaattaaaaaaaacatccggtgatcataagcaaaggaagaagagaaaacactattcgtctgattcatatagctcagatacttcagactcattgtcctattcttcagatagtggctctgattcagaatcagattcatcaatggatactagctcatccagtgatcataggcgtaagagaagaaaaggatctaagaaggataagcgcaagcccacaaagagaaagggtaaacatacaaggagtaagagaaagagtagaggatccaaaaggcgatctagacggagccatgggagttcaagtgatgattcagtaagctcaaagacagataacagcagttctgacagtgaaaagggtggccatcataccaagcgttccttgccgaaagataaagagagtaccaaaatgacaatttcagaacaaggaagaacttttcaagaagcggacaaagacgaacaaacagttactaccatcaatcgatcacaatcacatgatggaagtaaaccctcaaacaaagatggcaacagggctgatgaaagatctggaaattacaattcagaagataggaatggtccaggtggaagctccaggaacaatcccattcaggttgatgtaaatttaacgaaaccagtaaatgtagatggcaacactggtggtgataatgcagaggctggcatgtctagaactggtgaaggaaggcaccttccaagcaatgattctgtgtccaccaatggtaaagatttaggtgtgggttctgcagacaatgggcaacctcaacgaatcaggaaaggacgtggttttactcagaagtatgggtatgcacgccgatacaggacgccatctcccgagcgtccccctgttcgaccccgctacgatggagggagagatgatagatggaacaatttcaataggtatgaaagaaatggtccttacagtagacgctcgccagtaaggagataccatggctcgccaagagccaatagcccatccaggtacccaagaagagaacgaatgaggagtaggtcacgcagcccagtgaggcgccatgaccgtggagggtatcaccgccccagcccaagacgtagccgcagccctgcagaaccgagacagaatgtgaatgataggcctcgatcaggtcatggcggaggcgatcctgaccacagccctcctgccaacaggtccagatcgaagagccgggaccccttgggacccagatctcctgatgctgccccagccaagagggagagctccagatacaaccgcaggcgcagcagcagctcaaggtccagcagccctgatggaaacaaaggcctggtttcgtactgagaagtaacggcacaacagtttgcaggctccatggaccatgtttcttgctagtttagcatcatgtactcttttgtaatggattctgaacttgaactgctttcgatgcaggtgtagatttatatgttctgttagatttgaatgtttcttatgccagatatttatagaactactgagtagagcaggggaaaggctcgagcctcgtgaactggcttgagcttgctaaggcttggagaggctcgcgagtttgtaagcctgaatcgagactacttttatgactcgctcaaacgccgagccctgagcgaacttgagtcgactcgggagtctgcctaataatattgtgctacgttgttatattattatgtttttaatttattttcttattttttatggattcaatgctaaatttagt

SEQ ID NO: 27971 - DNA, 2887 bp, Zea Mays
ctgggcatgatcgtcccaacagaacgacggtggaaccctggtctcctccctcttcacccgcacctgcactgcagcacacgcgccgccgaagcgctctgcccacctcgctcccctccagtggccgccggcgcggctcagcggtccatcctcctgacgccacctgcaacggcgccaggcggtgatccattccaactcgcggtcatctcaagtgggtgcggcaaccatgcccaaggttaagaatccccacgttttcatggacatatcaatcagtggaggcagcgccgagaggatcacatttgagctactcgcaaatgtagttccaaagacagcggagaacttcagagcactctgtactggtgaaagtggacttggggcatctacacagaaaccactctattataagggaacacatattcatcgcatagttaaagggtttgttgttcagggtggtgatttttcaagaggagatggaaaaggtggagagagcatttatggtggaaaatttccagatgaaaacttcagattactgcacaatcagcctggtgttctgtccatggcaaattccggcccagacaccaatgggtcacagttttttattacattcaaggctctacctcatcttgatgggtattgcttcttgttcttcagtcacctagctttattggattctcagttctctaaccacaaccaaacactaatactgtcataaaatttattaatgacatgtggcaagtaatgatcgttgcattaagtataaagttttagaaatacacgtttacaacatgtcacatcacacccctatatatcgtactgcactttctttgatactatagtatagtatttaatgctgttagtttctagttatctgtgatgtcttgtcttatatttcctgcctattctccatggcccagcaaccttaaatgaatttcaagctataatatttgtagcaaacatgtggtctttgggaaggtggtcagtggaatagctttgcttaaaaagcttgaagcagttggtagtgaaactggaaatccttcttatcaagtgaaaattgtagactgtggtgaagtttccaacacaaattctccggatctgctaaagggagagaaagaaaaaaaactaagaacggcagatggtaactccactgctgaagggagagccaaattaaaaaaaacatccggtgatcataagcaaaggaagaagagaaaacactattcgtctgattcatatagctcagatacttcagactcattgtcctattcttcagatagtggctctgattcagaatcagattcatcaatggatactagctcatccagtgatcataggcgtaagagaagaaaaggatctaagaaggataagcgcaagcccacaaagagaaagggtaaacatacaaggagtaagagaaagagtagaggatccaaaaggcgatctagacggagccatgggagttcaagtgatgattcagtaagctcaaagacagataacagcagttctgacagtgaaaagggtggccatcataccaagcgttccttgccgaaagataaagagagtaccaaaatgacaatttcagaacaaggaagaacttttcaagaagcggacaaagacgaacaaacagttactaccatcaatcgatcacaatcacatgatggaagtaaaccctcaaacaaagatggcaacagggctgatgaaagatctggaaattacaattcagaagataggaatggtccaggtggaagctccaggaacaatcccattcaggttgatgtaaatttaacgaaaccagtaaatgtagatggcaacactggtggtgataatgcagaggctggcatgtctagaactggtgaaggaaggcaccttccaagcaatgattctgtgtccaccaatggtaaagatttaggtgtgggttctgcagacaatgggcaacctcaacgaatcaggaaaggacgtggttttactcagaagtatgggtatgcacgccgatacaggacgccatctcccgagcgtccccctgttcgaccccgctacgatggagggagagatgatagatggaacaatttcaataggtatgaaagaaatggtccttacagtagacgctcgccagtaaggagataccatggctcgccaagagccaatagcccatccaggtacccaagaagagaacgaatgaggagtaggtcacgcagcccagtgaggcgccatgaccgtggagggtatcaccgccccagcccaagacgtagccgcagccctgcagaaccgagacagaatgtgaatgataggcctcgatcaggtcatggcggaggcgatcctgaccacagccctcctgccaacaggtccagatcgaagagccgggaccccttgggacccagatctcctgatgctgccccagccaagagggagagctccagatacaaccgcaggcgcagcagcagctcaaggtccagcagccctgatggaaacaaaggcctggtttcgtactgagaagtaacggcacaacagtttgcaggctccatggaccatgtttcttgctagtttagcatcatgtactcttttgtaatggattctgaacttgaactgctttcgatgcaggtgtagatttatatgttctgttagatttgaatgtttcttatgccagatatttatagaactactgagtagagcaggggaaaggctcgagcctcgtgaactggcttgagcttgctaaggcttggagaggctcgcgagtttgtaagcctgaatcgagactacttttatgactcgctcaaacgccgagccctgagcgaacttgagtcgactcgggagtctgcctaataatattgtgctacgttgttatattattatgtttttaatttattttcttattttttatggattcaatgctaaatttagt

SEQ ID NO: 27972 - DNA, 1808 bp, Zea Mays
ggctacggcccactgggcatgatcgtcccaacagaacgacggtggaaccctggtctcctccctcttcacccgcacctgcactgcagcacacgcgccgccgaagcgctctgcccacctcgctcccctccagtggccgccggcgcggctcagcggtccatcctcctgacgccacctgcaacggcgccaggcggtgatccattccaactcgcgctccgtcctggtatccaaacatgtggtctttgggaaggtggtcagtggaatagctttgcttaaaaagcttgaagcagttggtagtgaaactggaaatccttcttatcaagtgaaaattgtagactgtggtgaagtttccaacacaaattctccggatctgctaaagggagagaaagtaagctcaaagacagataacagcagttctgacagtgaaaagggtggccatcataccaagcgttccttgccgaaagataaagagagtaccaaaatgacaatttcagaacaaggaagaacttttcaagaagcggacaaagacgaacaaacagttactaccatcaatcgatcacaatcacatgatggaagtaaaccctcaaacaaagatggcaacagggctgatgaaagatctggaaattacaattcagaagataggaatggtccaggtggaagctccaggaacaatcccattcaggttgatgtaaatttaacgaaaccagtaaatgtagatggcaacactggtggtgataatgcagaggctggcatgtctagaactggtgaaggaaggcaccttccaagcaatgattctgtgtccaccaatggtaaagatttaggtgtgggttctgcagacaatgggcaacctcaacgaatcaggaaaggacgtggttttactcagaagtatgggtatgcacgccgatacaggacgccatctcccgagcgtccccctgttcgaccccgctacgatggagggagagatgatagatggaacaatttcaataggtatgaaagaaatggtccttacagtagacgctcgccagtaaggagataccatggctcgccaagagccaatagcccatccaggtacccaagaagagaacgaatgaggagtaggtcacgcagcccagtgaggcgccatgaccgtggagggtatcaccgccccagcccaagacgtagccgcagccctgcagaaccgagacagaatgtgaatgataggcctcgatcaggtcatggcggaggcgatcctgaccacagccctcctgccaacaggtccagatcgaagagccgggaccccttgggacccagatctcctgatgctgccccagccaagagggagagctccagatacaaccgcaggcgcagcagcagctcaaggtccagcagccctgatggaaacaaaggcctggtttcgtactgagaagtaacggcacaacagtttgcaggctccatggaccatgtttcttgctagtttagcatcatgtactcttttgtaatggattctgaacttgaactgctttcgatgcaggtgtagatttatatgttctgttagatttgaatgtttcttatgccagatatttatagaactactgagtagagcaggggaaaggctcgagcctcgtgaactggcttgagcttgctaaggcttggagaggctcgcgagtttgtaagcctgaatcgagactacttttatgactcgctcaaacgccgagccctgagcgaacttgagtcgactcgggagtctgcctaataatattgtgctacgttgttatattattatgtttttaatttattttcttattttttatggattcaatgctaaatttagt

SEQ ID NO: 27973 - DNA, 695 bp, Zea Mays
acccgcacctgcactgcagcacacgcgccgccgaagcgctctgcccacctcgctcccctccagtggccgccggcgcggctcagcggtccatcctcctgacgccacctgcaacggcgccaggcggtgatccattccaactcgcgctccgtcctggtatccaaacatgtggtctttgggaaggtggtcagtggaatagctttgcttaaaaagcttgaagcagttggtagtgaaactggaaatccttcttatcaagtgaaaattgtagactgtggtgaagtttccaacacaaattctccggatctgctaaagggagagaaagatagtggctctgattcagaatcagattcatcaatggatactagctcatccagtgatcataggcgtaagagaagaaaaggatctaagaaggataagcgcaagcccacaaagagaaagggtaaacatacaaggagtaagagaaagagtagaggatccaaaaggcgatctagacggagccatgggagttcaagtgatgattcagtaagctcaaagacagataacagcagttctgacagtgaaaagggtggccatcataccaagcgttccttgccgaaaggtcagtttgagcgcatatatttctggcctgtgagcttgccatgcctagctaaagaaggaatgttgtgttggattttttctgctgctatttggtttattac

SEQ ID NO: 27974 - DNA, 866 bp, Zea Mays
gtctcctccctcttcacccgcacctgcactgcagcacacgcgccgccgaagcgctctgcccacctcgctcccctccagtggccgccggcgcggctcagcggtccatcctcctgacgccacctgcaacggcgccaggcggtgatccattccaactcgcgctccgtcctggtatccaaacatgtggtctttgggaaggtggtcagtggaatagctttgcttaaaaagcttgaagcagttggtagtgaaactggaaatccttcttatcaagtgaaaattgtagactgtggtgaagtttccaacacaaattctccggatctgctaaagggagagaaagaaaaaaaactaagaacggcagatggtaactccactgctgaagggagagccaaattaaaaaaaacatccggtgatcataagcaaaggaagaagagaaaacactattcgtctgattcatatagctcagatacttcagactcattgtcctattcttcagatagtggctctgattcagaatcagattcatcaatggatactagctcatccagtgatcataggcgtaagagaagaaaaggatctaagaaggataagcgcaagcccacaaagagaaagggtaaacatacaaggagtaagagaaagagtagaggatccaaaaggcgatctagacggagccatgggagttcaagtgatgattcagtaagctcaaagacagataacagcagttctgacagtgaaaagggtggccatcataccaagcgttccttgccgaaaggtcagtttgagcgcatatatttctggcctgtgagcttgccatgcctagctaaagaaggaatgttgtgttggattttttctgctgctatttggtttattac

SEQ ID NO: 27975 - DNA, 1635 bp, Zea Mays
catgatcgtcccaacagaacgacggtggaaccctggtctcctccctcttcacccgcacctgcactgcagcacacgcgccgccgaagcgctctgcccacctcgctcccctccagtggccgccggcgcggctcagcggtccatcctcctgacgccacctgcaacggcgccaggcggtgatccattccaactcgcggtcatctcaagtgggtgcggcaaccatgcccaaggttaagaatccccacgttttcatggacatatcaatcagtggaggcagcgccgagaggatcacatttgagctactcgcaaatgtagttccaaagacagcggagaacttcagagcactctgtactggtgaaagtggacttggggcatctacacagaaaccactctattataagggaacacatattcatcgcatagttaaagggtttgttgttcagggtggtgatttttcaagaggagatggaaaaggtggagagagcatttatggtggaaaatttccagatgaaaacttcagattactgcacaatcagcctggtgttctgtccatggcaaattccggcccagacaccaatgggtcacagttttttattacattcaaggctctacctcatcttgatgggtattgcttcttgttcttcagtcacctagctttattggattctcagttctctaaccacaaccaaacactaatactgtcataaaatttattaatgacatgtggcaagtaatgatcgttgcattaagtataaagttttagaaatacacgtttacaacatgtcacatcacacccctatatatcgtactgcactttctttgatactatagtatagtatttaatgctgttagtttctagttatctgtgatgtcttgtcttatatttcctgcctattctccatggcccagcaaccttaaatgaatttcaagctataatatttgtagcaaacatgtggtctttgggaaggtggtcagtggaatagctttgcttaaaaagcttgaagcagttggtagtgaaactggaaatccttcttatcaagtgaaaattgtagactgtggtgaagtttccaacacaaattctccggatctgctaaagggagagaaagaaaaaaaactaagaacggcagatggtaactccactgctgaagggagagccaaattaaaaaaaacatccggtgatcataagcaaaggaagaagagaaaacactattcgtctgattcatatagctcagatacttcagactcattgtcctattcttcagatagtggctctgattcagaatcagattcatcaatggatactagctcatccagtgatcataggcgtaagagaagaaaaggatctaagaaggataagcgcaagcccacaaagagaaagggtaaacatacaaggagtaagagaaagagtagaggatccaaaaggcgatctagacggagccatgggagttcaagtgatgattcagtaagctcaaagacagataacagcagttctgacagtgaaaagggtggccatcataccaagcgttccttgccgaaaggtcagtttgagcgcatatatttctggcctgtgagcttgccatgcctagctaaagaaggaatgttgtgttggattttttctgctgctatttggtttattac

SEQ ID NO: 27976 - DNA, 2502 bp, Zea Mays
agaactataccttcttcttcgtctctaacctctgcttcctctgttcctatgaatctcttgctatcttcctgaatccccagttcctgcttcctacctccaattcctgtctcggatctatctccactacctgctgctaacaattggtatcagattcgttcgatcctcgacttcaatttgcccacgccatgtcgctcgatttcaagctcatcctcgacgagctcaaccggcgattcgacgagctggaggttcgctgggaccggcgcttctcgccttctgcgtacctcgaccttccgcccacactgctcagcgtccaccaatcctccgacacatccgccagcatgccgcccaccccgactgcggccgttgggaccgtcgtcatcgccgacaactggggcgggtgcttcgatgacgacaaggagtactacgcagcgccatctgtcgttgccgacaactggggcgggctcttcgagggctgtgatgctgacggcgatatctcttcgaacctgcgcgactccgaccccgacgaggcgttcgtcacctcccactcggacaaggcgttgttcgacaaccaccacgccggtgagctcatcgccaccggcatcgaatatggctcatacaactccgtccatggtagcggcggcgctgcgctgtctcaactcgcgcacagcaacaccaacttcgccatgcccaccacctgttcgacttgggggctcaccgagcatgctatggccgaggccgtgcactgtcgcgcgctatggctgccccgacgcgagccacttccgcgcctacttcgtgcgttcctaacgctcgagcggctcgacctctccgcatgcgcctcgctcgacgacgcctccctcgctgcgtccgtcggcgatggaccagcagccgcgacaaccttgtggtggtgcgcttcggccacgggcgacatggagagcacgctcaaggggattcgcggcagcgacgcgccgttcgtgatggacctaaacgacgcagccaccgtggcgggcggcatcgaggacacttacggcgaggaccgcgccatcgaggagcagctcgccacgcccttggacacgctcctgtgcgcccgcctcgaccctgtcaagtcgcacatcgggtgcctgctgctgcagtacctcaagctttcgcctaccttgattggtgccaaggtagtattcgaggaaatgcagcaaagcaccatcctcagggacgcgcacaccgctatctgcaccacgcctgacccggcaatcgacacacacttcgccaacaagtggcggatgcgctgctcccgcaacagcaccagtacggcggcagcggtgttggagctcgatcccggcagttgcaccacctgcgacaccagttactaccgccacgttgtgcagcggcacggactgctgcgtttcgacgcatcactcactagggcctacgtgatgcaggtcgcctttggcaggttcgacggacacttcttccacgacttcaccatcatcaagctgaagacggacagcagcagctcgcccctcgagtgttcgaccaaatgtctcagccacgatattggacatgattcacgaaattatgcacacaaattacagaatgcagtcactcatggaatcactgctgctggacatgatatcctacaggtgggattggcttcaacacctgcaatgttcaacattatacttatagaagatgagagaagtcatttacctattgacgccatttgctctcctgatgaattgataaagacatcacgtctttgtgctttagaaatggttcattgccgtaaaccttggatgagatctcttggcaacacagataggcttggactattctctgaagctcgtgctgtgttaaatgcagcaagacagcaagcaatgaagattgcactaaacatgccacagcaccagaccttcttcttcgtctctaacctctgcttcctctgttcctatgaatctcttgctatcttcctgaatccctagttcctgcttcctacctccaattcctgtctcggatctatctccactacctgctgctaacagagtggcttctgtctgtggccgacgccgacggcggcggccacgttgaggtgagcagagctgcctaggctatatctagcatgcatttggatggagcgagatcagtggtgtgcccaacgtacccacgacgttcttgatttctgcagacacacgcagcagactttgtggttctttgcgtggggaggttcagtggtgtgcccaacgtacccacgacgttcccagagggcgaaggtccagaggtgtttgacgggcaggtgatgcactccatggactacgccaagatgggctcgagcaaggccaaggagacgataaggggcaagcgtgtcaccgtcgttggctacctgaagtcggcgctcgacatcgccgccgaatgcgcgcaagtgaatggcaccgctcacccttgcacaatggtggtccggaccaagcactgggtcttgccggactacttcgcctggggcttccacatctcaag

SEQ ID NO: 27977 - DNA, 3337 bp, Zea Mays
agaactataccttcttcttcgtctctaacctctgcttcctctgttcctatgaatctcttgctatcttcctgaatccccagttcctgcttcctacctccaattcctgtctcggatctatctccactacctgctgctaacaattggtatcagattcgttcgatcctcgacttcaatttgcccacgccatgtcgctcgatttcaagctcatcctcgacgagctcaaccggcgattcgacgagctggaggttcgctgggaccggcgcttctcgccttctgcgtacctcgaccttccgcccacactgctcagcgtccaccaatcctccgacacatccgccagcatgccgcccaccccgactgcggccgttgggaccgtcgtcatcgccgacaactggggcgggtgcttcgatgacgacaaggagtactacgcagcgccatctgtcgttgccgacaactggggcgggctcttcgagggctgtgatgctgacggcgatatctcttcgaacctgcgcgactccgaccccgacgaggcgttcgtcacctcccactcggacaaggcgttgttcgacaaccaccacgccggtgagctcatcgccaccggcatcgaatatggctcatacaactccgtccatggtagcggcggcgctgcgctgtctcaactcgcgcacagcaacaccaacttcgccatgcccaccacctgttcgacttgggggctcaccgagcatgctatggccgaggccgtgcactgtcgcgcgctatggctgccccgacgcgagccacttccgcgcctacttcgtgcgttcctaacgctcgagcggctcgacctctccgcatgcgcctcgctcgacgacgcctccctcgctgcgtccgtcggcgatggaccagcagccgcgacaaccttgtggtggtgcgcttcggccacgggcgacatggagagcacgctcaaggggattcgcggcagcgacgcgccgttcgtgatggacctaaacgacgcagccaccgtggcgggcggcatcgaggacacttacggcgaggaccgcgccatcgaggagcagctcgccacgcccttggacacgctcctgtgcgcccgcctcgaccctgtcaagtcgcacatcgggtgcctgctgctgcagtacctcaagctttcgcctaccttgattggtgccaaggtagtattcgaggaaatgcagcaaagcaccatcctcagggacgcgcacaccgctatctgcaccacgcctgacccggcaatcgacacacacttcgccaacaagtggcggatgcgctgctcccgcaacagcaccagtacggcggcagcggtgttggagctcgatcccggcagttgcaccacctgcgacaccagttactaccgccacgttgtgcagcggcacggactgctgcgtttcgacgcatcactcactagggcctacgtgatgcaggtcgcctttggcaggttcgacggacacttcttccacgacttcaccatcatcaagctgaagacggacagcagcagctcgcccctcgagtgttcgaccaaatgtctcagccacgatattggacatgattcacgaaattatgcacacaaattacagaatgcagtcactcatggaatcactgctgctggacatgatatcctacaggtgggattggcttcaacacctgcaatgttcaacattatacttatagaagatgagagaagtcatttacctattgacgccatttgctctcctgatgaattgataaagacatcacgtctttgtgctttagaaatggttcattgccgtaaaccttggatgagatctcttggcaacacagataggcttggactattctctgaagctcgtgctgtgttaaatgcagcaagacagcaagcaatgaagattgcactaaacatgccacagcaccagacctgcatagatgtgatgggagaaggcatattatatggaggtcgacctggtgttttgaaggaagccattgtttgctcgattccgggtgtcatggtgtttacttggactgttaggaatttttctggagttactcatttatacagtcagcatgacagaggtgtggtgtggctaatcgttgctcctgattgctacttcattcaacacaatgagaggatgcacatgatattctatggcttcgatctactgagtttgcaacacttccatggacatttcattcaagctgatatgtttgctccttgggatggtcaggaaataacccagtttctattttctgaactaccaatatattggcagcagtcacatggcatgaacagtctattatttttcagaaagctcaagtattcatcatcagttgagatattttgtggtgcacagttttcatttcctaatattctattgcccaagtcttggtcacaggagttagccaccaacatagaaagacatttactatcagaaatgctagaagtggctaatggctataattttcatgaacttcatctgatgcttgcctctattggagtgacacaaatgatcagttgtggtaaatatttgatatggatcattggcttgctaactccatgggatccgggcagaatggtcttcgacctcaagttcgtgatgcttttggcttgagggcaagccaaatcttaagaaggggggaatgtcaggcatccagtgacagatacaggctacgtctgaggacataaatacaattgggccggggcagagtgagcgagccggacggcaattgtgaagctgagcggcccagagtggtcagcaatgtaattttgtgtcttgagccagttgaacgagtatttagaggagatcgtccataggacaagggagatattcagactgtaaacagaactataccttcttcttcgtctctaacctctgcttcctctgttcctatgaatctcttgctatcttcctgaatccctagttcctgcttcctacctccaattcctgtctcggatctatctccactacctgctgctaacagagtggcttctgtctgtggccgacgccgacggcggcggccacgttgagacacacgcagcagactttgtggttctttgcgtggggaggttcagtggtgtgcccaacgtacccacgacgttcccagagggcgaaggtccagaggtgtttgacgggcaggtgatgcactccatggactacgccaagatgggctcgagcaaggccaaggagacgataaggggcaagcgtgtcaccgtcgttggctacctgaagtcggcgctcgacatcgccgccgaatgcgcgcaagtgaatggcaccgctcacccttgcacaatggtggtccggaccaagcactgggtcttgccggactacttcgcctggggcttccacatctcaag

SEQ ID NO: 27978 - DNA, 1742 bp, Zea Mays
aattgaattaacgctgtaaaattcactatagtttctgtctacaatatatcccaccaaatactccaatcgacaccactcctgtggaaagtaaggtaaaagaagaagaaaaaaagaattacagctgtataatatatacggtcgttttctgtttacggatttaccccccctctcggtctcactctcacatccctcaccacacgtccacacaagcgaagtttacaagccccgacgcggcgagccggcggcgactgtctccctctccttctgtctctctcccaccgccggcagagccagagtacgcatggatctctagtagtgcggcggcggcggggcgaagcagccgctgtcgtcgcagcgcacgggcgggcggtggaggaaggcgaggcactggtctgcggggcgctggtcggggcgggcggcgatgcagttctggcggtcgtcgacgtggcggacgtcgaggcagcggcttggctcggagcagaagtagttgtacgagtaggtgaagttgcggagcgcgggcagcgcgcagacgccctcggggacgtggccccacagctcgttgcgcgccacgtggagctgctgcaggctgtgcatgccggccatggactccggcagcatcccctgcagctggttggagctgaggtccagcacggtgagctcgcgcagccagcccagctcctgcgggaggcaggagcggaggcccgagttgagcgccaccagctcggccagcgtgcccgccatgcggcccacgctgcgcgggatgcacccgcgcaggcgcaggttggccagcacgagcacggacgccggcgagttgcccaggctgtccggcagctcgaagtcgaaggcgttgtcgttgaggaagacggcgtccagcggcttgtcgaagagcgccggcggcaccggcccgcgcagctcgttgaaccgcaggagccgcatcttggggagggactccgggagcgtccccgcgaaccggttcgagttgaggtgcagcagcgctaggtccgccagcaggcccagctcctccgggagcgtccccgccaggtcgccgtggttcaggtccaccccggccaccgtctgctcccgcggctcggctgcggctgtggctggccggagacggccgccaacgacgacgacaggagcagcaggaccaccgtcgccgccgccggcgaggccacctcctccttcttcatcgtggcggggcgcgctctgcctctggcttgcgttgccgttgcctttgcctttgcctttcggcgttccgctctcttgctgtttgtttgtcctccgcttgtgtgcgtttgcgcttattgctgatgcgtcactgcgagttcggtgtttatatacacgcacaaagacgcgctttggtttcggctgccatttgtaaagttgaccggtgtggctgtttactttttctacgaaattgtatttttcatctgaattttttacgcctttttttcttgttccgaaagtttggcgtgtttttgtgattggctggttctcatgctgtgtcttgacggaggtcacggccaatcgcggcgggcgatgtggacggcaactgtagcctgtaggtggtgggagtaggagtagtaggggggggggatcatgtgggttagttatgatgattgaagcgtatatatgattatcaaattaaaattagttcggcggacgtcgagggcaggcctacgatgatccggccgggcgtgtctgtgtctaccttgtgtcgttgccgcgtcattgtctccagc

SEQ ID NO: 27979 - DNA, 2050 bp, Zea Mays
cgttgcgctgcgccaaatctcgcttccagctccggcccggtgtgctccgcaggctccacctccgcgtcctctcaagtctcaaacgctcaaggtctcaccggagaccgcgccgcgccccgcgggcttctggtagctcgggatggcctccgggggctcggccgcacgtgacgcgtacgacgaggaggccgccgtccgccgccccctcgagctcgatagccgtgacgccgccgcctcgtcctccgaccactggcccggtgggaatgccatgcctaggtatcaagtgggcttgacaaaggatgattcaagtagtagacactctgagtggcggcagcctagcacagatgatgtgcgcaagagcaagctcgggccaagatacttcacggcgtttggcgtggatctgtcccctgataatatggcagttgccattgtctattttgtgcaaggggttctgggtcttgcacggcttgctgtgagcttttacttaaaagatgatctccatctagatccagctgagaccgcagtggtatctggtttctcgtccttgccgtggttgatcaagcccctctatggctttatcagtgattccattccactctttggatatcgaaggaggtcgtacctttttctgtcagggttacttggagcactttcatggagtttaatggccacagtagtgagcagtaaatacagtgcagcatcctctattcttcttggctcactttctgttgccttctcagatgttgtagtggattctatggttgttgagagagcccgtggagaatctcaaagcacatctggatcactccagtcgctctgttggggatcttctgcctttggaggaattgtgagtgcttacttcagcggttcgcttgtggatacttatggagtaagatttgtctttggtgtaacagcgtttttacccctgatgacatctgctgttgcagttcttgtaaatgaacatcgcatatcttctggagaacgtactaccttacactctggttcaggattcgttgagagttctaagcagcacgtcaggcagctttggacttcagtaaagcagcctaacatattgttgccgaccttgtttatatttctttggcaagcaacaccacagtcagattctgctatgtttttcttcatcacaaataagcttggattcacaccagagtttctagggcgtgtgaagcttgtaacctcctttgcatccctgctcggtgttgggctctacaactattttctgaaggaagttcctctaaggaaaatatttctcgtgacaaccattataggttcagctcttgggatgacacaggtgcttcttgtaactgggctaaatcggaagtttgggattagtgacgagtggttttctattggtgattcattaatcatcacagtccttggtcaggcttcatttatgccagtcttggtgttagctgcaaaactgtgccctccaggaatggaagccactttatttgcaactttgatgtcaatttctaatgctggaagtgttactggtggtctggttggtgctggtctaactcggatatttggggtcaccagggacacctttgggaacctacctctattgattgtcgtctgcaatcttagttcgctgctgcccttacctcttctaagtctcctgccagaggaatcaggtgacacagacaatggagaaacaaagaatatctgacttgctgagggtttcatctctgtttgttctgattctcaagtatagcataccacagtgcccagcttcaactcagatatgacccatccagttgaagttcaaaagatcagtgggcaaatatgaaaatcatactggagataagttcagttagtcaccaccaccatcagccagtatctcctgcgactattaacctgtgatcaaagcgattcattggtgatcaaaacgactattaacctgcgattcattggcgcacagatatgcacgatctattcgaacagtttcttgcatggtaatgtagagcagcacgaatggtcatatattattccgagtattctgcctgcgttgctcgcgggagtcctgaggctt

SEQ ID NO: 27980 - DNA, 2551 bp, Zea Mays
cgttgcgctgcgccaaatctcgcttccagctccggcccggtgtgctccgcaggctccacctccgcgtcctctcaagtctcaaacgctcaaggtctcaccggagaccgcgccgcgccccgcgggcttctggtagctcgggatggcctccgggggctcggccgcacgtgacgcgtacgacgaggaggccgccgtccgccgccccctcgagctcgatagccgtgacgccgccgcctcgtcctccgaccactggcccggtgggaatgccatgcctaggtatcaagtgggcttgacaaaggatgattcaagtagtagacactctgagtggcggcagcctagcacagatgatgtgcgcaagagcaagctcgggccaagatacttcacggcgtttggcgtggatctgtcccctgataatatggcagttgccattgtctattttgtgcaaggggttctgggtcttgcacggcttgctgtgagcttttacttaaaagatgatctccatctagatccagctgagtggtatctggtttctcgtccttgccgtggttgatcaagcccctctatggctttatcagtgattccattccactctttggatatcgaaggaggtcgtacctttttctgtcagggttacttggagcactttcatggagtttaatggccacagtagtgagcagtaaatacagtgcagcatcctctattcttcttggctcactttctgttgccttctcagatgttgtagtggattctatggttgttgagagagcccgtggagaatctcaaagcacatctggatcactccagtcgctctgttggggatcttctgcctttggaggaattgtgagtgcttacttcagcggttcgcttgtggatacttatggagtaagttcttgtaaatgaacatcgcatatcttctggagaacgtactaccttacactctggttcaggattcgttgagagttctaagcagcacgtcaggcagctttggacttcagtaaagcagcctaacatattgttgccgaccttgtttatatttctttggcaagcaacaccacagtcagattctgctatgtttttcttcatcacaaataagcttggattcacaccagagtttctagggcgtgtgaagcttgtaacctcctttgcatccctgctcggtgttgggctctacaactattttctgaaggaagttcctctaaggaaaatatttctcgtgacaaccattataggttcagctcttgggatgacacaggtgcttcttgtaactgggctaaatcggaagtttgggattagtgacgagtggttttctattggtgattcattaatcatcacagtccttggtcaggcttcatttatgccagtcttggtgttagctgcaaaactgtgccctccaggaatggaagccactttatttgcaactttgatgtcaatttctaatgctggaagtgttactggtggtctggttggtgctggtctaactcggatatttggggtcaccagggacacctttgggaacctacctctattgattgtcgtctgcaatcttagttcgctgctgcccttacctcttctaagtctcctgccagaggaatcaggtgacacagacaatggagaaacaaagaatatctgacttgctgagggtttcatctctgtttgttctgattctcaagtatagcataccacagtgcccagcttcaactcagatatgacccatccagttgaagttcaaaagatcagtgggcaaatatgaaaatcatactggagataagttcagttagtcaccaccaccatcagccagtatctcctgcgactattaacctgtgatcaaagcgattcattggtgatcaaaacgactattaacctgcgattcattggcgcacaggtaatcaccactttttttagtttatataagttaccttgcatacgaaggcaaggtcggttttatctttctctacattctttgagttttttgttagctaatgctgcgaccccatgaaaactagagtaggggtcaaagactagtagttgaggattcccttacaaagtcgaatgtattgtaaccaaaaaaaaagagagggaatatttatgcattatggaggcctagagtacggacacgtaaaggaaaatacttgcacacaattcgccttgccgtacagtatcaggttctgcttacatcactaggcccaaatgaagtgcaatcacagaggcacatacaggaaaactatagcacaacagaattgcagcacccatgcatggtccgtaacaacccactgaattttcgcagtgccaagtactggtgtcaatgataaattgataatagtgtgtataaccacagatctattctttgatgtctgtttgggggttaacttgaaatatgatttcaatttattggcgagtcgaataagagttaagtaagaaatgatcattggaatcagcggagtgtaaagcatccaggaactaacctgtgtgtttctcttttgagggtgtgctcagtgctcctatagttgatatttatccaggactacgatcagttaaattatatcatgaggacgaa

SEQ ID NO: 27981 - DNA, 2606 bp, Zea Mays
cgttgcgctgcgccaaatctcgcttccagctccggcccggtgtgctccgcaggctccacctccgcgtcctctcaagtctcaaacgctcaaggtctcaccggagaccgcgccgcgccccgcgggcttctggtagctcgggatggcctccgggggctcggccgcacgtgacgcgtacgacgaggaggccgccgtccgccgccccctcgagctcgatagccgtgacgccgccgcctcgtcctccgaccactggcccggtgggaatgccatgcctaggtatcaagtgggcttgacaaaggatgattcaagtagtagacactctgagtggcggcagcctagcacagatgatgtgcgcaagagcaagctcgggccaagatacttcacggcgtttggcgtggatctgtcccctgataatatggcagttgccattgtctattttgtgcaaggggttctgggtcttgcacggcttgctgtgagcttttacttaaaagatgatctccatctagatccagctgagaccgcagtggtatctggtttctcgtccttgccgtggttgatcaagcccctctatggctttatcagtgattccattccactctttggatatcgaaggaggtcgtacctttttctgtcagggttacttggagcactttcatggagtttaatggccacagtagtgagcagtaaatacagtgcagcatcctctattcttcttggctcactttctgttgccttctcagatgttgtagtggattctatggttgttgagagagcccgtggagaatctcaaagcacatctggatcactccagtcgctctgttggggatcttctgcctttggaggaattgtgagtgcttacttcagcggttcgcttgtggatacttatggaatttgtctttggtgtaacagcgtttttacccctgatgacatctgctgttgcagttcttgtaaatgaacatcgcatatcttctggagaacgtactaccttacactctggttcaggattcgttgagagttctaagcagcacgtcaggcagctttggacttcagtaaagcagcctaacatattgttgccgaccttgtttatatttctttggcaagcaacaccacagtcagattctgctatgtttttcttcatcacaaataagcttggattcacaccagagtttctagggcgtgtgaagcttgtaacctcctttgcatccctgctcggtgttgggctctacaactattttctgaaggaagttcctctaaggaaaatatttctcgtgacaaccattataggttcagctcttgggatgacacaggtgcttcttgtaactgggctaaatcggaagtttgggattagtgacgagtggttttctattggtgattcattaatcatcacagtccttggtcaggcttcatttatgccagtcttggtgttagctgcaaaactgtgccctccaggaatggaagccactttatttgcaactttgatgtcaatttctaatgctggaagtgttactggtggtctggttggtgctggtctaactcggatatttggggtcaccagggacacctttgggaacctacctctattgattgtcgtctgcaatcttagttcgctgctgcccttacctcttctaagtctcctgccagaggaatcaggtgacacagacaatggagaaacaaagaatatctgacttgctgagggtttcatctctgtttgttctgattctcaagtatagcataccacagtgcccagcttcaactcagatatgacccatccagttgaagttcaaaagatcagtgggcaaatatgaaaatcatactggagataagttcagttagtcaccaccaccatcagccagtatctcctgcgactattaacctgtgatcaaagcgattcattggtgatcaaaacgactattaacctgcgattcattggcgcacaggtaatcaccactttttttagtttatataagttaccttgcatacgaaggcaaggtcggttttatctttctctacattctttgagttttttgttagctaatgctgcgaccccatgaaaactagagtaggggtcaaagactagtagttgaggattcccttacaaagtcgaatgtattgtaaccaaaaaaaaagagagggaatatttatgcattatggaggcctagagtacggacacgtaaaggaaaatacttgcacacaattcgccttgccgtacagtatcaggttctgcttacatcactaggcccaaatgaagtgcaatcacagaggcacatacaggaaaactatagcacaacagaattgcagcacccatgcatggtccgtaacaacccactgaattttcgcagtgccaagtactggtgtcaatgataaattgataatagtgtgtataaccacagatctattctttgatgtctgtttgggggttaacttgaaatatgatttcaatttattggcgagtcgaataagagttaagtaagaaatgatcattggaatcagcggagtgtaaagcatccaggaactaacctgtgtgtttctcttttgagggtgtgctcagtgctcctatagttgatatttatccaggactacgatcagttaaattatatcatgaggacgaa

SEQ ID NO: 27982 - DNA, 2403 bp, Zea Mays
cgttgcgctgcgccaaatctcgcttccagctccggcccggtgtgctccgcaggctccacctccgcgtcctctcaagtctcaaacgctcaaggtctcaccggagaccgcgccgcgccccgcgggcttctggtagctcgggatggcctccgggggctcggccgcacgtgacgcgtacgacgaggaggccgccgtccgccgccccctcgagctcgatagccgtgacgccgccgcctcgtcctccgaccactggcccggtgggaatgccatgcctaggtatcaagtgggcttgacaaaggatgattcaagtagtagacactctgagtggcggcagcctagcacagatgatgtgcgcaagagcaagctcgggccaagatacttcacggcgtttggcgtggatctgtcccctgataatatggcagttgccattgtctattttgtgcaaggggttctgggtcttgcacggcttgctgtgagcttttacttaaaagatgatctccatctagatccagctgagaccgcagtggtatctggtttctcgtccttgccgtggttgatcaagcccctctatggctttatcagtgattccattccactctttggatatcgaaggaggtcgtacctttttctgtcagggttacttggagcactttcatggagtttaatggccacagtagtgagcagtaaatacagtgcagcatcctctattcttcttggctcactttctgttgccttctcagatgttgtagtggattctatggttgttgagagagcccgtggagaatctcaaagcacatctggatcactccagtcgctctgttggggatcttctgcctttggaggaattgtgagtgcttacttcagcggttcgcttgtggatacttatggagtaagttcttgtaaatgaacatcgcatatcttctggagaacgtactaccttacactctggttcaggattcgttgagagttctaagcagcacgtcaggcagctttggacttcagtaaagcagcctaacatattgttgccgaccttgtttatatttctttggcaagcaacaccacagtcagattctgctatgtttttcttcatcacaaataagcttggattcacaccagagtttctagggcgtgtgaagcttgtaacctcctttgcatccctgctcggtgttgggctctacaactattttctgaaggaagttcctctaaggaaaatatttctcgtgacaaccattataggttcagctcttgggatgacacaggtgcttcttgtaactgggctaaatcggaagtttgggattagtgacgagtggttttctattggtgattcattaatcatcacagtccttggtcagggacacctttgggaacctacctctattgattgtcgtctgcaatcttagttcgctgctgcccttacctcttctaagtctcctgccagaggaatcaggtgacacagacaatggagaaacaaagaatatctgacttgctgagggtttcatctctgtttgttctgattctcaagtatagcataccacagtgcccagcttcaactcagatatgacccatccagttgaagttcaaaagatcagtgggcaaatatgaaaatcatactggagataagttcagttagtcaccaccaccatcagccagtatctcctgcgactattaacctgtgatcaaagcgattcattggtgatcaaaacgactattaacctgcgattcattggcgcacaggtaatcaccactttttttagtttatataagttaccttgcatacgaaggcaaggtcggttttatctttctctacattctttgagttttttgttagctaatgctgcgaccccatgaaaactagagtaggggtcaaagactagtagttgaggattcccttacaaagtcgaatgtattgtaaccaaaaaaaaagagagggaatatttatgcattatggaggcctagagtacggacacgtaaaggaaaatacttgcacacaattcgccttgccgtacagtatcaggttctgcttacatcactaggcccaaatgaagtgcaatcacagaggcacatacaggaaaactatagcacaacagaattgcagcacccatgcatggtccgtaacaacccactgaattttcgcagtgccaagtactggtgtcaatgataaattgataatagtgtgtataaccacagatctattctttgatgtctgtttgggggttaacttgaaatatgatttcaatttattggcgagtcgaataagagttaagtaagaaatgatcattggaatcagcggagtgtaaagcatccaggaactaacctgtgtgtttctcttttgagggtgtgctcagtgctcctatagttgatatttatccaggactacgatcagttaaattatatcatgaggacgaa

SEQ ID NO: 27983 - DNA, 2340 bp, Zea Mays
gagtcggggacgagcagctccacaacaattcgtgcctgcctccctgcctcggcctcctccctcgtcctcccctcctccgccgcctcaaacccggccccctcgcgcgcgtgcgcggcgctcgaggcgacgaatccagccacctcctccgcacccatccccgccgccggtcgccgatgagctcggaaggctgggacgctgacccgaattttatggggagaggatgccagagctgcgaagcaatactcgtcaagcacgcttaaggtctaagaagcttgacgatctgcagccaggagagccgcttgcgaaaccggtgtcacctgctctgccgagcgcacggaagcgtgctcctacacgtgctgctaggggcagaaagggtgctgctgggagaggagtgcctcccgcaccaaagcctagaagaaagggggttgatattgtcgtcttagaagctgatcctgcttgtgaaaccccacttaaagctttcaagggactggaagttgctgctgctgcgcccaagaaccttcctttgaagcaggtagccgaagttggtgttccgaaaatgaatggtgaaagtggggagaagattgttggggctgaagatgaatcgacagctacacctgtcccagaaagggttcaagtaggtaattctccagagtacataactgacaggaagttaggtaaaggtggttttggtcaggtgtatgttggtcgaagggtttctggtggtgctgctcgcactggtcctgatgcatatgaggttgcattgaaattcgagcatcgtaacagtaaaggatgcaattatggccccccatatgagtggcaagtttataacactctcaatggttgctatggcataccatcggtccactacaagggtcgtcagggcgaatactatatacttgtaatggatatgcttggtcccagcctttgggatgtgtggaattcgatggggcaggcgatgactccaaatatggctgcttgcattgctgtagagagcatatcaattcttgagaagctccattctaaagggtttgtgcatggtgatgtgaaaccagagaattttctgcttggtcagcctggatcgcctgaagataagaagctttaccttatagatcttggtttagcatccaagtggagagagaataatggtcatcatgttgattatgatcaacggcctgatatctttaggggaacaattagatatgcgagtgtccatgctcatttggggcgcactggtagtaggagggatgatttagagtcactggcatacacccttattttcctgataagaggaagattaccttggcaaggctaccagggagataccaagagtttccttgtttgcaagaagaaaatggctacttctccggagatgctttgttgttattgtccagctccattcaaacagtttcttgagattgtcacaaatatgaaatttgacgaagagccaaattatgccaagcttatctctctttttgatggtttgattgaagcgcctgcttcgagacaaatcagaattgatggggctctcaaggttggacagaaacgtggaagattggttgcagatctagaagaagatgaacaacctaaaaagaaggttagattagggagcccagcggctcaatggatttcagtttataatgctaggcggcccatgaagcagaggtaccattacaatgtggctgactcgaggctaagccaacatatagaaaagggcaacgatgatgggctttacattagcagcgtggcttcctcggcaaacctttgggcactcatcatggacgcaggaactggtttctgttctcaggtttatgagctctcaccagttttcctccacaaggactggataatggagcagtgggagaaaagctactacataacagcaattgctggatcatccaacgggagctcattggttgtcatgtccaaaggaactccttacacccaacaatcatacaaggttagcgagtcgttcccttacaagtggatcaataagaagtggaaagaagggttccatgtgacatccatggccaccgctgggaatcgctggggcgtagtcatgtcaaggaattcagggttctctactcaggttgtagagttggatttcctgtaccccagcgagggcatccaccggcgctgggagagcggctacaggataacttccacggcagccaccaacgaccaagccgctttcatcctgagcatgccgaaacggaagccgatggacgagacacaggaaacgctgcggacctccgccttccccagctcacacgtcaaggtgtcgttagcatcaggatttcccttgatccagaccaacagcaccaacagcatctcggaaaccgc

SEQ ID NO: 27984 - DNA, 2348 bp, Zea Mays
gagtcggggacgagcagctccacaacaattcgtgcctgcctccctgcctcggcctcctccctcgtcctcccctcctccgccgcctcaaacccggccccctcgcgcgcgtgcgcggcgctcgaggcgacgaatccagccacctcctccgcacccatccccgccgccggtcgccgatattggaaggagctcggaaggctgggacgctgacccgaattttatggggagaggatgccagagctgcgaagcaatactcgtcaagcacgcttaaggtctaagaagcttgacgatctgcagccaggagagccgcttgcgaaaccggtgtcacctgctctgccgagcgcacggaagcgtgctcctacacgtgctgctaggggcagaaagggtgctgctgggagaggagtgcctcccgcaccaaagcctagaagaaagggggttgatattgtcgtcttagaagctgatcctgcttgtgaaaccccacttaaagctttcaagggactggaagttgctgctgctgcgcccaagaaccttcctttgaagcaggtagccgaagttggtgttccgaaaatgaatggtgaaagtggggagaagattgttggggctgaagatgaatcgacagctacacctgtcccagaaagggttcaagtaggtaattctccagagtacataactgacaggaagttaggtaaaggtggttttggtcaggtgtatgttggtcgaagggtttctggtggtgctgctcgcactggtcctgatgcatatgaggttgcattgaaattcgagcatcgtaacagtaaaggatgcaattatggccccccatatgagtggcaagtttataacactctcaatggttgctatggcataccatcggtccactacaagggtcgtcagggcgaatactatatacttgtaatggatatgcttggtcccagcctttgggatgtgtggaattcgatggggcaggcgatgactccaaatatggctgcttgcattgctgtagagagcatatcaattcttgagaagctccattctaaagggtttgtgcatggtgatgtgaaaccagagaattttctgcttggtcagcctggatcgcctgaagataagaagctttaccttatagatcttggtttagcatccaagtggagagagaataatggtcatcatgttgattatgatcaacggcctgatatctttaggggaacaattagatatgcgagtgtccatgctcatttggggcgcactggtagtaggagggatgatttagagtcactggcatacacccttattttcctgataagaggaagattaccttggcaaggctaccagggagataccaagagtttccttgtttgcaagaagaaaatggctacttctccggagatgctttgttgttattgtccagctccattcaaacagtttcttgagattgtcacaaatatgaaatttgacgaagagccaaattatgccaagcttatctctctttttgatggtttgattgaagcgcctgcttcgagacaaatcagaattgatggggctctcaaggttggacagaaacgtggaagattggttgcagatctagaagaagatgaacaacctaaaaagaaggttagattagggagcccagcggctcaatggatttcagtttataatgctaggcggcccatgaagcagaggtaccattacaatgtggctgactcgaggctaagccaacatatagaaaagggcaacgatgatgggctttacattagcagcgtggcttcctcggcaaacctttgggcactcatcatggacgcaggaactggtttctgttctcaggtttatgagctctcaccagttttcctccacaaggactggataatggagcagtgggagaaaagctactacataacagcaattgctggatcatccaacgggagctcattggttgtcatgtccaaaggaactccttacacccaacaatcatacaaggttagcgagtcgttcccttacaagtggatcaataagaagtggaaagaagggttccatgtgacatccatggccaccgctgggaatcgctggggcgtagtcatgtcaaggaattcagggttctctactcaggttgtagagttggatttcctgtaccccagcgagggcatccaccggcgctgggagagcggctacaggataacttccacggcagccaccaacgaccaagccgctttcatcctgagcatgccgaaacggaagccgatggacgagacacaggaaacgctgcggacctccgccttccccagctcacacgtcaaggtgtcgttagcatcaggatttcccttgatccagaccaacagcaccaacagcatctcggaaaccgc

SEQ ID NO: 27985 - DNA, 2743 bp, Zea Mays
atggtagatacctagatggagagattggaaggagctcggaaggctgggacgctgacccgaattttatggggagaggatgccagagctgcgaagcaatactcgtcaagcacgcttaaggtctaagaagcttgacgatctgcagccaggagagccgcttgcgaaaccggtgtcacctgctctgccgagcgcacggaagcgtgctcctacacgtgctgctaggggcagaaagggtgctgctgggagaggagtgcctcccgcaccaaagcctagaagaaagggggttgatattgtcgtcttagaagctgatcctgcttgtgaaaccccacttaaagctttcaagggactggaagttgctgctgctgcgcccaagaaccttcctttgaagcaggtagccgaagttggtgttccgaaaatgaatggtgaaagtggggagaagattgttggggctgaagatgaatcgacagctacacctgtcccagaaagggttcaagtaggtaattctccagagtacataactgacaggaagttaggtaaaggtggttttggtcaggtgtatgttggtcgaagggtttctggtggtgctgctcgcactggtcctgatgcatatgaggttgcattgaaattcgagcatcgtaacagtaaaggatgcaattatggccccccatatgagtggcaagtttataacactctcaatggttgctatggcataccatcggtccactacaagggtcgtcagggcgaatactatatacttgtaatggatatgcttggtcccagcctttgggatgtgtggaattcgatggggcaggcgatgactccaaatatggctgcttgcattgctgtagagagcatatcaattcttgagaagctccattctaaagggtttgtgcatggtgatgtgaaaccagagaattttctgcttggtcagcctggatcgcctgaagataagaagctttaccttatagatcttggtttagcatccaagtggagagagaataatggtcatcatgttgattatgatcaacggcctgatatctttaggggaacaattagatatgcgagtgtccatgctcatttggggcgcactggtagtaggagggatgatttagagtcactggcatacacccttattttcctgataagaggaagattaccttggcaaggctaccagggagataccaagagtttccttgtttgcaagaagaaaatggctacttctccggagatgctttgttgttattgtccagctccattcaaacagtttcttgagattgtcacaaatatgaaatttgacgaagagccaaattatgccaagcttatctctctttttgatggtttgattgaagcgcctgcttcgagacaaatcagaattgatggggctctcaaggttggacagaaacgtggaagattggttgcagatctagaagaagatgaacaacctaaaaagaaggttagattagggagcccagcggctcaatggatttcagtttataatgctaggcggcccatgaagcagaggtaccattacaatgtggctgactcgaggctaagccaacatatagaaaagggcaacgatgatgggctttacattagcagcgtggcttcctcggcaaacctttgggcactcatcatggacgcaggaactggtttctgttctcaggtttatgagctctcaccagttttcctccacaaggactggataatggagcagtgggagaaaagctactacataacagcaattgctggatcatccaacgggagctcattggttgtcatgtccaaaggaactccttacacccaacaatcatacaaggttagcgagtcgttcccttacaagtggatcaataagaagtggaaagaagggttccatgtgacatccatggccaccgctgggaatcgctggggcgtagtcatgtcaaggaattcagggttctctactcaggttgtagagttggatttcctgtaccccagcgagggcatccaccggcgctgggagagcggctacaggataacttccacggcagccaccaacgaccaagccgctttcatcctgagcatgccgaaacggaagccgatggacgagacacaggaaacgctgcggacctccgccttccccagctcacacgtcaaggagaaatgggccaagaacctctacatcgcttcgatttgcttcgggcggaccgtgtgctgatcgcgcgcgcctgggaaatggaagtcgaagcgagggccaccgatccggtacggtggcgcctcgcatcaagagatgcgagatggggcgtcaagtcgaaaccagttctaatgataggatcagtgtatctctgaagatacggtatgggttaccctaccgtatttgtaaagtaatgatgccggccgaacgacctttcctaacgcgtttgggcagaaattcgttgctgtcaccatattttgacgggagtttctcccgtgttgtcggtagaaatttgcgtgtgcactcttcccgttttggcgcccatgcgatgtgtttcacccgatgtatcgctgggcttcctgtttcgtgactcgtgagccgcaatgtctggtggcctgccgactccggttggcattttattttgagagacgtagataaattgaattgattgaatatttagagctcagtcagtcaaggcccgattaagtaacatatgaacgtatgtctatattcattcattattattttaataaatatggatagaaaaaaaaagttggctaaaaagataaacaataa

SEQ ID NO: 27986 - DNA, 2535 bp, Zea Mays
gatgatggtagatacctagatggagagattggaaggagctcggaaggctgggacgctgacccgaattttatggggagaggatgccagagctgcgaagcaatactcgtcaagcacgcttaaggtctaagaagcttgacgatctgcagccaggagagccgcttgcgaaaccggtgtcacctgctctgccgagcgcacggaagcgtgctcctacacgtgctgctaggggcagaaagggtgctgctgggagaggagtgcctcccgcaccaaagcctagaagaaagggggttgatattgtcgtcttagaagctgatcctgcttgtgaaaccccacttaaagctttcaagggactggaagttgctgctgctgcgcccaagaaccttcctttgaagcaggtagccgaagttggtgttccgaaaatgaatggtgaaagtggggagaagattgttggggctgaagatgaatcgacagctacacctgtcccagaaagggttcaagtaggtaattctccagagtacataactgacaggaagttaggtaaaggtggttttggtcaggtgtatgttggtcgaagggtttctggtggtgctgctcgcactggtcctgatgcatatgaggttgcattgaaattcgagcatcgtaacagtaaaggatgcaattatggccccccatatgagtggcaagtttataacactctcaatggttgctatggcataccatcggtccactacaagggtcgtcagggcgaatactatatacttgtaatggatatgcttggtcccagcctttgggatgtgtggaattcgatggggcaggcgatgactccaaatatggctgcttgcattgctgtagagagcatatcaattcttgagaagctccattctaaagggtttgtgcatggtgatgtgaaaccagagaattttctgcttggtcagcctggatcgcctgaagataagaagctttaccttatagatcttggtttagcatccaagtggagagagaataatggtcatcatgttgattatgatcaacggcctgatatctttaggggaacaattagatatgcgagtgtccatgctcatttggggcgcactggtagtaggagggatgatttagagtcactggcatacacccttattttcctgataagaggaagattaccttggcaaggctaccagggagataccaagagtttccttgtttgcaagaagaaaatggctacttctccggagatgctttgttgttattgtccagctccattcaaacagtttcttgagattgtcacaaatatgaaatttgacgaagagccaaattatgccaagcttatctctctttttgatggtttgattgaagcgcctgcttcgagacaaatcagaattgatggggctctcaaggttggacagaaacgtggaagattggttgcagatctagaagaagatgaacaacctaaaaagaaggttagattagggagcccagcggctcaatggatttcagtttataatgctaggcggcccatgaagcagaggtaccattacaatgtggctgactcgaggctaagccaacatatagaaaagggcaacgatgatgggctttacattagcagcgtggcttcctcggcaaacctttgggcactcatcatggacgcaggaactggtttctgttctcaggtttatgagctctcaccagttttcctccacaaggactggataatggagcagtgggagaaaagctactacataacagcaattgctggatcatccaacgggagctcattggttgtcatgtccaaaggaactccttacacccaacaatcatacaaggttagcgagtcgttcccttacaagtggatcaataagaagtggaaagaagggttccatgtgacatccatggccaccgctgggaatcgctggggcgtagtcatgtcaaggaattcagggttctctactcaggttgtagagttggatttcctgtaccccagcgagggcatccaccggcgctgggagagcggctacaggataacttccacggcagccaccaacgaccaagccgctttcatcctgagcatgccgaaacggaagccgatggacgagacacaggaaacgctgcggacctccgccttccccagctcacacgtcaaggagaaatgggccaagaacctctacatcgcttcgatttgcttcgggcggaccgtgtgctgatcgcgcgcgcctgggaaatggaagtcgaagcgagggccaccgatccggtacggtggcgcctcgcatcaagagatgcgagatggggcgtcaagtcgaaaccagttctaatgataggatcagtgtatctctgaagatacggtatgggttaccctaccgtatttgtaaagtaatgatgccggccgaacgacctttcctaacataaattgaattgattgaatatttagagctcagtcagtcaaggcccgattaagtaacatatgaacgtatgtctatattcattcattattattttaataaatatggatagaaaaaaaaagttggctaaaaagataaacaataa

SEQ ID NO: 27987 - DNA, 2654 bp, Zea Mays
gagtcggggacgagcagctccacaacaattcgtgcctgcctccctgcctcggcctcctccctcgtcctcccctcctccgccgcctcaaacccggccccctcgcgcgcgtgcgcggcgctcgaggcgacgaatccagccacctcctccgcacccatccccgccgccggtcgccgatattggaaggagctcggaaggctgggacgctgacccgaattttatggggagaggatgccagagctgcgaagcaatactcgtcaagcacgcttaaggtctaagaagcttgacgatctgcagccaggagagccgcttgcgaaaccggtgtcacctgctctgccgagcgcacggaagcgtgctcctacacgtgctgctaggggcagaaagggtgctgctgggagaggagtgcctcccgcaccaaagcctagaagaaagggggttgatattgtcgtcttagaagctgatcctgcttgtgaaaccccacttaaagctttcaagggactggaagttgctgctgctgcgcccaagaaccttcctttgaagcaggtagccgaagttggtgttccgaaaatgaatggtgaaagtggggagaagattgttggggctgaagatgaatcgacagctacacctgtcccagaaagggttcaagtaggtaattctccagagtacataactgacaggaagttaggtaaaggtggttttggtcaggtgtatgttggtcgaagggtttctggtggtgctgctcgcactggtcctgatgcatatgagtaaaggatgcaattatggccccccatatgagtggcaagtttataacactctcaatggttgctatggcataccatcggtccactacaagggtcgtcagggcgaatactatatacttgtaatggatatgcttggtcccagcctttgggatgtgtggaattcgatggggcaggcgatgactccaaatatggctgcttgcattgctgtagagagcatatcaattcttgagaagctccattctaaagggtttgtgcatggtgatgtgaaaccagagaattttctgcttggtcagcctggatcgcctgaagataagaagctttaccttatagatcttggtttagcatccaagtggagagagaataatggtcatcatgttgattatgatcaacggcctgatatctttaggggaacaattagatatgcgagtgtccatgctcatttggggcgcactggtagtaggagggatgatttagagtcactggcatacacccttattttcctgataagaggaagattaccttggcaaggctaccagggagataccaagagtttccttgtttgcaagaagaaaatggctacttctccggagatgctttgttgttattgtccagctccattcaaacagtttcttgagattgtcacaaatatgaaatttgacgaagagccaaattatgccaagcttatctctctttttgatggtttgattgaagcgcctgcttcgagacaaatcagaattgatggggctctcaaggttggacagaaacgtggaagattggttgcagatctagaagaagatgaacaacctaaaaagaaggttagattagggagcccagcggctcaatggatttcagtttataatgctaggcggcccatgaagcagaggtaccattacaatgtggctgactcgaggctaagccaacatatagaaaagggcaacgatgatgggctttacattagcagcgtggcttcctcggcaaacctttgggcactcatcatggacgcaggaactggtttctgttctcaggtttatgagctctcaccagttttcctccacaaggactggataatggagcagtgggagaaaagctactacataacagcaattgctggatcatccaacgggagctcattggttgtcatgtccaaaggaactccttacacccaacaatcatacaaggttagcgagtcgttcccttacaagtggatcaataagaagtggaaagaagggttccatgtgacatccatggccaccgctgggaatcgctggggcgtagtcatgtcaaggaattcagggttctctactcaggttgtagagttggatttcctgtaccccagcgagggcatccaccggcgctgggagagcggctacaggataacttccacggcagccaccaacgaccaagccgctttcatcctgagcatgccgaaacggaagccgatggacgagacacaggaaacgctgcggacctccgccttccccagctcacacgtcaaggagaaatgggccaagaacctctacatcgcttcgatttgcttcgggcggaccgtgtgctgatcgcgcgcgcctgggaaatggaagtcgaagcgagggccaccgatccggtacggtggcgcctcgcatcaagagatgcgagatggggcgtcaagtcgaaaccagttctaatgataggatcagtgtatctctgaagatacggtatgggttaccctaccgtatttgtaaagtaatgatgccggccgaacgacctttcctaacataaattgaattgattgaatatttagagctcagtcagtcaaggcccgattaagtaacatatgaacgtatgtctatattcattcattattattttaataaatatggatagaaaaaaaaagttggctaaaaagataaacaataa

SEQ ID NO: 27988 - DNA, 2605 bp, Zea Mays
gagtcggggacgagcagctccacaacaattcgtgcctgcctccctgcctcggcctcctccctcgtcctcccctcctccgccgcctcaaacccggccccctcgcgcgcgtgcgcggcgctcgaggcgacgaatccagccacctcctccgcacccatccccgccgccggtcgccgatgagctcggaaggctgggacgctgacccgaattttatggggagaggatgccagagctgcgaagcaatactcgtcaagcacgcttaaggtctaagaagcttgacgatctgcagccaggagagccgcttgcgaaaccggtgtcacctgctctgccgagcgcacggaagcgtgctcctacacgtgctgctaggggcagaaagggtgctgctgggagaggagtgcctcccgcaccaaagcctagaagaaagggggttgatattgtcgtcttagaagctgatcctgcttgtgaaaccccacttaaagctttcaagggactggaagttgctgctgctgcgcccaagaaccttcctttgaagcaggtagccgaagttggtgttccgaaaatgaatggtgaaagtggggagaagattgttggggctgaagatgaatcgacagctacacctgtcccagaaagggttcaagtaggtaattctccagagtacataactgacaggaagttaggtaaaggtggttttggtcaggtgtatgttggtcgaagggtttctggtggtgctgctcgcactggtcctgatgcatatgaggttgcattgaaattcgagcatcgtaacagtaaaggatgcaattatggccccccatatgagtggcaagtttataagtaatggatatgcttggtcccagcctttgggatgtgtggaattcgatggggcaggcgatgactccaaatatggctgcttgcattgctgtagagagcatatcaattcttgagaagctccattctaaagggtttgtgcatggtgatgtgaaaccagagaattttctgcttggtcagcctggatcgcctgaagataagaagctttaccttatagatcttggtttagcatccaagtggagagagaataatggtcatcatgttgattatgatcaacggcctgatatctttaggggaacaattagatatgcgagtgtccatgctcatttggggcgcactggtagtaggagggatgatttagagtcactggcatacacccttattttcctgataagaggaagattaccttggcaaggctaccagggagataccaagagtttccttgtttgcaagaagaaaatggctacttctccggagatgctttgttgttattgtccagctccattcaaacagtttcttgagattgtcacaaatatgaaatttgacgaagagccaaattatgccaagcttatctctctttttgatggtttgattgaagcgcctgcttcgagacaaatcagaattgatggggctctcaaggttggacagaaacgtggaagattggttgcagatctagaagaagatgaacaacctaaaaagaaggttagattagggagcccagcggctcaatggatttcagtttataatgctaggcggcccatgaagcagaggtaccattacaatgtggctgactcgaggctaagccaacatatagaaaagggcaacgatgatgggctttacattagcagcgtggcttcctcggcaaacctttgggcactcatcatggacgcaggaactggtttctgttctcaggtttatgagctctcaccagttttcctccacaaggactggataatggagcagtgggagaaaagctactacataacagcaattgctggatcatccaacgggagctcattggttgtcatgtccaaaggaactccttacacccaacaatcatacaaggttagcgagtcgttcccttacaagtggatcaataagaagtggaaagaagggttccatgtgacatccatggccaccgctgggaatcgctggggcgtagtcatgtcaaggaattcagggttctctactcaggttgtagagttggatttcctgtaccccagcgagggcatccaccggcgctgggagagcggctacaggataacttccacggcagccaccaacgaccaagccgctttcatcctgagcatgccgaaacggaagccgatggacgagacacaggaaacgctgcggacctccgccttccccagctcacacgtcaaggagaaatgggccaagaacctctacatcgcttcgatttgcttcgggcggaccgtgtgctgatcgcgcgcgcctgggaaatggaagtcgaagcgagggccaccgatccggtacggtggcgcctcgcatcaagagatgcgagatggggcgtcaagtcgaaaccagttctaatgataggatcagtgtatctctgaagatacggtatgggttaccctaccgtatttgtaaagtaatgatgccggccgaacgacctttcctaacataaattgaattgattgaatatttagagctcagtcagtcaaggcccgattaagtaacatatgaacgtatgtctatattcattcattattattttaataaatatggatagaaaaaaaaagttggctaaaaagataaacaataa

SEQ ID NO: 27989 - DNA, 2750 bp, Zea Mays
cgagcgccacgacccacggcacgagggtggcgcaccgcgtctccaaatccaaaaccaacgcgagcacgagtcggggacgagcagctccacaacaattcgtgcctgcctccctgcctcggcctcctccctcgtcctcccctcctccgccgcctcaaacccggccccctcgcgcgcgtgcgcggcgctcgaggcgacgaatccagccacctcctccgcacccatccccgccgccggtcgccgatattggaaggagctcggaaggctgggacgctgacccgaattttatggggagaggatgccagagctgcgaagcaatactcgtcaagcacgcttaaggtctaagaagcttgacgatctgcagccaggagagccgcttgcgaaaccggtgtcacctgctctgccgagcgcacggaagcgtgctcctacacgtgctgctaggggcagaaagggtgctgctgggagaggagtgcctcccgcaccaaagcctagaagaaagggggttgatattgtcgtcttagaagctgatcctgcttgtgaaaccccacttaaagctttcaagggactggaagttgctgctgctgcgcccaagaaccttcctttgaagcaggtagccgaagttggtgttccgaaaatgaatggtgaaagtggggagaagattgttggggctgaagatgaatcgacagctacacctgtcccagaaagggttcaagtaggtaattctccagagtacataactgacaggaagttaggtaaaggtggttttggtcaggtgtatgttggtcgaagggtttctggtggtgctgctcgcactggtcctgatgcatatgaggttgcattgaaattcgagcatcgtaacagtaaaggatgcaattatggccccccatatgagtggcaagtttataacactctcaatggttgctatggcataccatcggtccactacaagggtcgtcagggcgaatactatatacttgtaatggatatgcttggtcccagcctttgggatgtgtggaattcgatggggcaggcgatgactccaaatatggctgcttgcattgctgtagagagcatatcaattcttgagaagctccattctaaagggtttgtgcatggtgatgtgaaaccagagaattttctgcttggtcagcctggatcgcctgaagataagaagctttaccttatagatcttggtttagcatccaagtggagagagaataatggtcatcatgttgattatgatcaacggcctgatatctttaggggaacaattagatatgcgagtgtccatgctcatttggggcgcactggtagtaggagggatgatttagagtcactggcatacacccttattttcctgataagaggaagattaccttggcaaggctaccagggagataccaagagtttccttgtttgcaagaagaaaatggctacttctccggagatgctttgttgttattgtccagctccattcaaacagtttcttgagattgtcacaaatatgaaatttgacgaagagccaaattatgccaagcttatctctctttttgatggtttgattgaagcgcctgcttcgagacaaatcagaattgatggggctctcaaggttggacagaaacgtggaagattggttgcagatctagaagaagatgaacaacctaaaaagaaggttagattagggagcccagcggctcaatggatttcagtttataatgctaggcggcccatgaagcagaggtaccattacaatgtggctgactcgaggctaagccaacatatagaaaagggcaacgatgatgggctttacattagcagcgtggcttcctcggcaaacctttgggcactcatcatggacgcaggaactggtttctgttctcaggtttatgagctctcaccagttttcctccacaaggactggataatggagcagtgggagaaaagctactacataacagcaattgctggatcatccaacgggagctcattggttgtcatgtccaaaggaactccttacacccaacaatcatacaaggttagcgagtcgttcccttacaagtggatcaataagaagtggaaagaagggttccatgtgacatccatggccaccgctgggaatcgctggggcgtagtcatgtcaaggaattcagggttctctactcaggttgtagagttggatttcctgtaccccagcgagggcatccaccggcgctgggagagcggctacaggataacttccacggcagccaccaacgaccaagccgctttcatcctgagcatgccgaaacggaagccgatggacgagacacaggaaacgctgcggacctccgccttccccagctcacacgtcaaggagaaatgggccaagaacctctacatcgcttcgatttgcttcgggcggaccgtgtgctgatcgcgcgcgcctgggaaatggaagtcgaagcgagggccaccgatccggtacggtggcgcctcgcatcaagagatgcgagatggggcgtcaagtcgaaaccagttctaatgataggatcagtgtatctctgaagatacggtatgggttaccctaccgtatttgtaaagtaatgatgccggccgaacgacctttcctaacataaattgaattgattgaatatttagagctcagtcagtcaaggcccgattaagtaacatatgaacgtatgtctatattcattcattattattttaataaatatggatagaaaaaaaaagttggctaaaaagataaacaataa

SEQ ID NO: 27990 - DNA, 577 bp, Zea Mays
atcttgcaatccagcagtttcatcaatcgctgaagctacatttgattattcgatccttactctgattaaaatcgaacatgttaggatgcagggataagcttcttgcagatacacctatggaagatttttgtatctcgagagaggatcataatcgcacctggggaggacctgtgaattgcaccaaagcttcaccattctgtctcgcatcagggcagtagtttcctttgggtattgtgacttgtgagggaggagaaccttgccagcgtgtgtaccactcatcctttgatgtgagaagggaccttgtacgtagagaggccaggacttgtattttaactgttggtgttggttatgttaggaaatatggataactggctgcagtcttgttacggtgttgattcatgctctgtttaagcccttgttttctctctctaaaaagtagtctcttgtgtttgttgatgaagcaagataattggtttagagaaaagtttatatatgcatataattattcatccatgttatcatgatgtatgcatacaggtacaggtttgtaaaggtatctgaattctggtcgctgaaa

SEQ ID NO: 27991 - DNA, 1441 bp, Zea Mays
cataacagagcgggacattgggaaaggcccacgacaacggcccgctccacctacttccaaacgaacaaaccctctcgaaaaccctctctcatattcaccccgccgccgcctcctcttccccttttcaacttcgccgaaaccctaaccctcccggcgaagtcgccatgtcgaacccgaagggctccaagatgctccagttcatcaactaccgcatgcgggtgacgatccaggacggccgccagctcgtgggcaagttcatggcgttcgaccgccacatgaacctcgtcctcggcgactgcgaggagttccgccgcctcccgccctccaagtcctccaaggccaccggcgaacgcgaggagcgccgcacgctcggcctcctcctgctccgcggcgaggaggtcgtctccatgaccgtcgaggggccgccgccgcccgacgagtcgcgcgccaaggccgcggcggcgggcggagccctcgccggccctggcgtcggccgcgccgctgggcgcggcgtgcccaccggcccgctgctccaggcagctcctggtcttgctggccctgtgcggggcgtgggtggacccgcccccggcatgatgcagccccagatctcgcgcccgccgatgcccaacctgtcggcccagccggtgtcgtacccgcaggtcgtgcgcccgccgcaggggatgcctccgccaatgcgtcctggaatgccgccgcagatgccgatgcaattccgcccgcctggggcgccgcctgctccgttccctggggcaccgccacaacagtacatgaggggaccgccgccgatggggccgccccaggtgaggcccgggatgccggggccgccaccgcctggaatgaggcctggaatgcctccgccaccattcggacagccgaggcctgggatgccgcctccgccacctggtccacagcagcctggacagaacccgccgcagtagcttcctcttcttgcagatacacctatggaagatttttgtatctcgagagaggatcataatcgcacctggggaggacctgtgaattgcaccaaagcttcaccattctgtctcgcatcagggcagtagtttcctttgggtattgtgacttgtgagggaggagaaccttgccagcgtgtgtaccactcatcctttgatgtgagaagggaccttgtacgtagagaggccaggacttgtattttaactgttggtgttggttatgttaggaaatatggataactggctgcagtcttgttacggtgttgattcatgctctgtttaagcccttgttttctctctctaaaaagtagtctcttgtgtttgttgatgaagcaagataattggtttagagaaaagtttatatatgcatataattattcatccatgttatcatgatgtatgcatacaggtacaggtttgtaaaggtatctgaattctggtcgctgaaa

SEQ ID NO: 27992 - DNA, 886 bp, Zea Mays
atcaaccttggacaccacttctggagcaagctctctgatggaacaaccattaagccatttgtctgtccagaataagagggagaagcaggtcctagcattactttcaaagcttgacgttcagaacgtacattttactgaatcagcaccaggcgatgcaaaccagtcggttcacattgttgctgatgagggtttggaggcgtatctacctttggctgatatggttgacgtgtctgaagaggttaagcggctctccaagcgcctctccaagatgcagtcggagtatgatgctcttgttgcccgactcaattccccaagttttgttgaaaaggcccctgaagatattgttcgcggagttcgtgaaaaagcgtctgaggcagacgagaagatctctctaactaaaaatcgtctcacttttctgcaatcaaccattaccacttaaatacagtaatccacggggactctaccaggatgccattttgatcgatgacgcaggacaaaactgattgttaatagtttttggttgaaggatatgatagattggcaacgaagttgtgccttgtccagcagaaacacacattctttctagttcatatctgttgtctcttgaaacttaaaacatacattcggctaggcatataatttatattcctgacttatggttttagagcctttcgggatgcccttagttgaggtaaattttgttctgcctctgaagttttgctgatgccattgttagtaatattcatattttgtaaggtgggcgcacgttattagatatgaatgatctgtaaggtcggtgcacatgtattatcaatgactattgtttcgggcgtcagtcggtttctgctgattctaaaggaaagagatcataaggaaaatgaaccca

SEQ ID NO: 27993 - DNA, 1191 bp, Zea Mays
gtagctttgggctagaataacataaggtatattgaagctagcaaaacacggctttaccactcgagtgacaagatcgctgctgctacagcccagagtgttctggtgtatgtgtttgaaaacatactgaagttattgcatcccttcatgccattcgtcactgaagaattatggcaggcatttccatacagaaaacaagcacttatggttactccctggcctaccactgaccttcctaaagatttgaggtccatcaaacggttccagaatttgcaatcattgataagaggaatcagaaatgttcgagcagaatattctgttgagccagctaaacggatatcagcttctgttgttgctactgcggatgtcctggaatacgtatcaagggagaagcaggtcctagcattactttcaaagcttgacgttcagaacgtacattttactgaatcagcaccaggcgatgcaaaccagtcggttcacattgttgctgatgagggtttggaggcgtatctacctttggctgatatggttgacgtgtctgaagaggttaagcggctctccaagcgcctctccaagatgcagtcggagtatgatgctcttgttgcccgactcaattccccaagttttgttgaaaaggcccctgaagatattgttcgcggagttcgtgaaaaagcgtctgaggcagacgagaagatctctctaactaaaaatcgtctcacttttctgcaatcaaccattaccacttaaatacagtaatccacggggactctaccaggatgccattttgatcgatgacgcaggacaaaactgattgttaatagtttttggttgaaggatatgatagattggcaacgaagttgtgccttgtccagcagaaacacacattctttctagttcatatctgttgtctcttgaaacttaaaacatacattcggctaggcatataatttatattcctgacttatggttttagagcctttcgggatgcccttagttgaggtaaattttgttctgcctctgaagttttgctgatgccattgttagtaatattcatattttgtaaggtgggcgcacgttattagatatgaatgatctgtaaggtcggtgcacatgtattatcaatgactattgtttcgggcgtcagtcggtttctgctgattctaaaggaaagagatcataaggaaaatgaaccca

SEQ ID NO: 27994 - DNA, 1678 bp, Zea Mays
gatgaacatgttagctcaattggggtcgaaaaatgtcgaagacattagggaatgtcattgatcccctagataccatcaaagagtacgggacagatgctttgagatttacactatctttgggcactgcaggccaggacctcaatctctctacagaaaggttgacgtcaaataaggctttcacaaacaagctgtggaacgcagggaaatttttgttacagaacttgcctgataaaaatgatgtctctgcatgggatgtcttgttgtctaataagttcgactcagaagcatcactccagaaactgccattgccagaatgctgggtggttacaggactacatgaactcatcgataaggtcagcagaagctatgataagtttttcttcggagatgctgctagagaaatatatgattacttctggggggattttgctgattggtatattgaagctagcaaaacacggctttaccactcgagtgacaagatcgctgctgctacagcccagagtgttctggtgtatgtgtttgaaaacatactgaagttattgcatcccttcatgccattcgtcactgaagaattatggcagaaaacaagcacttatggttactccctggcctaccactgaccttcctaaagatttgaggtccatcaaacggttccagaatttgcaatcattggtaaagctttgcacttgaatattacaatctcaattcgagagatgctactgttcattgtagccattttatttgaatgctaacatgacgacagataagaggaatcagaaatgttcgagcagaatattctgttgagccagctaaacggatatcagcttctgttgttgctactgcggatgtcctggaatacgtatcaagggagaagcaggtcctagcattactttcaaagcttgacgttcagaacgtacattttactgaatcagcaccaggcgatgcaaaccagtcggttcacattgttgctgatgagggtttggaggcgtatctacctttggctgatatggttgacgtgtctgaagaggttaagcggctctccaagcgcctctccaagatgcagtcggagtatgatgctcttgttgcccgactcaattccccaagttttgttgaaaaggcccctgaagatattgttcgcggagttcgtgaaaaagcgtctgaggcagacgagaagatctctctaactaaaaatcgtctcacttttctgcaatcaaccattaccacttaaatacagtaatccacggggactctaccaggatgccattttgatcgatgacgcaggacaaaactgattgttaatagtttttggttgaaggatatgatagattggcaacgaagttgtgccttgtccagcagaaacacacattctttctagttcatatctgttgtctcttgaaacttaaaacatacattcggctaggcatataatttatattcctgacttatggttttagagcctttcgggatgcccttagttgaggtaaattttgttctgcctctgaagttttgctgatgccattgttagtaatattcatattttgtaaggtgggcgcacgttattagatatgaatgatctgtaaggtcggtgcacatgtattatcaatgactattgtttcgggcgtcagtcggtttctgctgattctaaaggaaagagatcataaggaaaatgaaccca

SEQ ID NO: 27995 - DNA, 1911 bp, Zea Mays
tgaagaagactatattgttgctagaaccgaagaggaggcgattgcagaagctcatgaaaaatatggaaaatcagttgaaatatatcaagaccctgatgttcttgatacttggttctcaagtgctctgtggcctttcagcacgcttggttggcctgatctttccaaggaggattataagcatttttatccttcaactgttctggagacaggccacgatattttgttcttctgggttgcacgaatggtcatgatgggaattgagttcacaggatcagtaccattttcttatgtctatctacatggtcttatccgggatgctgaggtgcttcccagggtcgaaaaatgtcgaagacattagggaatgtcattgatcccctagataccatcaaagagtacgggacagatgctttgagatttacactatctttgggcactgcaggccaggacctcaatctctctacagaaaggttgacgtcaaataaggctttcacaaacaagctgtggaacgcagggaaatttttgttacagaacttgcctgataaaaatgatgtctctgcatgggatgtcttgttgtctaataagttcgactcagaagcatcactccagaaactgccattgccagaatgctgggtggttacaggactacatgaactcatcgataaggtcagcagaagctatgataagtttttcttcggagatgctgctagagaaatatatgattacttctggggggattttgctgattggtatattgaagctagcaaaacacggctttaccactcgagtgacaagatcgctgctgctacagcccagagtgttctggtgtatgtgtttgaaaacatactgaagttattgcatcccttcatgccattcgtcactgaagaattatggcaggcatttccatacagaaaacaagcacttatggttactccctggcctaccactgaccttcctaaagatttgaggtccatcaaacggttccagaatttgcaatcattgataagaggaatcagaaatgttcgagcagaatattctgttgagccagctaaacggatatcagcttctgttgttgctactgcggatgtcctggaatacgtatcaagggagaagcaggtcctagcattactttcaaagcttgacgttcagaacgtacattttactgaatcagcaccaggcgatgcaaaccagtcggttcacattgttgctgatgagggtttggaggcgtatctacctttggctgatatggttgacgtgtctgaagaggttaagcggctctccaagcgcctctccaagatgcagtcggagtatgatgctcttgttgcccgactcaattccccaagttttgttgaaaaggcccctgaagatattgttcgcggagttcgtgaaaaagcgtctgaggcagacgagaagatctctctaactaaaaatcgtctcacttttctgcaatcaaccattaccacttaaatacagtaatccacggggactctaccaggatgccattttgatcgatgacgcaggacaaaactgattgttaatagtttttggttgaaggatatgatagattggcaacgaagttgtgccttgtccagcagaaacacacattctttctagttcatatctgttgtctcttgaaacttaaaacatacattcggctaggcatataatttatattcctgacttatggttttagagcctttcgggatgcccttagttgaggtaaattttgttctgcctctgaagttttgctgatgccattgttagtaatattcatattttgtaaggtgggcgcacgttattagatatgaatgatctgtaaggtcggtgcacatgtattatcaatgactattgtttcgggcgtcagtcggtttctgctgattctaaaggaaagagatcataaggaaaatgaaccca

SEQ ID NO: 27996 - DNA, 1896 bp, Zea Mays
tgaagaagactatattgttgctagaaccgaagaggaggcgattgcagaagctcatgaaaaatatggaaaatcagttgaaatatatcaagaccctgatgttcttgatacttggttctcaagtgctctgtggcctttcagcacgcttggttggcctgatctttccaaggaggattataagcatttttatccttcaactgttctggagacaggccacgatattttgttcttctgggttgcacgaatggtcatgatgggaattgagttcacaggatcagtaccattttcttatgtctatctacatggtcttatccgggatgctgagggtcgaaaaatgtcgaagacattagggaatgtcattgatcccctagataccatcaaagagtacgggacagatgctttgagatttacactatctttgggcactgcaggccaggacctcaatctctctacagaaaggttgacgtcaaataaggctttcacaaacaagctgtggaacgcagggaaatttttgttacagaacttgcctgataaaaatgatgtctctgcatgggatgtcttgttgtctaataagttcgactcagaagcatcactccagaaactgccattgccagaatgctgggtggttacaggactacatgaactcatcgataaggtcagcagaagctatgataagtttttcttcggagatgctgctagagaaatatatgattacttctggggggattttgctgattggtatattgaagctagcaaaacacggctttaccactcgagtgacaagatcgctgctgctacagcccagagtgttctggtgtatgtgtttgaaaacatactgaagttattgcatcccttcatgccattcgtcactgaagaattatggcatttccatacagaaaacaagcacttatggttactccctggcctaccactgaccttcctaaagatttgaggtccatcaaacggttccagaatttgcaatcattgataagaggaatcagaaatgttcgagcagaatattctgttgagccagctaaacggatatcagcttctgttgttgctactgcggatgtcctggaatacgtatcaagggagaagcaggtcctagcattactttcaaagcttgacgttcagaacgtacattttactgaatcagcaccaggcgatgcaaaccagtcggttcacattgttgctgatgagggtttggaggcgtatctacctttggctgatatggttgacgtgtctgaagaggttaagcggctctccaagcgcctctccaagatgcagtcggagtatgatgctcttgttgcccgactcaattccccaagttttgttgaaaaggcccctgaagatattgttcgcggagttcgtgaaaaagcgtctgaggcagacgagaagatctctctaactaaaaatcgtctcacttttctgcaatcaaccattaccacttaaatacagtaatccacggggactctaccaggatgccattttgatcgatgacgcaggacaaaactgattgttaatagtttttggttgaaggatatgatagattggcaacgaagttgtgccttgtccagcagaaacacacattctttctagttcatatctgttgtctcttgaaacttaaaacatacattcggctaggcatataatttatattcctgacttatggttttagagcctttcgggatgcccttagttgaggtaaattttgttctgcctctgaagttttgctgatgccattgttagtaatattcatattttgtaaggtgggcgcacgttattagatatgaatgatctgtaaggtcggtgcacatgtattatcaatgactattgtttcgggcgtcagtcggtttctgctgattctaaaggaaagagatcataaggaaaatgaaccca

SEQ ID NO: 27997 - DNA, 2332 bp, Zea Mays
gaaagaaatgtgaagaagactatattgttgctagaaccgaagaggaggcgattgcagaagctcatgaaaaatatggaaaatcagttgaaatatatcaagaccctgatgttcttgatacttggttctcaagtgctctgtggcctttcagcacgcttggttggcctgatctttccaaggaggattataagcatttttatccttcaactgttctggagacaggccacgatattttgttcttctgggttgcacgaatggtcatgatgggaattgagttcacaggatcagtaccattttcttatgtctatctacatggtcttatccgggatgctgagggtcgaaaaatgtcgaagacattagggaatgtcattgatcccctagataccatcaaagagtacgggacagatgctttgagatttacactatctttgggcactgcaggccaggacctcaatctctctacagaaaggttgacgtcaaataaggctttcacaaacaagctgtggaacgcagggaaatttttgttacagaacttgcctgataaaaatgatgtctctgcatgggatgtcttgttgtctaataagttcgactcagaagcatcactccagaaactgccattgccagaatgctgggtggttacaggactacatgaactcatcgataaggtcagcagaagctatgataagtttttcttcggagatgctgctagagaaatatatgattacttctggggggattttgctgattggtatattgaagctagcaaaacacggctttaccactcgagtgacaagatcgctgctgctacagcccagagtgttctggtgtatgtgtttgaaaacatactgaagttattgcatcccttcatgccattcgtcactgaagaattatggcaggcatttccatacagaaaacaagcacttatggttactccctggcctaccactgaccttcctaaagatttgaggtccatcaaacggttccagaatttgcaatcattggagaactgcgcatcttatataaaagagaggaagaaaagccatacaaaagatggcatcttgctgagcaagttccccaaggatcctacacacaaccgtaggacattacaaaccggaaccaagacttgaccctacctcgctaagagctgcaactaagcctaggtgctttagctcttcagctcctgccatagcccagctagtacattcatccaggaaccttcgaagaattctagataatgagggggactccccttcaaacactgttctgtttctctggatccatagacaccaagctcccaggaggccaggatgatcaaggagttaagcccctttttcatgttcttggaaaccctgaggctcattcttctccaccattctgcaaaagactcctcgtcagctgtaggagtgaggtgtcccaagccaagagcagaaagaattttgtgccaaaatcgccgagcaaagatgcaagcagaaagaaggtgctgaattgtctcctgggcttgatcacacatggggcaaacatccggagggagaagcaggtcctagcattactttcaaagcttgacgttcagaacgtacattttactgaatcagcaccaggcgatgcaaaccagtcggttcacattgttgctgatgagggtttggaggcgtatctacctttggctgatatggttgacgtgtctgaagaggttaagcggctctccaagcgcctctccaagatgcagtcggagtatgatgctcttgttgcccgactcaattccccaagttttgttgaaaaggcccctgaagatattgttcgcggagttcgtgaaaaagcgtctgaggcagacgagaagatctctctaactaaaaatcgtctcacttttctgcaatcaaccattaccacttaaatacagtaatccacggggactctaccaggatgccattttgatcgatgacgcaggacaaaactgattgttaatagtttttggttgaaggatatgatagattggcaacgaagttgtgccttgtccagcagaaacacacattctttctagttcatatctgttgtctcttgaaacttaaaacatacattcggctaggcatataatttatattcctgacttatggttttagagcctttcgggatgcccttagttgaggtaaattttgttctgcctctgaagttttgctgatgccattgttagtaatattcatattttgtaaggtgggcgcacgttattagatatgaatgatctgtaaggtcggtgcacatgtattatcaatgactattgtttcgggcgtcagtcggtttctgctgattctaaaggaaagagatcataaggaaaatgaaccca

SEQ ID NO: 27998 - DNA, 2129 bp, Zea Mays
tattgttggaaagaaatgtgaagaagactatattgttgctagaaccgaagaggaggcgattgcagaagctcatgaaaaatatggaaaatcagttgaaatatatcaagaccctgatgttcttgatacttggttctcaagtgctctgtggcctttcagcacgcttggttggcctgatctttccaaggaggattataagcatttttatccttcaactgttctggagacaggccacgatattttgttcttctgggttgcacgaatggtcatgatgggaattgagttcacaggatcagtaccattttcttatgtctatctacatggtcttatccgggatgctgagggtcgaaaaatgtcgaagacattagggaatgtcattgatcccctagataccatcaaagagtacgggacagatgctttgagatttacactatctttgggcactgcaggccaggacctcaatctctctacagaaaggttgacgtcaaataaggctttcacaaacaagctgtggaacgcagggaaatttttgttacagaacttgcctgataaaaatgatgtctctgcatgggatgtcttgttgtctaataagttcgactcagaagcatcactccagaaactgccattgccagaatgctgggtggttacaggactacatgaactcatcgataaggtcagcagaagctatgataagtttttcttcggagatgctgctagagaaatatatgattacttctggggggattttgctgattggtatattgaagctagcaaaacacggctttaccactcgagtgacaagatcgctgctgctacagcccagagtgttctggtgtatgtgtttgaaaacatactgaagttattgcatcccttcatgccattcgtcactgaagaattatggcaggcatttccatacagaaaacaagcacttatggttactccctggcctaccactgaccttcctaaagatttgaggtccatcaaacggttccagaatttgcaatcattgataagaggaatcagaaatgttcgagcagaatattctgttgagccagctaaacggatatcagcttctgttgttgctactgcggatgtcctggaatacgtatcagtaagtgtgcagatccattttgttagtgacactttttttctcgaatgcgcaggagaactgcgcatcttatataaaagagaggaagaaaagccatacaaaagatggcatcttgctgagcaagttccccaaggatcctacacacaaccgtaggacattacaaaccggaaccaagacttgaccctacctcgctaagagctgcaactaagcctagagggagaagcaggtcctagcattactttcaaagcttgacgttcagaacgtacattttactgaatcagcaccaggcgatgcaaaccagtcggttcacattgttgctgatgagggtttggaggcgtatctacctttggctgatatggttgacgtgtctgaagaggttaagcggctctccaagcgcctctccaagatgcagtcggagtatgatgctcttgttgcccgactcaattccccaagttttgttgaaaaggcccctgaagatattgttcgcggagttcgtgaaaaagcgtctgaggcagacgagaagatctctctaactaaaaatcgtctcacttttctgcaatcaaccattaccacttaaatacagtaatccacggggactctaccaggatgccattttgatcgatgacgcaggacaaaactgattgttaatagtttttggttgaaggatatgatagattggcaacgaagttgtgccttgtccagcagaaacacacattctttctagttcatatctgttgtctcttgaaacttaaaacatacattcggctaggcatataatttatattcctgacttatggttttagagcctttcgggatgcccttagttgaggtaaattttgttctgcctctgaagttttgctgatgccattgttagtaatattcatattttgtaaggtgggcgcacgttattagatatgaatgatctgtaaggtcggtgcacatgtattatcaatgactattgtttcgggcgtcagtcggtttctgctgattctaaaggaaagagatcataaggaaaatgaaccca

SEQ ID NO: 27999 - DNA, 1816 bp, Zea Mays
tattgttggaaagaaatgtgaagaagactatattgttgctagaaccgaagaggaggcgattgcagaagctcatgaaaaatatggaaaatcagttgaaatatatcaagaccctgatgttcttgatacttggttctcaagtgctctgtggcctttcagcacgcttggttggcctgatctttccaaggaggattataagcatttttatccttcaactgttctggagacaggccacgatattttgttcttctgggttgcacgaatggtcatgatgggaattgagttcacaggatcagtaccattttcttatgtctatctacatggtcttatccgggatgctgagggtcgaaaaatgtcgaagacattagggaatgtcattgatcccctagataccatcaaagagtacgggacagatgctttgagatttacactatctttgggcactgcaggccagaaaggttgacgtcaaataaggctttcacaaacaagctgtggaacgcagggaaatttttgttacagaacttgcctgataaaaatgatgtctctgcatgggatgtcttgttgtctaataagttcgactcagaagcatcactccagaaactgccattgccagaatgctgggtggttacaggactacatgaactcatcgataaggtatattgaagctagcaaaacacggctttaccactcgagtgacaagatcgctgctgctacagcccagagtgttctggtgtatgtgtttgaaaacatactgaagttattgcatcccttcatgccattcgtcactgaagaattatggcaggcatttccatacagaaaacaagcacttatggttactccctggcctaccactgaccttcctaaagatttgaggtccatcaaacggttccagaatttgcaatcattgataagaggaatcagaaatgttcgagcagaatattctgttgagccagctaaacggatatcagcttctgttgttgctactgcggatgtcctggaatacgtatcaagggagaagcaggtcctagcattactttcaaagcttgacgttcagaacgtacattttactgaatcagcaccaggcgatgcaaaccagtcggttcacattgttgctgatgagggtttggaggcgtatctacctttggctgatatggttgacgtgtctgaagaggttaagcggctctccaagcgcctctccaagatgcagtcggagtatgatgctcttgttgcccgactcaattccccaagttttgttgaaaaggcccctgaagatattgttcgcggagttcgtgaaaaagcgtctgaggcagacgagaagatctctctaactaaaaatcgtctcacttttctgcaatcaaccattaccacttaaatacagtaatccacggggactctaccaggatgccattttgatcgatgacgcaggacaaaactgattgttaatagtttttggttgaaggatatgatagattggcaacgaagttgtgccttgtccagcagaaacacacattctttctagttcatatctgttgtctcttgaaacttaaaacatacattcggctaggcatataatttatattcctgacttatggttttagagcctttcgggatgcccttagttgaggtaaattttgttctgcctctgaagttttgctgatgccattgttagtaatattcatattttgtaaggtgggcgcacgttattagatatgaatgatctgtaaggtcggtgcacatgtattatcaatgactattgtttcgggcgtcagtcggtttctgctgattctaaaggaaagagatcataaggaaaatgaaccca

SEQ ID NO: 28000 - DNA, 1850 bp, Zea Mays
ggtatattgttggaaagaaatgtgaagaagactatattgttgctagaaccgaagaggaggcgattgcagaagctcatgaaaaatatggaaaatcagttgaaatatatcaagaccctgatgttcttgatacttggttctcaagtgctctgtggcctttcagcacgcttggttggcctgatctttccaaggaggattataagcatttttatccttcaactgttctggagacaggccacgatattttgttcttctgggttgcacgaatggtcatgatgggaattgagttcacaggatcagtaccattttcttatgtctatctacatggtcttatccgggatgctgaggtgcttcccagggtcgaaaaatgtcgaagacattagggaatgtcattgatcccctagataccatcaaagagtacgggacagatgctttgagatttacactatctttgggcactgcaggccaggacctcaatctctctacagaaaggttgacgtcaaataaggctttcacaaacaagctgtggaacgcagggaaatttttgttacagaacttgcctgataaaaatgatgtctctgcatgggatgtcttgttgtctaataagttcgactcagaagcatcactccagaaactgccattgccagaatgctgggtggttacaggactacatgaactcatcgataaggtatattgaagctagcaaaacacggctttaccactcgagtgacaagatcgctgctgctacagcccagagtgttctggtgtatgtgtttgaaaacatactgaagttattgcatcccttcatgccattcgtcactgaagaattatggcaggcatttccatacagaaaacaagcacttatggttactccctggcctaccactgaccttcctaaagatttgaggtccatcaaacggttccagaatttgcaatcattgataagaggaatcagaaatgttcgagcagaatattctgttgagccagctaaacggatatcagcttctgttgttgctactgcggatgtcctggaatacgtatcaagggagaagcaggtcctagcattactttcaaagcttgacgttcagaacgtacattttactgaatcagcaccaggcgatgcaaaccagtcggttcacattgttgctgatgagggtttggaggcgtatctacctttggctgatatggttgacgtgtctgaagaggttaagcggctctccaagcgcctctccaagatgcagtcggagtatgatgctcttgttgcccgactcaattccccaagttttgttgaaaaggcccctgaagatattgttcgcggagttcgtgaaaaagcgtctgaggcagacgagaagatctctctaactaaaaatcgtctcacttttctgcaatcaaccattaccacttaaatacagtaatccacggggactctaccaggatgccattttgatcgatgacgcaggacaaaactgattgttaatagtttttggttgaaggatatgatagattggcaacgaagttgtgccttgtccagcagaaacacacattctttctagttcatatctgttgtctcttgaaacttaaaacatacattcggctaggcatataatttatattcctgacttatggttttagagcctttcgggatgcccttagttgaggtaaattttgttctgcctctgaagttttgctgatgccattgttagtaatattcatattttgtaaggtgggcgcacgttattagatatgaatgatctgtaaggtcggtgcacatgtattatcaatgactattgtttcgggcgtcagtcggtttctgctgattctaaaggaaagagatcataaggaaaatgaaccca

SEQ ID NO: 28001 - DNA, 1822 bp, Zea Mays
ttggtatattgttggaaagaaatgtgaagaagactatattgttgctagaaccgaagaggaggcgattgcagaagctcatgaaaaatatggaaaatcagttgaaatatatcaagaccctgatgttcttgatacttggttctcaagtgctctgtggcctttcagcacgcttggttggcctgatctttccaaggaggattataagcatttttatccttcaactgttctggagacaggccacgatattttgttcttctgggttgcacgaatggtcatgatgggaattgagttcacaggatcagtaccattttcttatgtctatctacatggtcttatccgggatgctgagggtcgaaaaatgtcgaagacattagggaatgtcattgatcccctagataccatcaaagagtacgggacagatgctttgagatttacactatctttgggcactgcaggccaggacctcaatctctctacagaaaggttgacgtcaaataaggctttcacaaacaagctgtggaacgcagggaaatttttgttacagaacttgcctgataaaaatgatgtctctgcatgggatgtcttgttgtctaataagttcgactcagaagcatcactccagaaactgccattgccagaatgctgggtggttacaggactacatgaactcatcgataaggtcagcagaagctatgataagtttttcttcggagatgctgctagagaaatatatgattacttctggggggattttgctgattggtatattgaagctagcaaaacacggctttaccactcgagtgacaagatcgctgctgctacagcccagagtgttctggtgtatgtgtttgaaaacatactgaagttattgcatcccttcatgccattcgtcactgaagaattatggcaggcatttccatacagaaaacaagcacttatggttactccctggcctaccactgaccttcctaaagatttgaggtccatcaaacggttccagaatttgcaatcattgagggagaagcaggtcctagcattactttcaaagcttgacgttcagaacgtacattttactgaatcagcaccaggcgatgcaaaccagtcggttcacattgttgctgatgagggtttggaggcgtatctacctttggctgatatggttgacgtgtctgaagaggttaagcggctctccaagcgcctctccaagatgcagtcggagtatgatgctcttgttgcccgactcaattccccaagttttgttgaaaaggcccctgaagatattgttcgcggagttcgtgaaaaagcgtctgaggcagacgagaagatctctctaactaaaaatcgtctcacttttctgcaatcaaccattaccacttaaatacagtaatccacggggactctaccaggatgccattttgatcgatgacgcaggacaaaactgattgttaatagtttttggttgaaggatatgatagattggcaacgaagttgtgccttgtccagcagaaacacacattctttctagttcatatctgttgtctcttgaaacttaaaacatacattcggctaggcatataatttatattcctgacttatggttttagagcctttcgggatgcccttagttgaggtaaattttgttctgcctctgaagttttgctgatgccattgttagtaatattcatattttgtaaggtgggcgcacgttattagatatgaatgatctgtaaggtcggtgcacatgtattatcaatgactattgtttcgggcgtcagtcggtttctgctgattctaaaggaaagagatcataaggaaaatgaaccca

SEQ ID NO: 28002 - DNA, 2002 bp, Zea Mays
gtttggtatattgttggaaagaaatgtgaagaagactatattgttgctagaaccgaagaggaggcgattgcagaagctcatgaaaaatatggaaaatcagttgaaatatatcaagaccctgatgttcttgatacttggttctcaagtgctctgtggcctttcagcacgcttggttggcctgatctttccaaggaggattataagcatttttatccttcaactgttctggagacaggccacgatattttgttcttctgggttgcacgaatggtcatgatgggaattgagttcacaggatcagtaccattttcttatgtctatctacatggtcttatccgggatgctgagatcaatagggtaggcccttgtgaaatccagcaagtctcaatctcatttatcctgatgaacatgttagctcaattggggtcgaaaaatgtcgaagacattagggaatgtcattgatcccctagataccatcaaagagtacgggacagatgctttgagatttacactatctttgggcactgcaggccaggacctcaatctctctacagaaaggttgacgtcaaataaggctttcacaaacaagctgtggaacgcagggaaatttttgttacagaacttgcctgataaaaatgatgtctctgcatgggatgtcttgttgtctaataagttcgactcagaagcatcactccagaaactgccattgccagaatgctgggtggttacaggactacatgaactcatcgataaggtcagcagaagctatgataagtttttcttcggagatgctgctagagaaatatatgattacttctggggggattttgctgattggtatattgaagctagcaaaacacggctttaccactcgagtgacaagatcgctgctgctacagcccagagtgttctggtgtatgtgtttgaaaacatactgaagttattgcatcccttcatgccattcgtcactgaagaattatggcaggcatttccatacagaaaacaagcacttatggttactccctggcctaccactgaccttcctaaagatttgaggtccatcaaacggttccagaatttgcaatcattgataagaggaatcagaaatgttcgagcagaatattctgttgagccagctaaacggatatcagcttctgttgttgctactgcggatgtcctggaatacgtatcaagggagaagcaggtcctagcattactttcaaagcttgacgttcagaacgtacattttactgaatcagcaccaggcgatgcaaaccagtcggttcacattgttgctgatgagggtttggaggcgtatctacctttggctgatatggttgacgtgtctgaagaggttaagcggctctccaagcgcctctccaagatgcagtcggagtatgatgctcttgttgcccgactcaattccccaagttttgttgaaaaggcccctgaagatattgttcgcggagttcgtgaaaaagcgtctgaggcagacgagaagatctctctaactaaaaatcgtctcacttttctgcaatcaaccattaccacttaaatacagtaatccacggggactctaccaggatgccattttgatcgatgacgcaggacaaaactgattgttaatagtttttggttgaaggatatgatagattggcaacgaagttgtgccttgtccagcagaaacacacattctttctagttcatatctgttgtctcttgaaacttaaaacatacattcggctaggcatataatttatattcctgacttatggttttagagcctttcgggatgcccttagttgaggtaaattttgttctgcctctgaagttttgctgatgccattgttagtaatattcatattttgtaaggtgggcgcacgttattagatatgaatgatctgtaaggtcggtgcacatgtattatcaatgactattgtttcgggcgtcagtcggtttctgctgattctaaaggaaagagatcataaggaaaatgaaccca

SEQ ID NO: 28003 - DNA, 1843 bp, Zea Mays
gtttggtatattgttggaaagaaatgtgaagaagactatattgttgctagaaccgaagaggaggcgattgcagaagctcatgaaaaatatggaaaatcagttgaaatatatcaagaccctgatgttcttgatacttggttctcaagtgctctgtggcctttcagcacgcttggttggcctgatctttccaaggaggattataagcatttttatccttcaactgttctggagacaggccacgatattttgttcttctgggttgcacgaatggtcatgatgggaattgagttcacaggatcagtaccattttcttatgtctatctacatggtcttatccgggatgctgagggtcgaaaaatgtcgaagacattagggaatgtcattgatcccctagataccatcaaagagtacgggacagatgctttgagatttacactatctttgggcactgcaggccaggacctcaatctctctacagaaaggttgacgtcaaataaggctttcacaaacaagctgtggaacgcagggaaatttttgttacagaacttgcctgataaaaatgatgtctctgcatgggatgtcttgttgtctaataagttcgactcagaagcatcactccagaaactgccattgccagaatgctgggtggttacaggactacatgaactcatcgataaggtatattgaagctagcaaaacacggctttaccactcgagtgacaagatcgctgctgctacagcccagagtgttctggtgtatgtgtttgaaaacatactgaagttattgcatcccttcatgccattcgtcactgaagaattatggcaggcatttccatacagaaaacaagcacttatggttactccctggcctaccactgaccttcctaaagatttgaggtccatcaaacggttccagaatttgcaatcattgataagaggaatcagaaatgttcgagcagaatattctgttgagccagctaaacggatatcagcttctgttgttgctactgcggatgtcctggaatacgtatcaagggagaagcaggtcctagcattactttcaaagcttgacgttcagaacgtacattttactgaatcagcaccaggcgatgcaaaccagtcggttcacattgttgctgatgagggtttggaggcgtatctacctttggctgatatggttgacgtgtctgaagaggttaagcggctctccaagcgcctctccaagatgcagtcggagtatgatgctcttgttgcccgactcaattccccaagttttgttgaaaaggcccctgaagatattgttcgcggagttcgtgaaaaagcgtctgaggcagacgagaagatctctctaactaaaaatcgtctcacttttctgcaatcaaccattaccacttaaatacagtaatccacggggactctaccaggatgccattttgatcgatgacgcaggacaaaactgattgttaatagtttttggttgaaggatatgatagattggcaacgaagttgtgccttgtccagcagaaacacacattctttctagttcatatctgttgtctcttgaaacttaaaacatacattcggctaggcatataatttatattcctgacttatggttttagagcctttcgggatgcccttagttgaggtaaattttgttctgcctctgaagttttgctgatgccattgttagtaatattcatattttgtaaggtgggcgcacgttattagatatgaatgatctgtaaggtcggtgcacatgtattatcaatgactattgtttcgggcgtcagtcggtttctgctgattctaaaggaaagagatcataaggaaaatgaaccca

SEQ ID NO: 28004 - DNA, 1907 bp, Zea Mays
gtttggtatattgttggaaagaaatgtgaagaagactatattgttgctagaaccgaagaggaggcgattgcagaagctcatgaaaaatatggaaaatcagttgaaatatatcaagaccctgatgttcttgatacttggttctcaagtgctctgtggcctttcagcacgcttggttggcctgatctttccaaggaggattataagcatttttatccttcaactgttctggagacaggccacgatattttgttcttctgggttgcacgaatggtcatgatgggaattgagttcacaggatcagtaccattttcttatgtctatctacatggtcttatccgggatgctgagggtcgaaaaatgtcgaagacattagggaatgtcattgatcccctagataccatcaaagagtacgggacagatgctttgagatttacactatctttgggcactgcaggccagaaaggttgacgtcaaataaggctttcacaaacaagctgtggaacgcagggaaatttttgttacagaacttgcctgataaaaatgatgtctctgcatgggatgtcttgttgtctaataagttcgactcagaagcatcactccagaaactgccattgccagaatgctgggtggttacaggactacatgaactcatcgataaggtcagcagaagctatgataagtttttcttcggagatgctgctagagaaatatatgattacttctggggggattttgctgattggtatattgaagctagcaaaacacggctttaccactcgagtgacaagatcgctgctgctacagcccagagtgttctggtgtatgtgtttgaaaacatactgaagttattgcatcccttcatgccattcgtcactgaagaattatggcaggcatttccatacagaaaacaagcacttatggttactccctggcctaccactgaccttcctaaagatttgaggtccatcaaacggttccagaatttgcaatcattgataagaggaatcagaaatgttcgagcagaatattctgttgagccagctaaacggatatcagcttctgttgttgctactgcggatgtcctggaatacgtatcaagggagaagcaggtcctagcattactttcaaagcttgacgttcagaacgtacattttactgaatcagcaccaggcgatgcaaaccagtcggttcacattgttgctgatgagggtttggaggcgtatctacctttggctgatatggttgacgtgtctgaagaggttaagcggctctccaagcgcctctccaagatgcagtcggagtatgatgctcttgttgcccgactcaattccccaagttttgttgaaaaggcccctgaagatattgttcgcggagttcgtgaaaaagcgtctgaggcagacgagaagatctctctaactaaaaatcgtctcacttttctgcaatcaaccattaccacttaaatacagtaatccacggggactctaccaggatgccattttgatcgatgacgcaggacaaaactgattgttaatagtttttggttgaaggatatgatagattggcaacgaagttgtgccttgtccagcagaaacacacattctttctagttcatatctgttgtctcttgaaacttaaaacatacattcggctaggcatataatttatattcctgacttatggttttagagcctttcgggatgcccttagttgaggtaaattttgttctgcctctgaagttttgctgatgccattgttagtaatattcatattttgtaaggtgggcgcacgttattagatatgaatgatctgtaaggtcggtgcacatgtattatcaatgactattgtttcgggcgtcagtcggtttctgctgattctaaaggaaagagatcataaggaaaatgaaccca

SEQ ID NO: 28005 - DNA, 2503 bp, Zea Mays
agtttggtatattgttggaaagaaatgtgaagaagactatattgttgctagaaccgaagaggaggcgattgcagaagctcatgaaaaatatggaaaatcagttgaaatatatcaagaccctgatgttcttgatacttggttctcaagtgctctgtggcctttcagcacgcttggttggcctgatctttccaaggaggattataagcatttttatccttcaactgttctggagacaggccacgatattttgttcttctgggttgcacgaatggtcatgatgggaattgagttcacaggatcagtaccattttcttatgtctatctacatggtcttatccgggatgctgagggtcgaaaaatgtcgaagacattagggaatgtcattgatcccctagataccatcaaagagtacgggacagatgctttgagatttacactatctttgggcactgcaggccaggacctcaatctctctacagaaaggttgacgtcaaataaggctttcacaaacaagctgtggaacgcagggaaatttttgttacagaacttgcctgataaaaatgatgtctctgcatgggatgtcttgttgtctaataagttcgactcagaagcatcactccagaaactgccattgccagaatgctgggtggttacaggactacatgaactcatcgataaggtcagcagaagctatgataagtttttcttcggagatgctgctagagaaatatatgattacttctggggggattttgctgattggtatattgaagctagcaaaacacggctttaccactcgagtgacaagatcgctgctgctacagcccagagtgttctggtgtatgtgtttgaaaacatactgaagttattgcatcccttcatgccattcgtcactgaagaattatggcaggcatttccatacagaaaacaagcacttatggttactccctggcctaccactgaccttcctaaagatttgaggtccatcaaacggttccagaatttgcaatcattgataagaggaatcagaaatgttcgagcagaatattctgttgagccagctaaacggatatcagcttctgttgttgctactgcggatgtcctggaatacgtatcagtaagtgtgcagatccattttgttagtgacactttttttctcgaatgcgcaggagaactgcgcatcttatataaaagagaggaagaaaagccatacaaaagatggcatcttgctgagcaagttccccaaggatcctacacacaaccgtaggacattacaaaccggaaccaagacttgaccctacctcgctaagagctgcaactaagcctaggtgctttagctcttcagctcctgccatagcccagctagtacattcatccaggaaccttcgaagaattctagataatgagggggactccccttcaaacactgttctgtttctctggatccatagacaccaagctcccaggaggccaggatgatcaaggagttaagcccctttttcatgttcttggaaaccctgaggctcattcttctccaccattctgcaaaagactcctcgtcagctgtaggagtgaggtgtcccaagccaagagcagaaagaattttgtgccaaaatcgccgagcaaagatgcaagcagaaagaaggtgctgaattgtctcctgggcttgatcacacatggggcaaacatccggagggagaagcaggtcctagcattactttcaaagcttgacgttcagaacgtacattttactgaatcagcaccaggcgatgcaaaccagtcggttcacattgttgctgatgagggtttggaggcgtatctacctttggctgatatggttgacgtgtctgaagaggttaagcggctctccaagcgcctctccaagatgcagtcggagtatgatgctcttgttgcccgactcaattccccaagttttgttgaaaaggcccctgaagatattgttcgcggagttcgtgaaaaagcgtctgaggcagacgagaagatctctctaactaaaaatcgtctcacttttctgcaatcaaccattaccacttaaatacagtaatccacggggactctaccaggatgccattttgatcgatgacgcaggacaaaactgattgttaatagtttttggttgaaggatatgatagattggcaacgaagttgtgccttgtccagcagaaacacacattctttctagttcatatctgttgtctcttgaaacttaaaacatacattcggctaggcatataatttatattcctgacttatggttttagagcctttcgggatgcccttagttgaggtaaattttgttctgcctctgaagttttgctgatgccattgttagtaatattcatattttgtaaggtgggcgcacgttattagatatgaatgatctgtaaggtcggtgcacatgtattatcaatgactattgtttcgggcgtcagtcggtttctgctgattctaaaggaaagagatcataaggaaaatgaaccca

SEQ ID NO: 28006 - DNA, 1913 bp, Zea Mays
agtttggtatattgttggaaagaaatgtgaagaagactatattgttgctagaaccgaagaggaggcgattgcagaagctcatgaaaaatatggaaaatcagttgaaatatatcaagaccctgatgttcttgatacttggttctcaagtgctctgtggcctttcagcacgcttggttggcctgatctttccaaggaggattataagcatttttatccttcaactgttctggagacaggccacgatattttgttcttctgggttgcacgaatggtcatgatgggaattgagttcacaggatcagtaccattttcttatgtctatctacatggtcttatccgggatgctgagggtcgaaaaatgtcgaagacattagggaatgtcattgatcccctagataccatcaaagagtacgggacagatgctttgagatttacactatctttgggcactgcaggccaggacctcaatctctctacagaaaggttgacgtcaaataaggctttcacaaacaagctgtggaacgcagggaaatttttgttacagaacttgcctgataaaaatgatgtctctgcatgggatgtcttgttgtctaataagttcgactcagaagcatcactccagaaactgccattgccagaatgctgggtggttacaggactacatgaactcatcgataaggtcagcagaagctatgataagtttttcttcggagatgctgctagagaaatatatgattacttctggggggattttgctgattggtatattgaagctagcaaaacacggctttaccactcgagtgacaagatcgctgctgctacagcccagagtgttctggtgtatgtgtttgaaaacatactgaagttattgcatcccttcatgccattcgtcactgaagaattatggcagaaaacaagcacttatggttactccctggcctaccactgaccttcctaaagatttgaggtccatcaaacggttccagaatttgcaatcattgataagaggaatcagaaatgttcgagcagaatattctgttgagccagctaaacggatatcagcttctgttgttgctactgcggatgtcctggaatacgtatcaagggagaagcaggtcctagcattactttcaaagcttgacgttcagaacgtacattttactgaatcagcaccaggcgatgcaaaccagtcggttcacattgttgctgatgagggtttggaggcgtatctacctttggctgatatggttgacgtgtctgaagaggttaagcggctctccaagcgcctctccaagatgcagtcggagtatgatgctcttgttgcccgactcaattccccaagttttgttgaaaaggcccctgaagatattgttcgcggagttcgtgaaaaagcgtctgaggcagacgagaagatctctctaactaaaaatcgtctcacttttctgcaatcaaccattaccacttaaatacagtaatccacggggactctaccaggatgccattttgatcgatgacgcaggacaaaactgattgttaatagtttttggttgaaggatatgatagattggcaacgaagttgtgccttgtccagcagaaacacacattctttctagttcatatctgttgtctcttgaaacttaaaacatacattcggctaggcatataatttatattcctgacttatggttttagagcctttcgggatgcccttagttgaggtaaattttgttctgcctctgaagttttgctgatgccattgttagtaatattcatattttgtaaggtgggcgcacgttattagatatgaatgatctgtaaggtcggtgcacatgtattatcaatgactattgtttcgggcgtcagtcggtttctgctgattctaaaggaaagagatcataaggaaaatgaaccca

SEQ ID NO: 28007 - DNA, 1259 bp, Zea Mays
gaagactatattgttgctagaaccgaagaggaggcgattgcagaagctcatgaaaaatatggaaaatcagttgaaatatatcaagaccctgatgttcttgatacttggttctcaagtgctctgtggcctttcagcacgcttggttggcctgatctttccaaggaggattataagcatttttatccttcaactgttctggagacaggccacgatattttgttcttctgggttgcacgaatggtcatgatgggaattgagttcacaggatcagtaccattttcttatgtctatctacatggtcttatccgggatgctgagggtcgaaaaatgtcgaagacattagggaatgtcattgatcccctagataccatcaaagagtacgggacagatgctttgagatttacactatctttgggcactgcaggccaggacctcaatctctctacagaaaggttgacgtcaaataaggctttcacaaacaagctgtggaacgcagggaaatttttgttacagaacttgcctgataaaaatgatgtctctgcatgggatgtcttgttgtctaataagttcgactcagaagcatcactccagaaactgccattgccagaatgctgggtggttacaggactacatgaactcatcgataaggtatattgaagctagcaaaacacggctttaccactcgagtgacaagatcgctgctgctacagcccagagtgttctggtgtatgtgtttgaaaacatactgaagttattgcatcccttcatgccattcgtcactgaagaattatggcaggcatttccatacagaaaacaagcacttatggttactccctggcctaccactgaccttcctaaagatttgaggtccatcaaacggttccagaatttgcaatcattggagaactgcgcatcttatataaaagagaggaagaaaagccatacaaaagatggcatcttgctgagcaagttccccaaggatcctacacacaaccgtaggacattacaaaccggaaccaagacttgaccctacctcgctaagagctgcaactaagcctaggtgctttagctcttcagctcctgccatagcccagctagtacattcatccaggaaccttcgaagaattctagataatgagggggactccccttcaaacactgttctgtttctctggatccatagacaccaagctcccaggaggccaggatgatcaaggagttaagcccctttttcatgttcttggaaaccctgaggctca

SEQ ID NO: 28008 - DNA, 1481 bp, Zea Mays
tgaagaagactatattgttgctagaaccgaagaggaggcgattgcagaagctcatgaaaaatatggaaaatcagttgaaatatatcaagaccctgatgttcttgatacttggttctcaagtgctctgtggcctttcagcacgcttggttggcctgatctttccaaggaggattataagcatttttatccttcaactgttctggagacaggccacgatattttgttcttctgggttgcacgaatggtcatgatgggaattgagttcacaggatcagtaccattttcttatgtctatctacatggtcttatccgggatgctgagggtcgaaaaatgtcgaagacattagggaatgtcattgatcccctagataccatcaaagagtacgggacagatgctttgagatttacactatctttgggcactgcaggccagaaaggttgacgtcaaataaggctttcacaaacaagctgtggaacgcagggaaatttttgttacagaacttgcctgataaaaatgatgtctctgcatgggatgtcttgttgtctaataagttcgactcagaagcatcactccagaaactgccattgccagaatgctgggtggttacaggactacatgaactcatcgataaggtcagcagaagctatgataagtttttcttcggagatgctgctagagaaatatatgattacttctggggggattttgctgattggtatattgaagctagcaaaacacggctttaccactcgagtgacaagatcgctgctgctacagcccagagtgttctggtgtatgtgtttgaaaacatactgaagttattgcatcccttcatgccattcgtcactgaagaattatggcaggcatttccatacagaaaacaagcacttatggttactccctggcctaccactgaccttcctaaagatttgaggtccatcaaacggttccagaatttgcaatcattgataagaggaatcagaaatgttcgagcagaatattctgttgagccagctaaacggatatcagcttctgttgttgctactgcggatgtcctggaatacgtatcagtaagtgtgcagatccattttgttagtgacactttttttctcgaatgcgcaggagaactgcgcatcttatataaaagagaggaagaaaagccatacaaaagatggcatcttgctgagcaagttccccaaggatcctacacacaaccgtaggacattacaaaccggaaccaagacttgaccctacctcgctaagagctgcaactaagcctaggtgctttagctcttcagctcctgccatagcccagctagtacattcatccaggaaccttcgaagaattctagataatgagggggactccccttcaaacactgttctgtttctctggatccatagacaccaagctcccaggaggccaggatgatcaaggagttaagcccctttttcatgttcttggaaaccctgaggctca

SEQ ID NO: 28009 - DNA, 1271 bp, Zea Mays
agtttggtatattgttggaaagaaatgtgaagaagactatattgttgctagaaccgaagaggaggcgattgcagaagctcatgaaaaatatggaaaatcagttgaaatatatcaagaccctgatgttcttgatacttggttctcaagtgctctgtggcctttcagcacgcttggttggcctgatctttccaaggaggattataagcatttttatccttcaactgttctggagacaggccacgatattttgttcttctgggttgcacgaatggtcatgatgggaattgagttcacaggatcagtaccattttcttatgtctatctacatggtcttatccgggatgctgagggtcgaaaaatgtcgaagacattagggaatgtcattgatcccctagataccatcaaagagtacgggacagatgctttgagatttacactatctttgggcactgcaggccagaaaggttgacgtcaaataaggctttcacaaacaagctgtggaacgcagggaaatttttgttacagaacttgcctgataaaaatgatgtctctgcatgggatgtcttgttgtctaataagttcgactcagaagcatcactccagaaactgccattgccagaatgctgggtggttacaggactacatgaactcatcgataaggtatattgaagctagcaaaacacggctttaccactcgagtgacaagatcgctgctgctacagcccagagtgttctggtgtatgtgtttgaaaacatactgaagttattgcatcccttcatgccattcgtcactgaagaattatggcaggcatttccatacagaaaacaagcacttatggttactccctggcctaccactgaccttcctaaagatttgaggtccatcaaacggttccagaatttgcaatcattggagaactgcgcatcttatataaaagagaggaagaaaagccatacaaaagatggcatcttgctgagcaagttccccaaggatcctacacacaaccgtaggacattacaaaccggaaccaagacttgaccctacctcgctaagagctgcaactaagcctaggtgctttagctcttcagctcctgccatagcccagctagtacattcatccaggaaccttcgaagaattctagataatgagggggactccccttcaaacactgttctgtttctctggatccatagacaccaagctcccaggaggccaggatgatcaaggagttaagcccctttttcatgttcttggaaaccctgaggctca

SEQ ID NO: 28010 - DNA, 1736 bp, Zea Mays
ctgctcaggctgctcagcaccacactcccgcggtgccgccgtccggcgttatcccgaatccaaacccctccctcacaggctccctctcagcgatagcggcatccgagccctcctgcgcgcccactagggtttatctcaagcgaggccgcgccaaccgccaatggcgctcgcgcgcccgtcctccgctctcctctcatgctcctcgtccgcctgcctccgccggctcaacccgctcctcctctctgccgccgcctgccgccgcccggcgtgggccccgcgccgcgtcgcccgcaggttctccgcagcgattgcctccgagacggatgtgttcaactccccggaggtcgctaagtcgttcgacttcaccaacgaggagaaaatttacaaatggatataatggttagatatttccgaatgaaagggagacctgcgctgtggatacctggcactgaccatgctgggattgcgactcagttggttgtggaaaagatgctggccgctgaaggtgtcaagaggacagatatgacgcgagaggagttcaccaaaaaagtttgggagtggaaagagaaatatgggggtactatcactaatcagattaagcgattgggtgcatcttgtgattggagtcgtgagcgtttcactcttgatgaacaattgagccgtgcagttgctgaagcattcgttaggcttcatgataaagggcttatatatcaaggatcttatttggtcaactggtctcctaacctgcaaactgcagtatctgatttagaagtagaatactctgaagaacctggaaatttgtacttcatcaagtaccgtgttgctggcggaaccagggatgattttatgactatcgcaaccacaagacctgaaacaatatttggtgatgttgcaattgctgttaatccggaggataagcgttatgcacaatatgttggcaaattggctattgtaccgttgacatgtgggagacatgtccctattattgctgatcgggtaagttcgaaactgaatatttttttactcctgtccctttttgagtgtcgctatggtattcatgctggtcaaacttccttaagtttgactaggtttgaagaaaatattagcaacatgtgtatctccaaataagtttattatgaaataggttcaacgatctatctaatgatattatgtatcataaatatcaatattttcttgtatatatttagctaaagttgcgtatgtttgacttctcggaaagtgagcgacaattaaaaatggacggagggagtatgtttgaagcgattttacaaagggcattacaacatgaatcaaatcataacaacacaagatgccaaaaacaactcattaatattgttccactgttctattattttatgtgattgctgttatttgaagtcaagaaagtgctactgatgctttctacttcactggttctgtagctaagagcatctccaagagcttccaaaatccactgtcaatctagattttttagcaagattgaaaaaaactgcctccaacaactccctaatccctatatcaactcccaatctttcctcacttgaaaaaatcgatccaatcgcgcggaaacatccgcgcacgcatcgacgtgccaatctagacgtggaaagaacaaatagtaacacaaggttcctgatggctgatgtaaatgtacaaaagagaaagaaagtataaaagtggctgaagacatttagaaatagtttggtattcctgat

SEQ ID NO: 28011 - DNA, 1865 bp, Zea Mays
ctgctcaggctgctcagcaccacactcccgcggtgccgccgtccggcgttatcccgaatccaaacccctccctcacaggctccctctcagcgatagcggcatccgagccctcctgcgcgcccactagggtttatctcaagcgaggccgcgccaaccgccaatggcgctcgcgcgcccgtcctccgctctcctctcatgctcctcgtccgcctgcctccgccggctcaacccgctcctcctctctgccgccgcctgccgccgcccggcgtgggccccgcgccgcgtcgcccgcaggttctccgcagcgattgcctccgagacggatgtgttcaactccccggaggtcgctaagtcgttcgacttcaccaacgaggagaaaatttacaaatggtgggaatctcaaggattctttaagcctaactttgaccgtggaggagatccatttgtcatcccgatgccaccaccaaatgttaccggatcactgcatatgggccatgctatgtttgtcacacttgagaggatataatggttagatatttccgaatgaaagggagacctgcgctgtggatacctggcactgaccatgctgggattgcgactcagttggttgtggaaaagatgctggccgctgaaggtgtcaagaggacagatatgacgcgagaggagttcaccaaaaaagtttgggagtggaaagagaaatatgggggtactatcactaatcagattaagcgattgggtgcatcttgtgattggagtcgtgagcgtttcactcttgatgaacaattgagccgtgcagttgctgaagcattcgttaggcttcatgataaagggcttatatatcaaggatcttatttggtcaactggtctcctaacctgcaaactgcagtatctgatttagaagtagaatactctgaagaacctggaaatttgtacttcatcaagtaccgtgttgctggcggaaccagggatgattttatgactatcgcaaccacaagacctgaaacaatatttggtgatgttgcaattgctgttaatccggaggataagcgttatgcacaatatgttggcaaattggctattgtaccgttgacatgtgggagacatgtccctattattgctgatcgggtaagttcgaaactgaatatttttttactcctgtccctttttgagtgtcgctatggtattcatgctggtcaaacttccttaagtttgactaggtttgaagaaaatattagcaacatgtgtatctccaaataagtttattatgaaataggttcaacgatctatctaatgatattatgtatcataaatatcaatattttcttgtatatatttagctaaagttgcgtatgtttgacttctcggaaagtgagcgacaattaaaaatggacggagggagtatgtttgaagcgattttacaaagggcattacaacatgaatcaaatcataacaacacaagatgccaaaaacaactcattaatattgttccactgttctattattttatgtgattgctgttatttgaagtcaagaaagtgctactgatgctttctacttcactggttctgtagctaagagcatctccaagagcttccaaaatccactgtcaatctagattttttagcaagattgaaaaaaactgcctccaacaactccctaatccctatatcaactcccaatctttcctcacttgaaaaaatcgatccaatcgcgcggaaacatccgcgcacgcatcgacgtgccaatctagacgtggaaagaacaaatagtaacacaaggttcctgatggctgatgtaaatgtacaaaagagaaagaaagtataaaagtggctgaagacatttagaaatagtttggtattcctgat

SEQ ID NO: 28012 - DNA, 1864 bp, Zea Mays
ctgctcaggctgctcagcaccacactcccgcggtgccgccgtccggcgttatcccgaatccaaacccctccctcacaggctccctctcagcgatagcggcatccgagccctcctgcgcgcccactagggtttatctcaagcgaggccgcgccaaccgccaatggcgctcgcgcgcccgtcctccgctctcctctcatgctcctcgtccgcctgcctccgccggctcaacccgctcctcctctctgccgccgcctgccgccgcccggcgtgggccccgcgccgcgtcgcccgcaggttctccgcagcgattgcctccgagacggatgtgttcaactccccggaggtcgctaagtcgttcgacttcaccaacgaggagaaaatttacaaatggtgggaatctcaaggattctttaagcctaactttgaccgtggaggagatccatttgtcatcccgatgccaccaccaaatgttaccggatcactgcatatgggccatgctatgtttgtcacacttgaggatataatggttagatatttccgaatgaaagggagacctgcgctgtggatacctggcactgaccatgctgggattgcgactcagttggttgtggaaaagatgctggccgctgaaggtgtcaagaggacagatatgacgcgagaggagttcaccaaaaaagtttgggagtggaaagagaaatatgggggtactatcactaatcagattaagcgattgggtgcatcttgtgattggagtcgtgagcgtttcactcttgatgaacaattgagccgtgcagttgctgaagcattcgttaggcttcatgataaagggcttatatatcaaggatcttatttggtcaactggtctcctaacctgcaaactgcagtatctgatttagaagtagaatactctgaagaacctggaaatttgtacttcatcaagtaccgtgttgctggcggaaccaggggatgattttatgactatcgcaaccacaagacctgaaacaatatttggtgatgttgcaattgctgttaatccggaggataagcgttatgcacaatatgttggcaaattggctattgtaccgttgacatgtgggagacatgtccctattattgctgatcgggtaagttcgaaactgaatatttttttactcctgtccctttttgagtgtcgctatggtattcatgctggtcaaacttccttaagtttgactaggtttgaagaaaatattagcaacatgtgtatctccaaataagtttattatgaaataggttcaacgatctatctaatgatattatgtatcataaatatcaatattttcttgtatatatttagctaaagttgcgtatgtttgacttctcggaaagtgagcgacaattaaaaatggacggagggagtatgtttgaagcgattttacaaagggcattacaacatgaatcaaatcataacaacacaagatgccaaaaacaactcattaatattgttccactgttctattattttatgtgattgctgttatttgaagtcaagaaagtgctactgatgctttctacttcactggttctgtagctaagagcatctccaagagcttccaaaatccactgtcaatctagattttttagcaagattgaaaaaaactgcctccaacaactccctaatccctatatcaactcccaatctttcctcacttgaaaaaatcgatccaatcgcgcggaaacatccgcgcacgcatcgacgtgccaatctagacgtggaaagaacaaatagtaacacaaggttcctgatggctgatgtaaatgtacaaaagagaaagaaagtataaaagtggctgaagacatttagaaatagtttggtattcctgat

SEQ ID NO: 28013 - DNA, 1872 bp, Zea Mays
ctgctcaggctgctcagcaccacactcccgcggtgccgccgtccggcgttatcccgaatccaaacccctccctcacaggctccctctcagcgatagcggcatccgagccctcctgcgcgcccactagggtttatctcaagcgaggccgcgccaaccgccaatggcgctcgcgcgcccgtcctccgctctcctctcatgctcctcgtccgcctgcctccgccggctcaacccgctcctcctctctgccgccgcctgccgccgcccggcgtgggccccgcgccgcgtcgcccgcaggttctccgcagcgattgcctccgagacggatgtgttcaactccccggaggtcgctaagtcgttcgacttcaccaacgaggagaaaatttacaaatggtgggaatctcaaggattctttaagcctaactttgaccgtggaggagatccatttgtcatcccgatgccaccaccaaatgttaccggatcactgcatatgggccatgctatgtttgtcacacttgagtgactcaggatataatggttagatatttccgaatgaaagggagacctgcgctgtggatacctggcactgaccatgctgggattgcgactcagttggttgtggaaaagatgctggccgctgaaggtgtcaagaggacagatatgacgcgagaggagttcaccaaaaaagtttgggagtggaaagagaaatatgggggtactatcactaatcagattaagcgattgggtgcatcttgtgattggagtcgtgagcgtttcactcttgatgaacaattgagccgtgcagttgctgaagcattcgttaggcttcatgataaagggcttatatatcaaggatcttatttggtcaactggtctcctaacctgcaaactgcagtatctgatttagaagtagaatactctgaagaacctggaaatttgtacttcatcaagtaccgtgttgctggcggaaccagggatgattttatgactatcgcaaccacaagacctgaaacaatatttggtgatgttgcaattgctgttaatccggagggataagcgttatgcacaatatgttggcaaattggctattgtaccgttgacatgtgggagacatgtccctattattgctgatcgggtaagttcgaaactgaatatttttttactcctgtccctttttgagtgtcgctatggtattcatgctggtcaaacttccttaagtttgactaggtttgaagaaaatattagcaacatgtgtatctccaaataagtttattatgaaataggttcaacgatctatctaatgatattatgtatcataaatatcaatattttcttgtatatatttagctaaagttgcgtatgtttgacttctcggaaagtgagcgacaattaaaaatggacggagggagtatgtttgaagcgattttacaaagggcattacaacatgaatcaaatcataacaacacaagatgccaaaaacaactcattaatattgttccactgttctattattttatgtgattgctgttatttgaagtcaagaaagtgctactgatgctttctacttcactggttctgtagctaagagcatctccaagagcttccaaaatccactgtcaatctagattttttagcaagattgaaaaaaactgcctccaacaactccctaatccctatatcaactcccaatctttcctcacttgaaaaaatcgatccaatcgcgcggaaacatccgcgcacgcatcgacgtgccaatctagacgtggaaagaacaaatagtaacacaaggttcctgatggctgatgtaaatgtacaaaagagaaagaaagtataaaagtggctgaagacatttagaaatagtttggtattcctgat

SEQ ID NO: 28014 - DNA, 1908 bp, Zea Mays
aaaaatgcaatattgtcgccacagccccaacacgccaacagccagctgctcaggctgctcagcaccacactcccgcggtgccgccgtccggcgttatcccgaatccaaacccctccctcacaggctccctctcagcgatagcggcatccgagccctcctgcgcgcccactagggtttatctcaagcgaggccgcgccaaccgccaatggcgctcgcgcgcccgtcctccgctctcctctcatgctcctcgtccgcctgcctccgccggctcaacccgctcctcctctctgccgccgcctgccgccgcccggcgtgggccccgcgccgcgtcgcccgcaggttctccgcagcgattgcctccgagacggatgtgttcaactccccggaggtcgctaagtcgttcgacttcaccaacgaggagaaaatttacaaatggtgggaatctcaaggattctttaagcctaactttgaccgtggaggagatccatttgtcatcccgatgccaccaccaaatgttaccggatcactgcatatgggccatgctatgtttgtcacacttgaggatataatggttagatatttccgaatgaaagggagacctgcgctgtggatacctggcactgaccatgctgggattgcgactcagttggttgtggaaaagatgctggccgctgaaggtgtcaagaggacagatatgacgcgagaggagttcaccaaaaaagtttgggagtggaaagagaaatatgggggtactatcactaatcagattaagcgattgggtgcatcttgtgattggagtcgtgagcgtttcactcttgatgaacaattgagccgtgcagttgctgaagcattcgttaggcttcatgataaagggcttatatatcaaggatcttatttggtcaactggtctcctaacctgcaaactgcagtatctgatttagaagtagaatactctgaagaacctggaaatttgtacttcatcaagtaccgtgttgctggcggaaccagggatgattttatgactatcgcaaccacaagacctgaaacaatatttggtgatgttgcaattgctgttaatccggaggataagcgttatgcacaatatgttggcaaattggctattgtaccgttgacatgtgggagacatgtccctattattgctgatcgggtaagttcgaaactgaatatttttttactcctgtccctttttgagtgtcgctatggtattcatgctggtcaaacttccttaagtttgactaggtttgaagaaaatattagcaacatgtgtatctccaaataagtttattatgaaataggttcaacgatctatctaatgatattatgtatcataaatatcaatattttcttgtatatatttagctaaagttgcgtatgtttgacttctcggaaagtgagcgacaattaaaaatggacggagggagtatgtttgaagcgattttacaaagggcattacaacatgaatcaaatcataacaacacaagatgccaaaaacaactcattaatattgttccactgttctattattttatgtgattgctgttatttgaagtcaagaaagtgctactgatgctttctacttcactggttctgtagctaagagcatctccaagagcttccaaaatccactgtcaatctagattttttagcaagattgaaaaaaactgcctccaacaactccctaatccctatatcaactcccaatctttcctcacttgaaaaaatcgatccaatcgcgcggaaacatccgcgcacgcatcgacgtgccaatctagacgtggaaagaacaaatagtaacacaaggttcctgatggctgatgtaaatgtacaaaagagaaagaaagtataaaagtggctgaagacatttagaaatagtttggtattcctgat

SEQ ID NO: 28015 - DNA, 1916 bp, Zea Mays
aaaaatgcaatattgtcgccacagccccaacacgccaacagccagctgctcaggctgctcagcaccacactcccgcggtgccgccgtccggcgttatcccgaatccaaacccctccctcacaggctccctctcagcgatagcggcatccgagccctcctgcgcgcccactagggtttatctcaagcgaggccgcgccaaccgccaatggcgctcgcgcgcccgtcctccgctctcctctcatgctcctcgtccgcctgcctccgccggctcaacccgctcctcctctctgccgccgcctgccgccgcccggcgtgggccccgcgccgcgtcgcccgcaggttctccgcagcgattgcctccgagacggatgtgttcaactccccggaggtcgctaagtcgttcgacttcaccaacgaggagaaaatttacaaatggtgggaatctcaaggattctttaagcctaactttgaccgtggaggagatccatttgtcatcccgatgccaccaccaaatgttaccggatcactgcatatgggccatgctatgtttgtcacacttgagtgactcaggatataatggttagatatttccgaatgaaagggagacctgcgctgtggatacctggcactgaccatgctgggattgcgactcagttggttgtggaaaagatgctggccgctgaaggtgtcaagaggacagatatgacgcgagaggagttcaccaaaaaagtttgggagtggaaagagaaatatgggggtactatcactaatcagattaagcgattgggtgcatcttgtgattggagtcgtgagcgtttcactcttgatgaacaattgagccgtgcagttgctgaagcattcgttaggcttcatgataaagggcttatatatcaaggatcttatttggtcaactggtctcctaacctgcaaactgcagtatctgatttagaagtagaatactctgaagaacctggaaatttgtacttcatcaagtaccgtgttgctggcggaaccagggatgattttatgactatcgcaaccacaagacctgaaacaatatttggtgatgttgcaattgctgttaatccggaggataagcgttatgcacaatatgttggcaaattggctattgtaccgttgacatgtgggagacatgtccctattattgctgatcgggtaagttcgaaactgaatatttttttactcctgtccctttttgagtgtcgctatggtattcatgctggtcaaacttccttaagtttgactaggtttgaagaaaatattagcaacatgtgtatctccaaataagtttattatgaaataggttcaacgatctatctaatgatattatgtatcataaatatcaatattttcttgtatatatttagctaaagttgcgtatgtttgacttctcggaaagtgagcgacaattaaaaatggacggagggagtatgtttgaagcgattttacaaagggcattacaacatgaatcaaatcataacaacacaagatgccaaaaacaactcattaatattgttccactgttctattattttatgtgattgctgttatttgaagtcaagaaagtgctactgatgctttctacttcactggttctgtagctaagagcatctccaagagcttccaaaatccactgtcaatctagattttttagcaagattgaaaaaaactgcctccaacaactccctaatccctatatcaactcccaatctttcctcacttgaaaaaatcgatccaatcgcgcggaaacatccgcgcacgcatcgacgtgccaatctagacgtggaaagaacaaatagtaacacaaggttcctgatggctgatgtaaatgtacaaaagagaaagaaagtataaaagtggctgaagacatttagaaatagtttggtattcctgat

SEQ ID NO: 28016 - DNA, 961 bp, Zea Mays
gtggcaactgctatattctgcatctttcgtatgttttgtcacgcgaggtcgttcagggcgtattaggttaatggaagtggccaattctgtggcgtggctgagatgattggacctgtcgatttcgacagaagtgttgattactggcagcaggataagtggagtggccagttccctgtgaagtggcacataattaaggatgtaccgaacaatcttctgcggcacatcattcttgagaacaatgacaataaacctgtcacaaatagcagggacacacaggaggttcaattaggttggcatgatgctggtacctatgacaagaacattatcgagtggcccaagtgcagtggcgctaatggtagcttgagattcaaagtcgagttgaagcatggggccaatgctgatcttgtgaatgctatgaagctgatcccgccttcaacgacgtccgaaccccatccgcgatccatgtctgccgcgccatcctcgcccttccatctcagcgcccccattcgtgcttgaaggaaggcccattcgtgttggaacgaatcctcgctcaaaatccatgcgcatccgatgaggatccagagctgccctgctgcccttccatcctctttgtccctttccatcgtcggcgatccacttctatcggcggcgcccccttctagccccttccatagttgtgcttaggtacttctctctatttgtgaaatctagggttcttagtgtacgattgtcaatatctctataaaagaatagattagtgtacgattgtcgatatattgtttgttttcatgtaattgttgtgcactcgcgttttattaataatttgtgagtcgtcgcaacgcacagatacctaacagataatttgtgagtcgatatatctgtatgatattgatggttgcaatgtagtggtgaaacgagtagattaaaataacaaaatttatatgtatagccaggatcacca

SEQ ID NO: 28017 - DNA, 2182 bp, Zea Mays
tttcaattctccctttctgatggaagggctcgcccctaaaattgtgacgacatatcgagttttggacgtgcaggttcgctgggctgcaactggtgttctccttcacgtcgttgcgcgtgacgagggttggcgaggcgaggaagcgtgctcttgatcccgagtttaaagagggcgggcaacataattggaagcaagttttgtcaaatagcggtattgcaagtatctcggttgtgttgatagcattagtcatcagagggatagataggtgtttagattcaaaagagtcaactcttgttactgctcttattgatggtgttatctgacattatgcttgctataatggagatacatggtcatctgagctcgacattctttgtaaagctaagccacaaattatcacaacattcaagagtgcggaaggctaccattggtggtgtaaccatagatgggcttcttgtagcagcagctggattcttgattgggcttgcatttgtgctgataagatttttcaccactcaatgtgctcctgatgtattctggaaccagctgctagctatacccttggcacagctgccgccctatgtagaagtttgatcgattccttcttgagcgcaacagttcagtatagtgggttctacagtgttcgcaaaaaggtaaagccaacaaagttcaatatttaaaataactcgatgtgtccagggtttgcaagacaagattaagcagctctaagattaagatagttgccatcgatcttgccacaatttttacttgagctgagcagataacaagcggcttgggccagggtctcttggcctacgcgtagacagactccaggaagatgtcgatcttctgcttctccatcaccgtcgttatcatgcagcctgctggaatgccacagcgggacaggagcatggggatgagcaggttcattttcttttgaaacaagcatgtatgtgtcatacatgcacatactgtcttgcttccaagactggcttccaagctttcaccagaggagcgcaagatgactgcaagtggcgccggatcccgacgttcggcgactggaacctgcgggacgacatgcccgtcacccaatacttgcaagcagggacttcttcatcgttgtgccgccggcagagaaggacgacgacgaggatctgttcaaggtgccccagtgttcctgccaagccctacaactacaagaaggtgaaatatgtggtcgaagtagtaagctatataaattcaagtaggaatgcaggatggggtgcattcaactcatgcaggtggcaggttaatggaagtggccaattctgtggcgtggctgagatgattggacctgtcgatttcgacagaagtgttgattactggcagcaggataagtggagtggccagttccctgtgaagtggcacataattaaggatgtaccgaacaatcttctgcggcacatcattcttgagaacaatgacaataaacctgtcacaaatagcagggacacacaggaggttcaattaggttggcatgatgctggtacctatgacaagaacattatcgagtggcccaagtgcagtggcgctaatggtagcttgagattcaaagtcgagttgaagcatggggccaatgctgatcttgtgaatgctatgaagctgatcccgccttcaacgacgtccgaaccccatccgcgatccatgtctgccgcgccatcctcgcccttccatctcagcgcccccattcgtgcttgaaggaaggcccattcgtgttggaacgaatcctcgctcaaaatccatgcgcatccgatgaggatccagagctgccctgctgcccttccatcctctttgtccctttccatcgtcggcgatccacttctatcggcggcgcccccttctagccccttccatagttgtgcttaggtacttctctctatttgtgaaatctagggttcttagtgtacgattgtcaatatctctataaaagaatagattagtgtacgattgtcgatatattgtttgttttcatgtaattgttgtgcactcgcgttttattaataatttgtgagtcgtcgcaacgcacagatacctaacagataatttgtgagtcgatatatctgtatgatattgatggttgcaatgtagtggtgaaacgagtagattaaaataacaaaatttatatgtatagccaggatcacca

SEQ ID NO: 28018 - DNA, 2204 bp, Zea Mays
cactaatgtgcatttcaacagttcttctttgactgcaagggataggcagcaggtcttcttcagcctcttttcaattctccctttctgatggaagggctcgcccctaaaattgtgacgacatatcgagttttggacgtgcaggttcgctgggctgcaactggtgttctccttcacgtcgttgcgcgtgacgagggttggcgaggcgaggaagcgtgctcttgatcccgagtttaaagagggcgggcaacataattggaagcaagttttgtcaaatagcggtattgcaagtatctcggttgtgttgatagcattagtcatcagagggatagataggtgtttagattcaaaagagtcaactcttgttactgctcttattgatggtgttatctgacattatgcttgctataatggagatacatggtcatctgagctcgacattctttgtaaagctaagccacaaattatcacaacattcaagagtgcggaaggctaccattggtggtgtaaccatagatgggcttcttgtagcagcagctggattcttgattgggcttgcatttgtgctgataagatttttcaccactcaatgtgctcctgatgtattctggaaccagctgctagctatacccttggcacagctgccgccctatgtagaagtttgatcgattccttcttgagcgcaacagttcagtatagtgggttctacagtgttcgcaaaaaggtaaagccaacaaagttcaatatttaaaataactcgatgtgtccagggtttgcaagacaagattaagcagctctaagattaagatagttgccatcgatcttgccacaatttttacttgagctgagcagataacaagcggcttggggtattgatatttatttttctgtcttgtttaatctgtttgttcaattaatttcaaaacagttagtgcttcagaatctcataacagattctgaatacttcctttgtcaaagctttcacttgtctgaagcctgctggaatgccacagcgggacaggagcatggggatgagcaggcgcaagatgactgcaagtggcgccggatcccgacgttcggcgactggaacctgcgggacgacatgcccgtcacccaatacttgcaagcagggacttcttcatcgttgtgccgccggcagagaaggacgacgacgaggatctgttcaaggtgccccagtgttcctgccaagccctacaactacaagaaggtgaaatatgtggtcgaagtagtaagctatataaattcaagtaggaatgcaggatggggtgcattcaactcatgcaggtggcaggttaatggaagtggccaattctgtggcgtggctgagatgattggacctgtcgatttcgacagaagtgttgattactggcagcaggataagtggagtggccagttccctgtgaagtggcacataattaaggatgtaccgaacaatcttctgcggcacatcattcttgagaacaatgacaataaacctgtcacaaatagcagggacacacaggaggttcaattaggttggcatgatgctggtacctatgacaagaacattatcgagtggcccaagtgcagtggcgctaatggtagcttgagattcaaagtcgagttgaagcatggggccaatgctgatcttgtgaatgctatgaagctgatcccgccttcaacgacgtccgaaccccatccgcgatccatgtctgccgcgccatcctcgcccttccatctcagcgcccccattcgtgcttgaaggaaggcccattcgtgttggaacgaatcctcgctcaaaatccatgcgcatccgatgaggatccagagctgccctgctgcccttccatcctctttgtccctttccatcgtcggcgatccacttctatcggcggcgcccccttctagccccttccatagttgtgcttaggtacttctctctatttgtgaaatctagggttcttagtgtacgattgtcaatatctctataaaagaatagattagtgtacgattgtcgatatattgtttgttttcatgtaattgttgtgcactcgcgttttattaataatttgtgagtcgtcgcaacgcacagatacctaacagataatttgtgagtcgatatatctgtatgatattgatggttgcaatgtagtggtgaaacgagtagattaaaataacaaaatttatatgtatagccaggatcacca

SEQ ID NO: 28019 - DNA, 3066 bp, Zea Mays
cttcacccaccagccccccaaatctcacgggctcacgacgatagacccgccctctgtgccacaaaggagctcctctccatcccatctccaacgtcgccccaacccccatcaccgacagggaacccacctctcacgtcgacaccgccagaggaggagatggtggagatacgggcgttgcgatccgaggcagcacgctagagcgacgagagcgtggcgacgtggagatcatgggagtcctgcgcagcgtcgcggcgaggcgcccgtcggggaggcagcgggcacggagagagcggagagtgacggcgacaacgggtcccgcctgtcgcgcgaaccagggaaatatctacatctcgtctgcgccgccgctgggatttattagggttctacttctagcccaggccaactccacaccaatccaatcctggggcgggcgactgcctccttccctcgatttgacgtgcgcttcctcttcctcgctcgctctcggtcgcagtcacaggcccacaacacaagcaactttcttattactgtcggggttccgaagccaacaaaaggacgcatcattccaactaactttcagagcagcgcagcgtgtcttgctttgttggtgccttgcaaaccgcaggtgctgtgctacaattgcagaaataaggtgtagtgtatgagaagtagagaaccaatgctcttttatagccctcaatagatatcagtttctttcttttctttgatttacacgcacactttcccagctactgtttgcttgtttggtatagcaggaagtatctttgatatataaaaatgagaaataggccaaggagtatgctatcacgatgagccgcccagatatatatatcgtgtgcctccgtcacatcgtgctagctggttcttttcttcatgaggcatatagggtatttattcaaatgcccgcaaagggagggcagtgcactgagtgcatcgggagggctcatagggataggcagcaggtcttcttcagcctcttttcaattctccctttctgatggaagggctcgcccctaaaattgtgacgacatatcgagttttggacgtgcaggttcgctgggctgcaactggtgttctccttcacgtcgttgcgcgtgacgagggttggcgaggcgaggaagcgtgctcttgatcccgagtttaaagagggcgggcaacataattggaagcaagttttgtcaaatagcggtattgcaagtatctcggttgtgttgatagcattagtcatcagagggatagataggtgtttagattcaaaagagtcaactcttgttactgctcttattgatggtgttatctgacattatgcttgctataatggagatacatggtcatctgagctcgacattctttgtaaagctaagccacaaattatcacaacattcaagagtgcggaaggctaccattggtggtgtaaccatagatgggcttcttgtagcagcagctggattcttgattgggcttgcatttgtgctgataagatttttcaccactcaatgtgctcctgatgtattctggaaccagctgctagctatacccttggcacagctgccgccctatgtagaagtttgatcgattccttcttgagcgcaacagttcagtatagtgggttctacagtgttcgcaaaaaggtaaagccaacaaagttcaatatttaaaataactcgatgtgtccagggtttgcaagacaagattaagcagctctaagattaagatagttgccatcgatcttgccacaatttttacttgagctgagcagataacaagcggcttgggccagggtctcttggcctacgcgtagacagactccaggaagatgtcgatcttctgcttctccatcaccgtcgttatcatgcagcctgctggaatgccacagcgggacaggagcatggggatgagcaggcgcaagatgactgcaagtggcgccggatcccgacgttcggcgactggaacctgcgggacgacatgcccgtcacccaatacttgcaagcagggacttcttcatcgttgtgccgccggcagagaaggacgacgacgaggatctgttcaaggtgccccagtgttcctgccaagccctacaactacaagaaggctatataaattcaagtaggaatgcaggatggggtgcattcaactcatgcaggtggcaggttaatggaagtggccaattctgtggcgtggctgagatgattggacctgtcgatttcgacagaagtgttgattactggcagcaggataagtggagtggccagttccctgtgaagtggcacataattaaggatgtaccgaacaatcttctgcggcacatcattcttgagaacaatgacaataaacctgtcacaaatagcagggacacacaggaggttcaattaggttggcatgatgctggtacctatgacaagaacattatcgagtggcccaagtgcagtggcgctaatggtagcttgagattcaaagtcgagttgaagcatggggccaatgctgatcttgtgaatgctatgaagctgatcccgccttcaacgacgtccgaaccccatccgcgatccatgtctgccgcgccatcctcgcccttccatctcagcgcccccattcgtgcttgaaggaaggcccattcgtgttggaacgaatcctcgctcaaaatccatgcgcatccgatgaggatccagagctgccctgctgcccttccatcctctttgtccctttccatcgtcggcgatccacttctatcggcggcgcccccttctagccccttccatagttgtgcttaggtacttctctctatttgtgaaatctagggttcttagtgtacgattgtcaatatctctataaaagaatagattagtgtacgattgtcgatatattgtttgttttcatgtaattgttgtgcactcgcgttttattaataatttgtgagtcgtcgcaacgcacagatacctaacagataatttgtgagtcgatatatctgtatgatattgatggttgcaatgtagtggtgaaacgagtagattaaaataacaaaatttatatgtatagccaggatcacca

SEQ ID NO: 28020 - DNA, 4234 bp, Zea Mays
cttcacccaccagccccccaaatctcacgggctcacgacgatagacccgccctctgtgccacaaaggagctcctctccatcccatctccaacgtcgccccaacccccatcaccgacagggaacccacctctcacgtcgacaccgccagaggaggagatggtggagatacgggcgttgcgatccgaggcagcacgctagagcgacgagagcgtggcgacgtggagatcatgggagtcctgcgcagcgtcgcggcgaggcgcccgtcggggaggcagcgggcacggagagagcggagagtgacggcgacaacgggtcccgcctgtcgcgcgaaccagggaaatatctacatctcgtctgcgccgccgctgggatttattagggttctacttctagcccaggccaactccacaccaatccaatcctggggcgggcgactgcctccttccctcgatttgacgtgcgcttcctcttcctcgctcgctctcggtcgcagtcacaggcccacaacacaagcaactttcttattactgtcggggttccgaagccaacaaaaggacgcatcattccaactaactttcagagcagcgcagcgtgtcttgctttgttggtgccttgcaaaccgcaggtgctgtgctacaattgcagaaataaggtgtagtgtatgagaagtagagaaccaatgctcttttatagccctcaatagatatcagtttctttcttttctttgatttacacgcacactttcccagctactgtttgcttgtttggtatagcaggaagtatctttgatatataaaaatgagaaataggccaaggagtatgctatcacgatgagccgcccagatatatatatcgtgtgcctccgtcacatcgtgctagctggttcttttcttcatgaggcatatagggtatttattcaaatgcccgcaaagggagggcagtgcactgagtgcatcgggagggctcatagttcttctttgactgcaagggataggcagcaggtcttcttcagcctcttttcaattctccctttctgatggaagctggcgtgccggaaggtgccgagcaggtacatgtctcagctgaagaatccgaagactgccaagaaaggcgaggagaccacggtggccaagagcgagaagcgggggcaagaatctaagacgaatgccaagaagaaaatcttaggacgctcacggaagtgtgcccatgccgaacctgatggggagaaccgaaacggttgcagcagcactgatgcagacgagaactcacttgcagaaactgctgcctccgatcaggagaggaaggtggtgctgcaggaattgagaatcgaggtggatacatcacgagctgacaattccaatgacaacaaggagaatctgtcgagtgctccgagtgatgaagaagcattgaacaattcacattctgaaaatgaaaacagacagttggagaacaatgagaacgttcctctgaacgagaatgttgctctgaaggtggctaaactgcagagcaaagtgcatcaagagcaaccaggaaagctcaagaaaactaccaaccctaggccattcaggctaaggactgatgaaagaggagtgcttaaagaagcaaaaccagagaaaaggcagccgttcactgagaataattccacggcagtactcaaggatgcaaacagaggagtgacgaagaaacgaagcacccagattgtaacggctcagcagctcgatgagtccagctccaggccggccgtcaacagcatccaatgcagagctgtgaaaccggagagggtttctagggttgcatcatcaacacgaagagccaaaacagcaagtgaccttatggcaccttcttcccggactgggaagaagaggaaggcggctacggtgaagctgtcgaggatccaaacaccagctgcttgagctcgggcagatcaaggaggaaatgagaaactgccgacaacggtttttgttgtctgctccagcgacgagttctgtatttattactgcgtcgaattcgttttccggattagctatttaaaaccaaaggtctctggttcattgacactaatgtgcatttcaacagttcttctttgactgcaagggataggcagcaggtcttcttcagcctcttttcaattctccctttctgatggaagggctcgcccctaaaattgtgacgacatatcgagttttggacgtgcaggttcgctgggctgcaactggtgttctccttcacgtcgttgcgcgtgacgagggttggcgaggcgaggaagcgtgctcttgatcccgagtttaaagagggcgggcaacataattggaagcaagttttgtcaaatagcggtattgcaagtatctcggttgtgttgatagcattagtcatcagagggatagataggtgtttagattcaaaagagtcaactcttgttactgctcttattgatggtgttatctgacattatgcttgctataatggagatacatggtcatctgagctcgacattctttgtaaagctaagccacaaattatcacaacattcaagagtgcggaaggctaccattggtggtgtaaccatagatgggcttcttgtagcagcagctggattcttgattgggcttgcatttgtgctgataagatttttcaccactcaatgtgctcctgatgtattctggaaccagctgctagctatacccttggcacagctgccgccctatgtagaagtttgatcgattccttcttgagcgcaacagttcagtatagtgggttctacagtgttcgcaaaaaggtaaagccaacaaagttcaatatttaaaataactcgatgtgtccagggtttgcaagacaagattaagcagctctaagattaagatagttgccatcgatcttgccacaatttttacttgagctgagcagataacaagcggcttggggtattgatatttatttttctgtcttgtttaatctgtttgttcaattaatttcaaaacagttagtgcttcagaatctcataacagattctgaatacttcctttgtcaaagctttcacttgtctgaagcctgctggaatgccacagcgggacaggagcatggggatgagcaggcgcaagatgactgcaagtggcgccggatcccgacgttcggcgactggaacctgcgggacgacatgcccgtcacccaatacttgcaagcagggacttcttcatcgttgtgccgccggcagagaaggacgacgacgaggatctgttcaaggtgccccagtgttcctgccaagccctacaactacaagaaggctatataaattcaagtaggaatgcaggatggggtgcattcaactcatgcaggtggcaggttaatggaagtggccaattctgtggcgtggctgagatgattggacctgtcgatttcgacagaagtgttgattactggcagcaggataagtggagtggccagttccctgtgaagtggcacataattaaggatgtaccgaacaatcttctgcggcacatcattcttgagaacaatgacaataaacctgtcacaaatagcagggacacacaggaggttcaattaggttggcatgatgctggtacctatgacaagaacattatcgagtggcccaagtgcagtggcgctaatggtagcttgagattcaaagtcgagttgaagcatggggccaatgctgatcttgtgaatgctatgaagctgatcccgccttcaacgacgtccgaaccccatccgcgatccatgtctgccgcgccatcctcgcccttccatctcagcgcccccattcgtgcttgaaggaaggcccattcgtgttggaacgaatcctcgctcaaaatccatgcgcatccgatgaggatccagagctgccctgctgcccttccatcctctttgtccctttccatcgtcggcgatccacttctatcggcggcgcccccttctagccccttccatagttgtgcttaggtacttctctctatttgtgaaatctagggttcttagtgtacgattgtcaatatctctataaaagaatagattagtgtacgattgtcgatatattgtttgttttcatgtaattgttgtgcactcgcgttttattaataatttgtgagtcgtcgcaacgcacagatacctaacagataatttgtgagtcgatatatctgtatgatattgatggttgcaatgtagtggtgaaacgagtagattaaaataacaaaatttatatgtatagccaggatcacca

SEQ ID NO: 28021 - DNA, 2780 bp, Zea Mays
ccaacccctgctccaactgcgatccccacgccgctctcccccttcacccaccagccccccaaatctcacgggctcacgacgatagacccgccctctgtgccacaaaggagctcctctccatcccatctccaacgtcgccccaacccccatcaccgacagggaacccacctctcacgtcgacaccgccagaggaggagatggtggagatacgggcgttgcgatccgaggcagcacgctagagcgacgagagcgtggcgacgtggagatcatgggagtcctgcgcagcgtcgcggcgaggcgcccgtcggggaggcagcgggcacggagagagcggagagtgacggcgacaacgggtcccgcctgtcgcgcgaaccagggaaatatctacatctcgtctgcgccgccgctgggatttattagggttctacttctagcccaggccaactccacaccaatccaatcctggggcgggcgactgcctccttccctcgatttgacgtgcgcttcctcttcctcgctcgctctcggtcgcagtcacaggcccacaacacaagcaactttcttattactgtcggggttccgaagccaacaaaaggacgcatcattccaactaactttcagagcagcgcagcgtgtcttgctttgttggtgccttgcaaaccgcagttcttctttgactgcaagggataggcagcaggtcttcttcagcctcttttcaattctccctttctgatggaagggctcgcccctaaaattgtgacgacatatcgagttttggacgtgcaggttcgctgggctgcaactggtgttctccttcacgtcgttgcgcgtgacgagggttggcgaggcgaggaagcgtgctcttgatcccgagtttaaagagggcgggcaacataattggaagcaagttttgtcaaatagcggtattgcaagtatctcggttgtgttgatagcattagtcatcagagggatagataggtgtttagattcaaaagagtcaactcttgttactgctcttattgatggtgttatctgacattatgcttgctataatggagatacatggtcatctgagctcgacattctttgtaaagctaagccacaaattatcacaacattcaagagtgcggaaggctaccattggtggtgtaaccatagatgggcttcttgtagcagcagctggattcttgattgggcttgcatttgtgctgataagatttttcaccactcaatgtgctcctgatgtattctggaaccagctgctagctatacccttggcacagctgccgccctatgtagaagtttgatcgattccttcttgagcgcaacagttcagtatagtgggttctacagtgttcgcaaaaaggtaaagccaacaaagttcaatatttaaaataactcgatgtgtccagggtttgcaagacaagattaagcagctctaagattaagatagttgccatcgatcttgccacaatttttacttgagctgagcagataacaagcggcttgggccagggtctcttggcctacgcgtagacagactccaggaagatgtcgatcttctgcttctccatcaccgtcgttatcatgcagcctgctggaatgccacagcgggacaggagcatggggatgagcaggcgcaagatgactgcaagtggcgccggatcccgacgttcggcgactggaacctgcgggacgacatgcccgtcacccaatacttgcaagcagggacttcttcatcgttgtgccgccggcagagaaggacgacgacgaggatctgttcaaggtgccccagtgttcctgccaagccctacaactacaagaaggctatataaattcaagtaggaatgcaggatggggtgcattcaactcatgcaggtggcaggttaatggaagtggccaattctgtggcgtggctgagatgattggacctgtcgatttcgacagaagtgttgattactggcagcaggataagtggagtggccagttccctgtgaagtggcacataattaaggatgtaccgaacaatcttctgcggcacatcattcttgagaacaatgacaataaacctgtcacaaatagcagggacacacaggaggttcaattaggttggcatgatgctggtacctatgacaagaacattatcgagtggcccaagtgcagtggcgctaatggtagcttgagattcaaagtcgagttgaagcatggggccaatgctgatcttgtgaatgctatgaagctgatcccgccttcaacgacgtccgaaccccatccgcgatccatgtctgccgcgccatcctcgcccttccatctcagcgcccccattcgtgcttgaaggaaggcccattcgtgttggaacgaatcctcgctcaaaatccatgcgcatccgatgaggatccagagctgccctgctgcccttccatcctctttgtccctttccatcgtcggcgatccacttctatcggcggcgcccccttctagccccttccatagttgtgcttaggtacttctctctatttgtgaaatctagggttcttagtgtacgattgtcaatatctctataaaagaatagattagtgtacgattgtcgatatattgtttgttttcatgtaattgttgtgcactcgcgttttattaataatttgtgagtcgtcgcaacgcacagatacctaacagataatttgtgagtcgatatatctgtatgatattgatggttgcaatgtagtggtgaaacgagtagattaaaataacaaaatttatatgtatagccaggatcacca

SEQ ID NO: 28022 - DNA, 1879 bp, Zea Mays
cttcacccaccagccccccaaatctcacgggctcacgacgatagacccgccctctgtgccacaaaggagctcctctccatcccatctccaacgtcgccccaacccccatcaccgacagggaacccacctctcacgtcgacaccgccagaggaggagatggtggagatacgggcgttgcgatccgaggcagcacgctagagcgacgagagcgtggcgacgtggagatcatgggagtcctgcgcagcgtcgcggcgaggcgcccgtcggggaggcagcgggcacggagagagcggagagtgacggcgacaacgggtcccgcctgtcgcgcgaaccagggaaatatctacatctcgtctgcgccgccgctgggatttattagggttctacttctagcccaggccaactccacaccaatccaatcctggggcgggcgactgcctccttccctcgatttgacgtgcgcttcctcttcctcgctcgctctcggtcgcagtcacagggataggcagcaggtcttcttcagcctcttttcaattctccctttctgatggaagctggcgtgccggaaggtgccgagcaggtacatgtctcagctgaagaatccgaagactgccaagaaaggcgaggagaccacggtggccaagagcgagaagcgggggcaagaatctaagacgaatgccaagaagaaaatcttaggacgctcacggaagtgtgcccatgccgaacctgatggggagaaccgaaacggttgcagcagcactgatgcagacgagaactcacttgcagaaactgctgcctccgatcaggagaggaaggtggtgctgcaggaattgagaatcgaggtggatacatcacgagctgacaattccaatgacaacaaggagaatctgtcgagtgctccgagtgatgaagaagcattgaacaattcacattctgaaaatgaaaacagacagttggagaacaatgagaacgttcctctgaacgagaatgttgctctgaaggtggctaaactgcagagcaaagtgcatcaagagcaaccaggaaagctcaagaaaactaccaaccctaggccattcaggctaaggactgatgaaagaggagtgcttaaagaagcaaaaccagagaaaaggcagccgttcactgagaataattccacggcagtactcaaggatgcaaacagaggagtgacgaagaaacgaagcacccagattgtaacggctcagcagctcgatgagtccagctccaggccggccgtcaacagcatccaatgcagagctgtgaaaccggagagggtttctagggttgcatcatcaacacgaagagccaaaacagcaagtgaccttatggcaccttcttcccggactgggaagaagaggaaggcggctacggtgaagctgtcgaggatccaaacaccagctgcttgagctcgggcagatcaaggaggaaatgagaaactgccgacaacggtttttgttgtctgctccagcgacgagttctgtatttattactgcgtcgaattcgttttccggattaggtggatttatgtacactgatcatttctttctgcgagtcgtgtggtggaacccctctgctttgttaatgtaccgccaccgaccagattttttcttcttctgtagaatgattcagaatttgattatttttctgtaacttaattgaactggggaaaggaggcccggcccaacccaacccatgaaacatttcaattttagctgtgtactaggatccatttcatcttgctaccatgtgttgttgcccttgatagatatcagaaatagggtgtagtgtatgagaagtagagaaccgatgctcttttatagccctcaatagatatcagtttctttcttttctttgatttaca

SEQ ID NO: 28023 - DNA, 2023 bp, Zea Mays
cttcacccaccagccccccaaatctcacgggctcacgacgatagacccgccctctgtgccacaaaggagctcctctccatcccatctccaacgtcgccccaacccccatcaccgacagggaacccacctctcacgtcgacaccgccagaggaggagatggtggagatacgggcgttgcgatccgaggcagcacgctagagcgacgagagcgtggcgacgtggagatcatgggagtcctgcgcagcgtcgcggcgaggcgcccgtcggggaggcagcgggcacggagagagcggagagtgacggcgacaacgggtcccgcctgtcgcgcgaaccagggaaatatctacatctcgtctgcgccgccgctgggatttattagggttctacttctagcccaggccaactccacaccaatccaatcctggggcgggcgactgcctccttccctcgatttgacgtgcgcttcctcttcctcgctcgctctcggtcgcagtcacaggcccacaacacaagcaactttcttattactgtcggggttccgaagccaacaaaaggacgcatcattccaactaactttcagagcagcgcagcgtgtcttgctttgttggtgccttgcaaaccgcagttcttctttgactgcaagggataggcagcaggtcttcttcagcctcttttcaattctccctttctgatggaagctggcgtgccggaaggtgccgagcaggtacatgtctcagctgaagaatccgaagactgccaagaaaggcgaggagaccacggtggccaagagcgagaagcgggggcaagaatctaagacgaatgccaagaagaaaatcttaggacgctcacggaagtgtgcccatgccgaacctgatggggagaaccgaaacggttgcagcagcactgatgcagacgagaactcacttgcagaaactgctgcctccgatcaggagaggaaggtggtgctgcaggaattgagaatcgaggtggatacatcacgagctgacaattccaatgacaacaaggagaatctgtcgagtgctccgagtgatgaagaagcattgaacaattcacattctgaaaatgaaaacagacagttggagaacaatgagaacgttcctctgaacgagaatgttgctctgaaggtggctaaactgcagagcaaagtgcatcaagagcaaccaggaaagctcaagaaaactaccaaccctaggccattcaggctaaggactgatgaaagaggagtgcttaaagaagcaaaaccagagaaaaggcagccgttcactgagaataattccacggcagtactcaaggatgcaaacagaggagtgacgaagaaacgaagcacccagattgtaacggctcagcagctcgatgagtccagctccaggccggccgtcaacagcatccaatgcagagctgtgaaaccggagagggtttctagggttgcatcatcaacacgaagagccaaaacagcaagtgaccttatggcaccttcttcccggactgggaagaagaggaaggcggctacggtgaagctgtcgaggatccaaacaccagctgcttgagctcgggcagatcaaggaggaaatgagaaactgccgacaacggtttttgttgtctgctccagcgacgagttctgtatttattactgcgtcgaattcgttttccggattaggtggatttatgtacactgatcatttctttctgcgagtcgtgtggtggaacccctctgctttgttaatgtaccgccaccgaccagattttttcttcttctgtagaatgattcagaatttgattatttttctgtaacttaattgaactggggaaaggaggcccggcccaacccaacccatgaaacatttcaattttagctgtgtactaggatccatttcatcttgctaccatgtgttgttgcccttgatagatatcagaaatagggtgtagtgtatgagaagtagagaaccgatgctcttttatagccctcaatagatatcagtttctttcttttctttgatttaca

SEQ ID NO: 28024 - DNA, 2244 bp, Zea Mays
cttcacccaccagccccccaaatctcacgggctcacgacgatagacccgccctctgtgccacaaaggagctcctctccatcccatctccaacgtcgccccaacccccatcaccgacagggaacccacctctcacgtcgacaccgccagaggaggagatggtggagatacgggcgttgcgatccgaggcagcacgctagagcgacgagagcgtggcgacgtggagatcatgggagtcctgcgcagcgtcgcggcgaggcgcccgtcggggaggcagcgggcacggagagagcggagagtgacggcgacaacgggtcccgcctgtcgcgcgaaccagggaaatatctacatctcgtctgcgccgccgctgggatttattagggttctacttctagcccaggccaactccacaccaatccaatcctggggcgggcgactgcctccttccctcgatttgacgtgcgcttcctcttcctcgctcgctctcggtcgcagtcacaggcccacaacacaagcaactttcttattactgtcggggttccgaagccaacaaaaggacgcatcattccaactaactttcagagcagcgcagcgtgtcttgctttgttggtgccttgcaaaccgcaggtgctgtgctacaattgcagaaataaggaagtatctttgatatataaaaatgagaaataggccaaggagtatgctatcacgatgagccgcccagatatatatatcgtgtgcctccgtcacatcgtgctagctggttcttttcttcatgaggcatatagggtatttattcaaatgcccgcaaagggagggcagtgcactgagtgcatcgggagggctcatagttcttctttgactgcaagggataggcagcaggtcttcttcagcctcttttcaattctccctttctgatggaagctggcgtgccggaaggtgccgagcaggtacatgtctcagctgaagaatccgaagactgccaagaaaggcgaggagaccacggtggccaagagcgagaagcgggggcaagaatctaagacgaatgccaagaagaaaatcttaggacgctcacggaagtgtgcccatgccgaacctgatggggagaaccgaaacggttgcagcagcactgatgcagacgagaactcacttgcagaaactgctgcctccgatcaggagaggaaggtggtgctgcaggaattgagaatcgaggtggatacatcacgagctgacaattccaatgacaacaaggagaatctgtcgagtgctccgagtgatgaagaagcattgaacaattcacattctgaaaatgaaaacagacagttggagaacaatgagaacgttcctctgaacgagaatgttgctctgaaggtggctaaactgcagagcaaagtgcatcaagagcaaccaggaaagctcaagaaaactaccaaccctaggccattcaggctaaggactgatgaaagaggagtgcttaaagaagcaaaaccagagaaaaggcagccgttcactgagaataattccacggcagtactcaaggatgcaaacagaggagtgacgaagaaacgaagcacccagattgtaacggctcagcagctcgatgagtccagctccaggccggccgtcaacagcatccaatgcagagctgtgaaaccggagagggtttctagggttgcatcatcaacacgaagagccaaaacagcaagtgaccttatggcaccttcttcccggactgggaagaagaggaaggcggctacggtgaagctgtcgaggatccaaacaccagctgcttgagctcgggcagatcaaggaggaaatgagaaactgccgacaacggtttttgttgtctgctccagcgacgagttctgtatttattactgcgtcgaattcgttttccggattaggtggatttatgtacactgatcatttctttctgcgagtcgtgtggtggaacccctctgctttgttaatgtaccgccaccgaccagattttttcttcttctgtagaatgattcagaatttgattatttttctgtaacttaattgaactggggaaaggaggcccggcccaacccaacccatgaaacatttcaattttagctgtgtactaggatccatttcatcttgctaccatgtgttgttgcccttgatagatatcagaaatagggtgtagtgtatgagaagtagagaaccgatgctcttttatagccctcaatagatatcagtttctttcttttctttgatttaca

SEQ ID NO: 28025 - DNA, 937 bp, Zea Mays
aggctgacagagagtccgttcctattctgcctggcgccatgatcatcgagaccctgaaggcgcgcatcttgcgcgcgctgaagccgtcgtccctctcggcagcgggcgacggcgcgcgctccccgaccaagccggcgcaccagtgccacggcggcgacgcgtccttcttcgacgcgcgggagccgctggacgcgtgggagctggtggacgacgggcgcgcggcgtcgcccggcgacccgctgctggggttccccgccgccgggggggagggcggagcgggcgtggtgctgtacacgacgacgctgcgcggcgtgcggcgcacgttcgaggactgcaacggcgtgcgcgcgctgctggagagcctgggcgcgccgttccaggagcgcgacgtgtccatggaccgcggcctgcgcgaccagctgtgggccgcggccggggagaaggcggtgccgccgcgcctgttcgtgcgcggccgcgacctcggcggcgcgggccaggtgctcgcgctccacgagcagggccgcctcgccccgctgctgccgtgcggagaggccggggcgagaagcaggtgcggcgcgtgcgccggggtcgggttcgtggtgtgcggcgcctgcgacggcagccggaaggcggggggagacggcggcgggcgctgccgcggcgggtgcaacgagaacggcctcgtcatgtgcccgctctgtctgtccatttagcggccgcgcagggcagggcggaagttgtgtccactccactgctgctggcctgaccgtctgagtgtgtgtttcgagttcttggttttgccacatcacgcttggagcgatgtgcgtgatgtatatatatgctgctagtttgtagatgtccatgtcaaaaaaaccatgcatgcttccatccatccatcatccatgtacctttcagatttcaaccgtatcaaccaaac

SEQ ID NO: 28026 - DNA, 869 bp, Zea Mays
tgcctgacctatttaaatatttaataaatctaaaaaacgtttgttaaacaagcatttcagattattgtttcggcctactataaacctctaacagaaacaataattctgaacaaaaacgaactcgcacaaactctcttttctttcccccaaccctcccacatatacactttttttcttctcttttataaaaccccaccccgaaaatgtctccgctagtcagagtcctcgcaccgcacgcaacaagtacgcaggcagcgcagcctcgagccgtcgccatggcgagtaagaaggactacccggtgaaggtgagcggggtgcagatcctgcccgatccggtcgaacccggcaagcccgccactttcaagatctccgcttctactgataaaaccatcgagaaggggaagctggtcatcgacgtaaagtatttcttcttctatgtgcactcggagacccgcgacatctgcggagagacttcctgcccagcgaccggcgacttcgtgctgtcccaccagcagacgctgccaggcttcactccgccgggctcctacacgatctacatgaagattgtcggggacgacaacgaggagctgagctgcatctcgttcgggttcagcatcggcttcgtcgcgtccagctgaacacgtccgagcccgggcacgagaggcatccagctcatggatgtaattacgtgaagcacactctgtatcctatgactttttgtgggtgtctgtgttcaactgagacgtttttatccggagttgaacatcacagtaaagcaaagtcactgataccatgtaatggaactctgagcgcttgatggggcccgtgttttttagactcacaataaagccggtttgtgtttgtgccta

SEQ ID NO: 28027 - DNA, 1325 bp, Zea Mays
ccacggagggcgacggcagccgaggacgttgttgcgcatcgtgataacttctccgaattagttataaacggacttcttttttccccctttttgggaccgatggggtatgcactattttaggcccgttaactcccaacccaagacgggccagaggatttctattgtagaaatgcagttaggcccattaggttttgcccttttttttcagactcggattggtccgccctccttgtgctccgccggcaatggcgtccaccgccgtcaagctcatcgacatcgcagtcaacttcacagatggcatgttcaagggcatctaccacggcaagcagtgccacgccgccgacatcccggccgtactcgcgcgcgcgtgggctgcaggcgtcgatcgcatcattgtcaccggaggctccctgaaagagtccagagaggcattgcagatcgccgagaccgacgggagactgttctgcactgtgggagtgcacccaacaagatgcggggaattcgaggagagtggagatcccgagggtcattttcaggcactgctggctctagcgaaggagggtttagataaaggcaaggtcgttgctgttggtgaatgtggtttggattatgacagacttcagttctgtccggcagatatgcaaaagaagtacttcgagaaacaatttgagttggctgaagcagtaaaactgcccatgtttcttcacatgcgtgctgctggtgaagacttctgtgaaatcatgacacggaatttgcacagattccctggtggggttacacattccttcactgactcagcagaagatcgggacatgctactttcttttgagaagatgtttataggtgttaatggttgctctctgaaaactaacgaaaatcttgaggttctacgaggcattcctgtcgagaggttgatgatagaaacagattctccatattgtgacataagaaatactcatgctggaagccagtatgtaaaatctgtctggccatctaagaagaaagaaaagtatgagccagattcaacagtaaaaggtcgcaatgagccttgtttagttaggcaagttcttgaggtagtggctggaagcaaaggaatttctgacatagaaggcctgagtagaactctgtaccacaacacatgcaggctcttctttcctcaagatcttgacgcttctgctaatgcgcagcttgagagtggtactgccgtccaggattgctgatgtcagagtgatttttttattataaatgtttccttttgactggtactgccgtccagaagtgcattaagtactttctcttatcaacttaaagattttgggttgaac

SEQ ID NO: 28028 - DNA, 1077 bp, Zea Mays
gtttttaatgaaacagttgaaaattccctggtggggttacacattccttcactgactcagcagaagatcgggacatgctactttcttttgagaagatgtttataggtgttaatggttgctctctgaaaactaacgaaaatcttgaggttctacgaggcattcctgtcgagaggttgatgatagaaacagattctccatattgtgacataagaaatactcatgctggaagccagtatgtaaaatctgtctggccatctaagaagaaagaaaagtatgagccagattcaacagtaaaaggtcgcaatgagccttgtttagttaggcaagttcttgaggtagtggctggaagcaaaggaatttctgacatagaaggcctgagtagaactctgtaccacaacacatgcaggctcttctttcctcaagatcttgacgcttctgctaatgcgcagcttgagagtggtactgccgtccaggattgctgatgtcagagtgatttttttattataaatgtttccttttgactgttgcggcggcgtagggcgggggtaggacagggcgcccacgcggtggcggaggccgacatggtggcgctgcaggttctggaaccggaggctgagaagcggggcaggggcgtaatggcggctgcggtggccatggccggagcgcagagatttatagaatatgacgaatattgaataaattattcactatccaggcgtaggggtgggcattttaaaaccgaacctgaacccgaaccaaacccgaatagaccgaattgtcggtctattcgggttttcgggttcgggttcggttcctatatgtgctatatttcgggatatgtgttcgggttcggttcctaacctttaaaacccaaatagacctaataacccgaaatataaaaaagctcttaatatgtgatggtattattatatgtatgatttataaacttagtagcttgaaataatgatatcatcttaacgatagtatatatatctttgtatgctattttttatagtcacttgtagtaatagtactttcgattaattattcattgtatatattttaacaaaatatact

SEQ ID NO: 28029 - DNA, 1648 bp, Zea Mays
aattcagccatgtgttaggattggagctactgaaagttctcgcaggtcgttgctgttggtgaatgtggtttggattatgacagacttcagttctgtccggcagatatgcaaaagaagtacttcgagaaacaatttgagttggctgaagcagtaaaactgcccatgtttcttcacatgcgtgctgctggtgaagacttctgtgaaatcatgacacggaatttgcacagattccctggtggggttacacattccttcactgactcagcagaagatcgggacatgctactttcttttgagaagatgtttataggtgttaatggttgctctctgaaaactaacgaaaatcttgaggttctacgaggcattcctgtcgagaggttgatgatagaaacagattctccatattgtgacataagaaatactcatgctggaagccagtatgtaaaatctgtctggccatctaagaagaaagaaaagtatgagccagattcaacagtaaaaggtcgcaatgagccttgtttagttaggcaagttcttgaggtagtggctggaagcaaaggaatttctgacatagaaggcctgagtagaactctgtaccacaacacatgcaggctcttctttcctcaagatcttgacgcttctgctaatgcgcagcttgagagtggtactgccgtccaggattgctgatgtcagagtgatttttttattataaatgtttccttttgactggtactgccgtccaggtttcgtacaacttccaatatgcctatgaaatatttttggtcttatatttcccatgtttcatgagcctgatgacatgtcaggcacgttctgactatgtacagccctactgaggctatgtcctaaaatcatttagggctaatttgacaatcatatttttcaaggatttttcattttttttcaagggaaataaattagttcattttctctttaggaaaaatgggaatcccctgagaaaattaagttgtcaaactagctcttaaactgttctttttactgagtatacacaaaacagaggtacaacttgaattgatcacatctttcaaacgtcaattgattcctcggtggctgcagttgcggcggcgtagggcgggggtaggacagggcgcccacgcggtggcggaggccgacatggtggcgctgcaggttctggaaccggaggctgagaagcggggcaggggcgtaatggcggctgcggtggccatggccggagcgcagagatttatagaatatgacgaatattgaataaattattcactatccaggcgtaggggtgggcattttaaaaccgaacctgaacccgaaccaaacccgaatagaccgaattgtcggtctattcgggttttcgggttcgggttcggttcctatatgtgctatatttcgggatatgtgttcgggttcggttcctaacctttaaaacccaaatagacctaataacccgaaatataaaaaagctcttaatatgtgatggtattattatatgtatgatttataaacttagtagcttgaaataatgatatcatcttaacgatagtatatatatctttgtatgctattttttatagtcacttgtagtaatagtactttcgattaattattcattgtatatattttaacaaaatatact

SEQ ID NO: 28030 - DNA, 1809 bp, Zea Mays
agaggatttctattgtagaaatgcagttaggcccattaggttttgcccttttttttcagactcggattggtccgccctccttgtgctccgccggcaatggcgtccaccgccgtcaagctcatcggcaagttcctccgctccctctcccacctcaccgtcctgtatcgtcccctctctaccccggactgaccctctgccttcaccttgccctccacccccctccctccccttctgcggccgtggcgagcaccccaccagacatcgcagtcaacttcacagatggcatgttcaagggcatctaccacggcaagcagtgccacgccgccgacatcccggccgtactcgcgcgcgcgtgggctgcaggcgtcgatcgcatcattgtcaccggaggctccctgaaagagtccagagaggcattgcagatcgccgagaccgacgggagactgttctgcactgtgggagtgcacccaacaagatgcggggaattcgaggagagtggagatcccgagggtcattttcaggcactgctggctctagcgaaggagggtttagataaaggtcgttgctgttggtgaatgtggtttggattatgacagacttcagttctgtccggcagatatgcaaaagaagtacttcgagaaacaatttgagttggctgaagcagtaaaactgcccatgtttcttcacatgcgtgctgctggtgaagacttctgtgaaatcatgacacggaatttgcacagattccctggtggggttacacattccttcactgactcagcagaagatcgggacatgctactttcttttgagaagatgtttataggtgttaatggttgctctctgaaaactaacgaaaatcttgaggttctacgaggcattcctgtcgagaggttgatgatagaaacagattctccatattgtgacataagaaatactcatgctggaagccagtatgtaaaatctgtctggccatctaagaagaaagaaaagtatgagccagattcaacagtaaaaggtcgcaatgagccttgtttagttaggcaagttcttgaggtagtggctggaagcaaaggaatttctgacatagaaggcctgagtagaactctgtaccacaacacatgcaggctcttctttcctcaagatcttgacgcttctgctaatgcgcagcttgagagtggtactgccgtccaggattgctgatgtcagagtgatttttttattataaatgtttccttttgactggtactgccgtccagttgcggcggcgtagggcgggggtaggacagggcgcccacgcggtggcggaggccgacatggtggcgctgcaggttctggaaccggaggctgagaagcggggcaggggcgtaatggcggctgcggtggccatggccggagcgcagagatttatagaatatgacgaatattgaataaattattcactatccaggcgtaggggtgggcattttaaaaccgaacctgaacccgaaccaaacccgaatagaccgaattgtcggtctattcgggttttcgggttcgggttcggttcctatatgtgctatatttcgggatatgtgttcgggttcggttcctaacctttaaaacccaaatagacctaataacccgaaatataaaaaagctcttaatatgtgatggtattattatatgtatgatttataaacttagtagcttgaaataatgatatcatcttaacgatagtatatatatctttgtatgctattttttatagtcacttgtagtaatagtactttcgattaattattcattgtatatattttaacaaaatatact

SEQ ID NO: 28031 - DNA, 1730 bp, Zea Mays
agaggatttctattgtagaaatgcagttaggcccattaggttttgcccttttttttcagactcggattggtccgccctccttgtgctccgccggcaatggcgtccaccgccgtcaagctcatcggcaagttcctccgctccctctcccacctcaccgtcctgtatcgtcccctctctaccccggactgaccctctgccttcaccttgccctccacccccctccctccccttctgcggccgtggcgagcaccccaccagacatcgcagtcaacttcacagatggcatgttcaagggcatctaccacggcaagcagtgccacgccgccgacatcccggccgtactcgcgcgcgcgtgggctgcaggcgtcgatcgcatcattgtcaccggaggctccctgaaagagtccagagaggcattgcagatcgccgagaccgacgggagactgttctgcactgtgggagtgcacccaacaagatgcggggaattcgaggagagtggagatcccgagggtcattttcaggcactgctggctctagcgaaggagggtttagataaaggtcgttgctgttggtgaatgtggtttggattatgacagacttcagttctgtccggcagatatgcaaaagaagtacttcgagaaacaatttgagttggctgaagcagtaaaactgcccatgtttcttcacatgcgtgctgctggtgaagacttctgtgaaatcatgacacggaatttgcacagattccctggtggggttacacattccttcactgactcagcagaagatcgggacatgctactttcttttgagaagatgtttataggtgttaatggttgctctctgaaaactaacgaaaatcttgaggttctacgaggcattcctgtcgagaggttgatgatagaaacagattctccatattgtgacataagaaatactcatgctggaagccagtatgtaaaatctgtctggccatctaagaagaaagaaaagtatgagccagattcaacagtaaaaggtcgcaatgagccttgtttagttaggcaagttcttgaggtagtggctggaagcaaaggaatttctgacatagaaggcctgagtagaactctgtaccacaacacatgcaggctcttctttcctcaagatcttgacgcttctgctaatgcgcagcttgagagtgttgcggcggcgtagggcgggggtaggacagggcgcccacgcggtggcggaggccgacatggtggcgctgcaggttctggaaccggaggctgagaagcggggcaggggcgtaatggcggctgcggtggccatggccggagcgcagagatttatagaatatgacgaatattgaataaattattcactatccaggcgtaggggtgggcattttaaaaccgaacctgaacccgaaccaaacccgaatagaccgaattgtcggtctattcgggttttcgggttcgggttcggttcctatatgtgctatatttcgggatatgtgttcgggttcggttcctaacctttaaaacccaaatagacctaataacccgaaatataaaaaagctcttaatatgtgatggtattattatatgtatgatttataaacttagtagcttgaaataatgatatcatcttaacgatagtatatatatctttgtatgctattttttatagtcacttgtagtaatagtactttcgattaattattcattgtatatattttaacaaaatatact

SEQ ID NO: 28032 - DNA, 1855 bp, Zea Mays
agaggatttctattgtagaaatgcagttaggcccattaggttttgcccttttttttcagactcggattggtccgccctccttgtgctccgccggcaatggcgtccaccgccgtcaagctcatcggcaagttcctccgctccctctcccacctcaccgtcctgtatcgtcccctctctaccccggactgaccctctgccttcaccttgccctccacccccctccctccccttctgcggccgtggcgagcaccccaccagacatcgcagtcaacttcacagatggcatgttcaagggcatctaccacggcaagcagtgccacgccgccgacatcccggccgtactcgcgcgcgcgtgggctgcaggcgtcgatcgcatcattgtcaccggaggctccctgaaagagtccagagaggcattgcagatcgccgagaccgacgggagactgttctgcactgtgggagtgcacccaacaagatgcggggaattcgaggagagtggagatcccgagggtcattttcaggcactgctggctctagcgaaggagggtttagataaagtaattcagccatgtgttaggattggagctactgaaagttctcgcaggtcgttgctgttggtgaatgtggtttggattatgacagacttcagttctgtccggcagatatgcaaaagaagtacttcgagaaacaatttgagttggctgaagcagtaaaactgcccatgtttcttcacatgcgtgctgctggtgaagacttctgtgaaatcatgacacggaatttgcacagattccctggtggggttacacattccttcactgactcagcagaagatcgggacatgctactttcttttgagaagatgtttataggtgttaatggttgctctctgaaaactaacgaaaatcttgaggttctacgaggcattcctgtcgagaggttgatgatagaaacagattctccatattgtgacataagaaatactcatgctggaagccagtatgtaaaatctgtctggccatctaagaagaaagaaaagtatgagccagattcaacagtaaaaggtcgcaatgagccttgtttagttaggcaagttcttgaggtagtggctggaagcaaaggaatttctgacatagaaggcctgagtagaactctgtaccacaacacatgcaggctcttctttcctcaagatcttgacgcttctgctaatgcgcagcttgagagtggtactgccgtccaggattgctgatgtcagagtgatttttttattataaatgtttccttttgactggtactgccgtccagttgcggcggcgtagggcgggggtaggacagggcgcccacgcggtggcggaggccgacatggtggcgctgcaggttctggaaccggaggctgagaagcggggcaggggcgtaatggcggctgcggtggccatggccggagcgcagagatttatagaatatgacgaatattgaataaattattcactatccaggcgtaggggtgggcattttaaaaccgaacctgaacccgaaccaaacccgaatagaccgaattgtcggtctattcgggttttcgggttcgggttcggttcctatatgtgctatatttcgggatatgtgttcgggttcggttcctaacctttaaaacccaaatagacctaataacccgaaatataaaaaagctcttaatatgtgatggtattattatatgtatgatttataaacttagtagcttgaaataatgatatcatcttaacgatagtatatatatctttgtatgctattttttatagtcacttgtagtaatagtactttcgattaattattcattgtatatattttaacaaaatatact

SEQ ID NO: 28033 - DNA, 2048 bp, Zea Mays
agaggatttctattgtagaaatgcagttaggcccattaggttttgcccttttttttcagactcggattggtccgccctccttgtgctccgccggcaatggcgtccaccgccgtcaagctcatcgacatcgcagtcaacttcacagatggcatgttcaagggcatctaccacggcaagcagtgccacgccgccgacatcccggccgtactcgcgcgcgcgtgggctgcaggcgtcgatcgcatcattgtcaccggaggctccctgaaagagtccagagaggcattgcagatcgccgagaccgacgggagactgttctgcactgtgggagtgcacccaacaagatgcggggaattcgaggagagtggagatcccgagggtcattttcaggcactgctggctctagcgaaggagggtttagataaaggtcgttgctgttggtgaatgtggtttggattatgacagacttcagttctgtccggcagatatgcaaaagaagtacttcgagaaacaatttgagttggctgaagcagtaaaactgcccatgtttcttcacatgcgtgctgctggtgaagacttctgtgaaatcatgacacggaatttgcacaggtagcatataatctgtattcgattccctggtggggttacacattccttcactgactcagcagaagatcgggacatgctactttcttttgagaagatgtttataggtgttaatggttgctctctgaaaactaacgaaaatcttgaggttctacgaggcattcctgtcgagaggttgatgatagaaacagattctccatattgtgacataagaaatactcatgctggaagccagtatgtaaaatctgtctggccatctaagaagaaagaaaagtatgagccagattcaacagtaaaaggtcgcaatgagccttgtttagttaggcaagttcttgaggtagtggctggaagcaaaggaatttctgacatagaaggcctgagtagaactctgtaccacaacacatgcaggctcttctttcctcaagatcttgacgcttctgctaatgcgcagcttgagagtggtactgccgtccaggattgctgatgtcagagtgatttttttattataaatgtttccttttgactggtactgccgtccaggtttcgtacaacttccaatatgcctatgaaatatttttggtcttatatttcccatgtttcatgagcctgatgacatgtcaggcacgttctgactatgtacagccctactgaggctatgtcctaaaatcatttagggctaatttgacaatcatatttttcaaggatttttcattttttttcaagggaaataaattagttcattttctctttaggaaaaatgggaatcccctgagaaaattaagttgtcaaactagctcttaaactgttctttttactgagtatacacaaaacagaggtacaacttgaattgatcacatctttcaaacgtcaattgattcctcggtggctgcagttgcggcggcgtagggcgggggtaggacagggcgcccacgcggtggcggaggccgacatggtggcgctgcaggttctggaaccggaggctgagaagcggggcaggggcgtaatggcggctgcggtggccatggccggagcgcagagatttatagaatatgacgaatattgaataaattattcactatccaggcgtaggggtgggcattttaaaaccgaacctgaacccgaaccaaacccgaatagaccgaattgtcggtctattcgggttttcgggttcgggttcggttcctatatgtgctatatttcgggatatgtgttcgggttcggttcctaacctttaaaacccaaatagacctaataacccgaaatataaaaaagctcttaatatgtgatggtattattatatgtatgatttataaacttagtagcttgaaataatgatatcatcttaacgatagtatatatatctttgtatgctattttttatagtcacttgtagtaatagtactttcgattaattattcattgtatatattttaacaaaatatact

SEQ ID NO: 28034 - DNA, 1774 bp, Zea Mays
ccacggagggcgacggcagccgaggacgttgttgcgcatcgtgataacttctccgaattagttataaacggacttcttttttccccctttttgggaccgatggggtatgcactattttaggcccgttaactcccaacccaagacgggccagaggatttctattgtagaaatgcagttaggcccattaggttttgcccttttttttcagactcggattggtccgccctccttgtgctccgccggcaatggcgtccaccgccgtcaagctcatcgacatcgcagtcaacttcacagatggcatgttcaagggcatctaccacggcaagcagtgccacgccgccgacatcccggccgtactcgcgcgcgcgtgggctgcaggcgtcgatcgcatcattgtcaccggaggctccctgaaagagtccagagaggcattgcagatcgccgagaccgacgggagactgttctgcactgtgggagtgcacccaacaagatgcggggaattcgaggagagtggagatcccgagggtcattttcaggcactgctggctctagcgaaggagggtttagataaaggcaaggtcgttgctgttggtgaatgtggtttggattatgacagacttcagttctgtccggcagatatgcaaaagaagtacttcgagaaacaatttgagttggctgaagcagtaaaactgcccatgtttcttcacatgcgtgctgctggtgaagacttctgtgaaatcatgacacggaatttgcacagattccctggtggggttacacattccttcactgactcagcagaagatcgggacatgctactttcttttgagaagatgtttataggtgttaatggttgctctctgaaaactaacgaaaatcttgaggttctacgaggcattcctgtcgagaggttgatgatagaaacagattctccatattgtgacataagaaatactcatgctggaagccagtatgtaaaatctgtctggccatctaagaagaaagaaaagtatgagccagattcaacagtaaaaggtcgcaatgagccttgtttagttaggcaagttcttgaggtagtggctggaagcaaaggaatttctgacatagaaggcctgagtagaactctgtaccacaacacatgcaggctcttctttcctcaagatcttgacgcttctgctaatgcgcagcttgagagtggtactgccgtccaggattgctgatttgcggcggcgtagggcgggggtaggacagggcgcccacgcggtggcggaggccgacatggtggcgctgcaggttctggaaccggaggctgagaagcggggcaggggcgtaatggcggctgcggtggccatggccggagcgcagagatttatagaatatgacgaatattgaataaattattcactatccaggcgtaggggtgggcattttaaaaccgaacctgaacccgaaccaaacccgaatagaccgaattgtcggtctattcgggttttcgggttcgggttcggttcctatatgtgctatatttcgggatatgtgttcgggttcggttcctaacctttaaaacccaaatagacctaataacccgaaatataaaaaagctcttaatatgtgatggtattattatatgtatgatttataaacttagtagcttgaaataatgatatcatcttaacgatagtatatatatctttgtatgctattttttatagtcacttgtagtaatagtactttcgattaattattcattgtatatattttaacaaaatatact

SEQ ID NO: 28035 - DNA, 1750 bp, Zea Mays
ccacggagggcgacggcagccgaggacgttgttgcgcatcgtgataacttctccgaattagttataaacggacttcttttttccccctttttgggaccgatggggtatgcactattttaggcccgttaactcccaacccaagacgggccagaggatttctattgtagaaatgcagttaggcccattaggttttgcccttttttttcagactcggattggtccgccctccttgtgctccgccggcaatggcgtccaccgccgtcaagctcatcgacatcgcagtcaacttcacagatggcatgttcaagggcatctaccacggcaagcagtgccacgccgccgacatcccggccgtactcgcgcgcgcgtgggctgcaggcgtcgatcgcatcattgtcaccggaggctccctgaaagagtccagagaggcattgcagatcgccgagaccgacgggagactgttctgcactgtgggagtgcacccaacaagatgcggggaattcgaggagagtggagatcccgagggtcattttcaggcactgctggctctagcgaaggagggtttagataaaggcaaggtcgttgctgttggtgaatgtggtttggattatgacagacttcagttctgtccggcagatatgcaaaagaagtacttcgagaaacaatttgagttggctgaagcagtaaaactgcccatgtttcttcacatgcgtgctgctggtgaagacttctgtgaaatcatgacacggaatttgcacagattccctggtggggttacacattccttcactgactcagcagaagatcgggacatgctactttcttttgagaagatgtttataggtgttaatggttgctctctgaaaactaacgaaaatcttgaggttctacgaggcattcctgtcgagaggttgatgatagaaacagattctccatattgtgacataagaaatactcatgctggaagccagtatgtaaaatctgtctggccatctaagaagaaagaaaagtatgagccagattcaacagtaaaaggtcgcaatgagccttgtttagttaggcaagttcttgaggtagtggctggaagcaaaggaatttctgacatagaaggcctgagtagaactctgtaccacaacacatgcaggctcttctttcctcaagatcttgacgcttctgctaatgcgcagcttgagagtgttgcggcggcgtagggcgggggtaggacagggcgcccacgcggtggcggaggccgacatggtggcgctgcaggttctggaaccggaggctgagaagcggggcaggggcgtaatggcggctgcggtggccatggccggagcgcagagatttatagaatatgacgaatattgaataaattattcactatccaggcgtaggggtgggcattttaaaaccgaacctgaacccgaaccaaacccgaatagaccgaattgtcggtctattcgggttttcgggttcgggttcggttcctatatgtgctatatttcgggatatgtgttcgggttcggttcctaacctttaaaacccaaatagacctaataacccgaaatataaaaaagctcttaatatgtgatggtattattatatgtatgatttataaacttagtagcttgaaataatgatatcatcttaacgatagtatatatatctttgtatgctattttttatagtcacttgtagtaatagtactttcgattaattattcattgtatatattttaacaaaatatact

SEQ ID NO: 28036 - DNA, 1069 bp, Zea Mays
agaggatttctattgtagaaatgcagttaggcccattaggttttgcccttttttttcagactcggattggtccgccctccttgtgctccgccggcaatggcgtccaccgccgtcaagctcatcggcaagttcctccgctccctctcccacctcaccgtcctgtatcgtcccctctctaccccggactgaccctctgccttcaccttgccctccacccccctccctccccttctgcggccgtggcgagcaccccaccagacatcgcagtcaacttcacagatggcatgttcaagggcatctaccacggcaagcagtgccacgccgccgacatcccggccgtactcgcgcgcgcgtgggctgcaggcgtcgatcgcatcattgtcaccggaggctccctgaaagagtccagagaggcattgcagatcgccgagaccgacgggagactgttctgcactgtgggagtgcacccaacaagatgcggggaattcgaggagagtggagatcccgagggtcattttcaggcactgctggctctagcgaaggagggtttagataaaggtcgttgctgttggtgaatgtggtttggattatgacagacttcagttctgtccggcagatatgcaaaagaagtacttcgagaaacaatttgagttggctgaagcagtaaaactgcccatgtttcttcacatgcgtgctgctggtgaagacttctgtgaaatcatgacacggaatttgcacagattccctggtggggttacacattccttcactgactcagcagaagatcgggacatgctactttcttttgagaagatgtttataggtgttaatggttgctctctgaaaactaacgaaaatcttgaggttctacgaggcattcctgtcgagaggttgatgatagaaacagattctccatattgtgacataagaaatactcatgctggaagccagtatgtaaaatctgtctggccatctaagaagaaagaaaagtatgagccagattcaacagtaaaaggtcgcaatgagccttgtttagttagaaaatttgactcggagctatcggtttcag

SEQ ID NO: 28037 - DNA, 1088 bp, Zea Mays
gtcggaggccacaccagcagaagcttgatggcttgccagcgatggtataggtcatcctctccaatgaccccactgtgcagcttgaggccactacacagttcaagaagttgctctccataggcgaggtttggatcttatgtgcacttacctattctagcataggtaactgcacataatcattgtggcaaggtttttgaagcgagtagctgagcctcggcagtcagtaatttctgttgttgctttgccaccctcagcacgcgatgaagttgttgttctgaacatacagctggttcagagtaactgaaaagcctataccagaaaatatgcccctactaaatgcattatcaacaacatcaatgatttgaacaatcatgtttccttcaacactacaaggaactggtgaaaattggacaatgatgaagacatctgtgtcacttaatatctaaattatgaaggagatagtagatgagtttgactgggaaatggacgattacgagattttgctgatcagaaagttcaataaggtggcctgccagaggatgagaaagaaaaattcaaggaattcctgaaggagaaggttagagaaaggaagagagaactgaaacaggctaaagaagccaggaggaaagctattgatgatatggatcctaaggggaaagggtaaaccaaaatcaaaatcaaatccaaaggatacatgttcatggtttgatggcggcagaaaagccatgatccaactagctggagaacttttctggaaaatgggtgaagacctggatagcatcgcaaaagattatacaacttcttttcataagtggcatgtctgttagttttatttaccacaatgcccaccacctttaagcccagttaaacaggtgaagcagggcagaacaagaagaggcaggtttcaatctcgaagtggacagctcttcgctgtggcactttttgattcgtgatggtcttggatgaaaatctcgggctgagaagaatgaacgatatatgcaaaagctcacaaggagcaggctgagagatgtaagtacatatgctttacatatctatatcaacttgattatgcttgctttagtccatga

SEQ ID NO: 28038 - DNA, 1553 bp, Zea Mays
atccacatttcgtataatccttcattgactgtctttgctttcgattggtaacatgataagcttactactcttcagaatcagagagctgttcagatgactggagttcacattcatcttctgctggcaacccagacataccatatgtggttgtctccaagtcatcaattgtgactgctgtatgcaaggagattcttggctgctacaggaagttacttggcattcctgatctgttgaatcaaccaaacatgtcaattctgaagcaacttttgcagactttacagccaactgaaaattttgatgatgttctttccgagttccaaccatctcttgctccttgcaatgttgattacctgtattgtggagcatgtaaaatattggaggatattatggattcagtgtcctcattttcataccttctgtcttctaatgtgttaattactatacaatcaattgtaaattctgttgttgtgttgttggacaaatctggggaaccaaatgggaaaaatatacacatgggatgctccaaagcaatcattccctttctgcgaaagcgtcttggatactcagctcataagctgctcagtgctgatttccctagcgaagatgctggaaaaggatggcagagtaaaggtgatcttatacagaagatattgcaaatataccttaggaatagtgactctacttcagatctacttgctgagataggtcgtgaattgcctaaggaaccttcgctcaaaacaaaagataaccaagatgtatcgtatggttttccaacattgtgttcctccactattacctcttggtaccgtgtgcttcacgaggagaacacagggagtttaaacaagacgatcaaacaagcactgaaggctagaggatcagttgatactattcttcaagagattcagaaatcagtggatgcatttgtctctctaataggaatgtgcaagtcccacgaaaaggtttctatgcatgcaatggcagttaaacatggggggaaatttattgacacatttctgaaagccttcaactttctagagagacatttcgagcaacataatgacaccatagttaaaatgctaaaacaactccagaaaggaacaagaataatccaatccatatgttcagatgctaagggtaacaagcggacaatgatcacaagcaaagtacctcctgcaaagagatccatggagcggttcttgttccaggtcaaggcgctgctacacagctgctccgccgagaaggaatttcagatgggcaatttgaagcacaaggacttgcaaggccatgtggtgagctctcaggcgtatgggaacgtggatgaggaagatgaggagcagacggaggtcgactccgaccttccagctgatgagcacgataatggcaatgccatggaggaggatgctgtggaaggtagcaacgagacgccgatggaggaggaagaggaatagtggcatagattatgtagctcgacggcggagggtggcggcggcacacggttttgctcccacgtcgtacacgtaagcagtgacatggatggatgtacgtggacgttg

SEQ ID NO: 28039 - DNA, 5274 bp, Zea Mays
cttcctcccgtggcgccaaaaatttcatttcattttccccaaacccatcccccaattcccccccaaaaccttcccagtgtgtcttctcgacgaaggaagccatctcgtctctctccgctccggcgattgatcggcggcgccgatggtgttcctgcagcgcagccgccccgtcaacccccgcaagcgcccggcaccgccgcccgagctcgagcccgagcccgagccccccaggcccggcccggacgcttcatccgccgtcgacgcggcggcggcgctgctcgcggacgcgggctgcacgctcctcgtcccgccgcaccagccgccgtccctcccctcgccgcactccttcgctgcccgcctctcccgcaagctctccgccggcggggacgcctcctcgccctcggcccccgcccggcgcctcctcgagggcctcgccgccttcgcggcctcctcccccgcgcggctccgccagctgctcctcccgacggcgccgcacgagccgagccttgcccgcgcgctcctctccgtccccgcgctccagccgggcctgctcgcgctgctcctcgagaagctgcccgagcacttcggcggcgacggcgcgctcgacggatcgccgctgcaggacgacgtggggaggctcatcgtgtcgcagttccgctggctcgatttcctcgccgacgccgacgccttcgtcgacaagctcgtggaggtgctctccgtggccccgcaccgcctgaagaaggagatcatcggctcgctcccggagatcgttggcgacaagagccacgccgccgtggtcgccgcgctcgagaagctcctgcaggaggactccgaaatcgttgtcgccgtgctcgatgtgctgtcggatcttaacctcaacgaggagctgcaggagcaggcagtgactgttgcgatatcatgcatccggacaattgctccagaccagacgcctcatctgctcaggttcttgctgttgtcggctacaccagtcaatgctgggaggattatatcgcagatacgtgagcagctcaagtttgttggtgttgtcgatccacgggctgcacggagtaagaagctcaaagggaaggcatcagctaatagcactgatggggcaatacttgatacactgagatcaggcctacggtttaagaatatgctttgtgaggctttcctgaaggagctgaagtcagttgaccacccgagggatcacaaagtgattgatgtttggctcatcatgcttatctatgccaatggtggtgctctagagaaggctgcaaagaaaatactgaagtccaagatcttacatgagtgcataagagagacactgtttgatcaatgtattcatgggaacactgaactggtaaaggaagagaaagctagagagtttgcggcttatttgttcacagcactatttgaagagttcactgatacatactccaggcaagagcttgtgggttcattggtcactcatataggatctggggttagttacgaagtttcatctgctctggatatcatgatttctttaacatccaacaattcggaagaactgattcctatatcttcacacataactggaaaaaacatactttcctttgtatttagtgcttttcattttcttaatagacatatcaaccttttcaatacaggaatattggattacttggagagttttggcgaagataatcttcggaaggtttatgatatcttctgtcgtttggcactggctgctggcttcaatactggttcaggtggctcttcagttgctaacgaggttctaatggtggtgaggaagcaggttagtaatccagacatgaagtatagacggatgggaataattggggttttaaggatagtttctactatcgcttccactgatgtcaatgctgctgtgaactgttcatcatctcagcaaccaaattgtgaggaggccctagaattgctgaagatgtctgtcaactcatgcaaatttgtgacattactcttgatttttctatatgatgaattagctgctttgctggatagcaaagttatccactcttcaattcatgactgggtaggagagcatgttgcagagttatttgagacaccttttcttgccgatcttgaaaatggtgaactaccagagaaatatctatgtgatggcatagaaggagaattatggatgaagttggatggaaatatctctccaatccttatgtcccaattttcacttttaacaacaattgaacgtttaggaaatgaaggctcacttggtggaatagatgcactacttggctgtcctttgcaccttccctctaccaagcacttggatggagctaactggggaaacctgtcaggattgcagaaaaaaacagtgtgctattccctatactatgcaataaactggatcagggagttgctcaatgctttcggcacacaggttgaaagtagggttgataatgtttcacagaaagcaaggaacgagacagcagtaaaacttctgaagcgtctaagaaatctgatattacttgaaggcttgctgaatgcatttctcaaagattatccattatctttacctgagttgcgatatcttggggattgctctggatcagcaagcaccagcaaattcaacattccaaagaacatgggagaggagagcataaatggtgcttccagcaaaagacagaagggttgcaagggcaaagtctcagaaaaagtgaatcctgatgataaactcaagcaacctacaatactggatgctttcaaaagagcaggagtaacagtcagtcaagcaacaaataaagcttcttcacaaccatcatcaagtggaatgatgtcaaaggatatcgaacaagatgctactgatcctggtgaacttgggcttatagatttaatggcagcaccagttaaactagatatgcaaagatacaaattcagaactatccgtgcaacgtgcttgtctttgttgaactactcagagtgtcaaggttcatcttcttaccttcaaactgagttaccaacatatctatatcttctccgtgatctgcataacaaattagataatctgaatccttcaatcaagccttttcttagtacttctaaagcaaaatatactcctactcattgccataagagtacacaagattttcttgacaaaatccagccactattcttagttttaaggaagcatctggatggagcagtttcaatgatcaaagatgaatcagagagctgttcagatgactggagttcacattcatcttctgctggcaacccagacataccatatgtggttgtctccaagtcatcaattgtgactgctgtatgcaaggagattcttggctgctacaggaagttacttggcattcctgatctgttgaatcaaccaaacatgtcaattctgaagcaacttttgcagactttacagccaactgaaaattttgatgatgttctttccgagttccaaccatctcttgctccttgcaatgttgattacctgtattgtggagcatgtaaaatattggaggatattatggattcagtgtcctcattttcataccttctgtcttctaatgtgttaattactatacaatcaattgtaaattctgttgttgtgttgttggacaaatctggggaaccaaatgggaaaaatatacacatgggatgctccaaagcaatcattccctttctgcgaaagcgtcttggatactcagctcataagctgctcagtgctgatttccctagcgaagatgctggaaaaggatggcagagtaaaggtgatcttatacagaagatattgcaaatataccttaggaatagtgactctacttcagatctacttgctgagataggtcgtgaattgcctaaggaaccttcgctcaaaacaaaagataaccaagatgtatcgtatggttttccaacattgtgttcctccactattacctcttggtaccgtgtgcttcacgaggagaacacagggagtttaaacaagacgatcaaacaagcactgaaggctagaggatcagttgatactattcttcaagagattcagaaatcagtggatgcatttgtctctctaataggaatgtgcaagtcccacgaaaaggtttctatgcatgcaatggcagttaaacatggggggaaatttattgacacatttctgaaagccttcaactttctagagagacatttcgagcaacataatgacaccatagttaaaatgctaaaacaactccagaaaggaacaagaataatccaatccatatgttcagatgctaagggtaacaagcggacaatgatcacaagcaaagtacctcctgcaaagagatccatggagcggttcttgttccaggtcaaggcgctgctacacagctgctccgccgagaaggaatttcagatgggcaatttgaagcacaaggacttgcaaggccatgtggtgagctctcaggcgtatgggaacgtggatgaggaagatgaggagcagacggaggtcgactccgaccttccagctgatgagcacgataatggcaatgccatggaggaggatgctgtggaaggtagcaacgagacgccgatggaggaggaagaggaatagtggcataggtaccaatctgtacatctctttctctctaagccggccaaaaatctgtcccaaaaattaacagttttgtgtgtgcatttagtgtagaaaaaaagataggatccccaccagaatctaggttgcaacgtcacttgtaaatatggaagtctgaataagtagtttatatattgctagcagtggtcgtttcataaccaaaacaccattaatattaatagcaaactcataaacacaaaatgacatagaaagaagcaatattacaacgcgaggggaaaagggtggtccgcctctggctcgctctgggagatgacgagattcagatggcctttgcgggtggcgcggtggaggcggagaggtcggcgaggagcggctcgttggcggaggcgccgccggcgttggtgggggagtccgggtcgtggttggggtcgagcgcgcggtccatggcgcgtcggccggtctcgaggcagggcttgcatgccatctcgatggtgatccagccgagcaccaccgcggcgatcgcgatcaccgccgtcaccaccgcccccatcgcgatgaagtattcctctcgtcctctgcgcggacggcagatctggtggtgtggtggatgcagtggagtgtccacgggacgggtgctgggtgcggaaactgcgaaccagttacagagggacaaaggggccgttgctgtgggtcccggc

SEQ ID NO: 28040 - DNA, 3669 bp, Zea Mays
cttcctcccgtggcgccaaaaatttcatttcattttccccaaacccatcccccaattcccccccaaaaccttcccagtgtgtcttctcgacgaaggaagccatctcgtctctctccgctccggcgattgatcggcggcgccgatggtgttcctgcagcgcagccgccccgtcaacccccgcaagcgcccggcaccgccgcccgagctcgagcccgagcccgagccccccaggcccggcccggacgcttcatccgccgtcgacgcggcggcggcgctgctcgcggacgcgggctgcacgctcctcgtcccgccgcaccagccgccgtccctcccctcgccgcactccttcgctgcccgcctctcccgcaagctctccgccggcggggacgcctcctcgccctcggcccccgcccggcgcctcctcgagggcctcgccgccttcgcggcctcctcccccgcgcggctccgccagctgctcctcccgacggcgccgcacgagccgagccttgcccgcgcgctcctctccgtccccgcgctccagccgggcctgctcgcgctgctcctcgagaagctgcccgagcacttcggcggcgacggcgcgctcgacggatcgccgctgcaggacgacgtggggaggctcatcgtgtcgcagttccgctggctcgatttcctcgccgacgccgacgccttcgtcgacaagctcgtggaggtgctctccgtggccccgcaccgcctgaagaaggagatcatcggctcgctcccggagatcgttggcgacaagagccacgccgccgtggtcgccgcgctcgagaagctcctgcaggaggactccgaaatcgttgtcgccgtgctcgatgtgctgtcggatcttaacctcaacgaggagctgcaggagcaggcagtgactgttgcgatatcatgcatccggacaattgctccagaccagacgcctcatctgctcaggttcttgctgttgtcggctacaccagtcaatgctgggaggattatatcgcagatacgtgagcagctcaagtttgttggtgttgtcgatccacgggctgcacggagtaagaagctcaaagggaaggcatcagctaatagcactgatggggcaatacttgatacactgagatcaggcctacggtttaagaatatgctttgtgaggctttcctgaaggagctgaagtcagttgaccacccgagggatcacaaagtgattgatgtttggctcatcatgcttatctatgccaatggtggtgctctagagaaggctgcaaagaaaatactgaagtccaagatcttacatgagtgcataagagagacactgtttgatcaatgtattcatgggaacactgaactggtaaaggaacatttcatgtcatacctctcagttagcgattacttgttggcttgcaaggaagagaaagctagagagtttgcggcttatttgttcacagcactatttgaagagttcactgatacatactccaggcaagagcttgtgggttcattggtcactcatataggatctggggttagttacgaagtttcatctgctctggatatcatgatttctttaacatccaacaattcggaagaactgattcctatatcttcacacataactggaatattggattacttggagagttttggcgaagataatcttcggaaggtttatgatatcttctgtcgtttggcactggctgctggcttcaatactggttcaggtggctcttcagttgctaacgaggttctaatggtggtgaggaagcaggttagtaatccagacatgaagtatagacggatgggaataattggggttttaaggatagtttctactatcgcttccactgatgtcaatgctgctgtgaactgttcatcatctcagcaaccaaattgtgaggaggccctagaattgctgaagatgtctgtcaactcatgcaaatttgtgacattactcttgatttttctatatgatgaattagctgctttgctggatagcaaagttatccactcttcaattcatgactgggtaggagagcatgttgcagagttatttgagacaccttttcttgccgatcttgaaaatggtgaactaccagagaaatatctatgtgatggcatagaaggagaattatggatgaagttggatggaaatatctctccagtatgtgtaaatattatgcgtctagcccccacttcgccccaaaagtaaaatatcattagttattaatgatgtcattgttttgatcccaatcctgcttgcagatccttatgtcccaattttcacttttaacaacaattgaacgtttaggaaatgaaggctcacttggtggaatagatgcactacttggctgtcctttgcaccttccctctaccaagcacttggatggagctaactggggaaacctgtcaggattgcagaaaaaaacagtgtgctattccctatactatgcaataaactggatcagggagttgctcaatgctttcggcacacaggttgaaagtagggttgataatgtttcacagaaagcaaggaacgagacagcagtaaaacttctgaagcgtctaagaaatctgatattacttgaaggcttgctgaatgcatttctcaaagattatccattatctttacctgagttgcgatatcttggggattgctctggatcagcaagcaccagcaaattcaacattccaaagaacatgggagaggagagcataaatggtgcttccagcaaaagacagaagggttgcaagggcaaagtctcagaaaaagtgaatcctgatgataaactcaagcaacctacaatactggatgctttcaaaagagcaggagtaacagtcagtcaagcaacaaataaagcttcttcacaaccatcatcaagtggaatgatgtcaaaggatatcgaacaagatgctactgatcctggtgaacttgggcttatagatttaatggcagcaccagttaaactagatatgcaaagatacaaattcagaactatccgtgcaacgtgcttgtctttgttgaactactcagagtgtcaaggttcatcttcttaccttcaaactgagttaccaacatatctatatcttctccgtgatctgcataacaaattagataatctgaatccttcaatcaagccttttcttagtacttctaaagcaaaatatactcctactcattgccataagagtacacaagattttcttgacaaaatccagccactattcttagttttaaggaagcatctggatggagcagtttcaatgatcaaagatggtaaccgtctattccataatttctgcttcctgttacttttacagtgtttgaattaataattagtgggctgagtcggtttcttaatggtcggggttgtatgtgctgggagggatcccccccctttatggatcttttcttcttagtgaaatgacacacagctttcctgcgttgcttgagaaaaacaatcaaggttattaaaacgacgaaacgttgaaacgctcatgggtggagttttaacttttaaacggtttaaacaaagtttaaacgtagttttaaacaacatagagaaatttcaatatataataatttcagacaataacataaagtcaaataccaaacaaccaacataagttcacataataatattgtgcaaaataaagtggaat

SEQ ID NO: 28041 - DNA, 3216 bp, Zea Mays
cttcctcccgtggcgccaaaaatttcatttcattttccccaaacccatcccccaattcccccccaaaaccttcccagtgtgtcttctcgacgaaggaagccatctcgtctctctccgctccggcgattgatcggcggcgccgatggtgttcctgcagcgcagccgccccgtcaacccccgcaagcgcccggcaccgccgcccgagctcgagcccgagcccgagccccccaggcccggcccggacgcttcatccgccgtcgacgcggcggcggcgctgctcgcggacgcgggctgcacgctcctcgtcccgccgcaccagccgccgtccctcccctcgccgcactccttcgctgcccgcctctcccgcaagctctccgccggcggggacgcctcctcgccctcggcccccgcccggcgcctcctcgagggcctcgccgccttcgcggcctcctcccccgcgcggctccgccagctgctcctcccgacggcgccgcacgagccgagccttgcccgcgcgctcctctccgtccccgcgctccagccgggcctgctcgcgctgctcctcgagaagctgcccgagcacttcggcggcgacggcgcgctcgacggatcgccgctgcaggacgacgtggggaggctcatcgtgtcgcagttccgctggctcgatttcctcgccgacgccgacgccttcgtcgacaagctcgtggaggtgctctccgtggccccgcaccgcctgaagaaggagatcatcggctcgctcccggagatcgttggcgacaagagccacgccgccgtggtcgccgcgctcgagaagctcctgcaggaggactccgaaatcgttgtcgccgtgctcgatgtgctgtcggatcttaacctcaacgaggagctgcaggagcaggcagtgactgttgcgatatcatgcatccggacaattgctccagaccagacgcctcatctgctcaggttcttgctgttgtcggctacaccagtcaatgctgggaggattatatcgcagatacgtgagcagctcaagtttgttggtgttgtcgatccacgggctgcacggagtaagaagctcaaagggaaggcatcagctaatagcactgatggggcaatacttgatacactgagatcaggcctacggtttaagaatatgctttgtgaggctttcctgaaggagctgaagtcagttgaccacccgagggatcacaaagtgattgatgtttggctcatcatgcttatctatgccaatggtggtgctctagagaaggctgcaaagaaaatactgaagtccaagatcttacatgagtgcataagagagacactgtttgatcaatgtattcatgggaacactgaactggtaaaggaacatttcatgtcatacctctcagttagcgattacttgttggcttgcaaggaagagaaagctagagagtttgcggcttatttgttcacagcactatttgaagagttcactgatacatactccaggcaagagcttgtgggttcattggtcactcatataggatctggggttagttacgaagtttcatctgctctggatatcatgatttctttaacatccaacaattcggaagaactgattcctatatcttcacacataactggaatattggattacttggagagttttggcgaagataatcttcggaaggtttatgatatcttctgtcgtttggcactggctgctggcttcaatactggttcaggtggctcttcagttgctaacgaggttctaatggtggtgaggaagcaggttagtaatccagacatgaagtatagacggatgggaataattggggttttaaggatagtttctactatcgcttccactgatgtcaatgctgctgtgaactgttcatcatctcagcaaccaaattgtgaggaggccctagaattgctgaagatgtctgtcaactcatgcaaatttgtgacattactcttgatttttctatatgatgaattagctgctttgctggatagcaaagttatccactcttcaattcatgactgggtaggagagcatgttgcagagttatttgagacaccttttcttgccgatcttgaaaatggtgaactaccagagaaatatctatgtgatggcatagaagattacttgaaggcttgctgaatgcatttctcaaagattatccattatctttacctgagttgcgatatcttggggattgctctggatcagcaagcaccagcaaattcaacattccaaagaacatgggagaggagagcataaatggtgcttccagcaaaagacagaagggttgcaagggcaaagtctcagaaaaagtgaatcctgatgataaactcaagcaacctacaatactggatgctttcaaaagagcaggagtaacagtcagtcaagcaacaaataaagcttcttcacaaccatcatcaagtggaatgatgtcaaaggatatcgaacaagatgctactgatcctggtgaacttgggcttatagatttaatggcagcaccagttaaactagatatgcaaagatacaaattcagaactatccgtgcaacgtgcttgtctttgttgaactactcagagtgtcaaggttcatcttcttaccttcaaactgagttaccaacatatctatatcttctccgtgatctgcataacaaattagataatctgaatccttcaatcaagccttttcttagtacttctaaagcaaaatatactcctactcattgccataagagtacacaagattttcttgacaaaatccagccactattcttagttttaaggaagcatctggatggagcagtttcaatgatcaaagatggtaaccgtctattccataatttctgcttcctgttacttttacagtgtttgaattaataattagtgggctgagtcggtttcttaatggtcggggttgtatgtgctgggagggatcccccccctttatggatcttttcttcttagtgaaatgacacacagctttcctgcgttgcttgagaaaaacaatcaaggttattaaaacgacgaaacgttgaaacgctcatgggtggagttttaacttttaaacggtttaaacaaagtttaaacgtagttttaaacaacatagagaaatttcaatatataataatttcagacaataacataaagtcaaataccaaacaaccaacataagttcacataataatattgtgcaaaataaagtggaat

SEQ ID NO: 28042 - DNA, 3631 bp, Zea Mays
cttcctcccgtggcgccaaaaatttcatttcattttccccaaacccatcccccaattcccccccaaaaccttcccagtgtgtcttctcgacgaaggaagccatctcgtctctctccgctccggcgattgatcggcggcgccgatggtgttcctgcagcgcagccgccccgtcaacccccgcaagcgcccggcaccgccgcccgagctcgagcccgagcccgagccccccaggcccggcccggacgcttcatccgccgtcgacgcggcggcggcgctgctcgcggacgcgggctgcacgctcctcgtcccgccgcaccagccgccgtccctcccctcgccgcactccttcgctgcccgcctctcccgcaagctctccgccggcggggacgcctcctcgccctcggcccccgcccggcgcctcctcgagggcctcgccgccttcgcggcctcctcccccgcgcggctccgccagctgctcctcccgacggcgccgcacgagccgagccttgcccgcgcgctcctctccgtccccgcgctccagccgggcctgctcgcgctgctcctcgagaagctgcccgagcacttcggcggcgacggcgcgctcgacggatcgccgctgcaggacgacgtggggaggctcatcgtgtcgcagttccgctggctcgatttcctcgccgacgccgacgccttcgtcgacaagctcgtggaggtgctctccgtggccccgcaccgcctgaagaaggagatcatcggctcgctcccggagatcgttggcgacaagagccacgccgccgtggtcgccgcgctcgagaagctcctgcaggaggactccgaaatcgttgtcgccgtgctcgatgtgctgtcggatcttaacctcaacgaggagctgcaggagcaggcagtgactgttgcgatatcatgcatccggacaattgctccagaccagacgcctcatctgctcaggttcttgctgttgtcggctacaccagtcaatgctgggaggattatatcgcagatacgtgagcagctcaagtttgttggtgttgtcgatccacgggctgcacggagtaagaagctcaaagggaaggcatcagctaatagcactgatggggcaatacttgatacactgagatcaggcctacggtttaagaatatgctttgtgaggctttcctgaaggagctgaagtcagttgaccacccgagggatcacaaagtgattgatgtttggctcatcatgcttatctatgccaatggtggtgctctagagaaggctgcaaagaaaatactgaagtccaagatcttacatgagtgcataagagagacactgtttgatcaatgtattcatgggaacactgaactggtaaaggaacatttcatgtcatacctctcagttagcgattacttgttggcttgcaaggaagagaaagctagagagtttgcggcttatttgttcacagcactatttgaagagttcactgatacatactccaggcaagagcttgtgggttcattggtcactcatataggatctggggttagttacgaagtttcatctgctctggatatcatgatttctttaacatccaacaattcggaagaactgattcctatatcttcacacataactggaatattggattacttggagagttttggcgaagataatcttcggaaggtttatgatatcttctgtcgtttggcactggctgctggcttcaatactggttcaggtggctcttcagttgctaacgaggttctaatggtggtgaggaagcaggttagtaatccagacatgaagtatagacggatgggaataattggggttttaaggatagtttctactatcgcttccactgatgtcaatgctgctgtgaactgttcatcatctcagcaaccaaattgtgaggaggccctagaattgctgaagatgtctgtcaactcatgcaaatttgtgacattactcttgatttttctatatgatgaattagctgctttgctggatagcaaagttatccactcttcaattcatgactgggtaggagagcatgttgcagagttatttgagacaccttttcttgccgatcttgaaaatggtgaactaccagagaaatatctatgtgatggcatagaaggagaattatggatgaagttggatggaaatatctctccagtatgtgtaaatattatgcgtctagcccccacttcgccccaaaaatcccaatcctgcttgcagatccttatgtcccaattttcacttttaacaacaattgaacgtttaggaaatgaaggctcacttggtggaatagatgcactacttggctgtcctttgcaccttccctctaccaagcacttggatggagctaactggggaaacctgtcaggattgcagaaaaaaacagtgtgctattccctatactatgcaataaactggatcagggagttgctcaatgctttcggcacacaggttgaaagtagggttgataatgtttcacagaaagcaaggaacgagacagcagtaaaacttctgaagcgtctaagaaatctgatattacttgaaggcttgctgaatgcatttctcaaagattatccattatctttacctgagttgcgatatcttggggattgctctggatcagcaagcaccagcaaattcaacattccaaagaacatgggagaggagagcataaatggtgcttccagcaaaagacagaagggttgcaagggcaaagtctcagaaaaagtgaatcctgatgataaactcaagcaacctacaatactggatgctttcaaaagagcaggagtaacagtcagtcaagcaacaaataaagcttcttcacaaccatcatcaagtggaatgatgtcaaaggatatcgaacaagatgctactgatcctggtgaacttgggcttatagatttaatggcagcaccagttaaactagatatgcaaagatacaaattcagaactatccgtgcaacgtgcttgtctttgttgaactactcagagtgtcaaggttcatcttcttaccttcaaactgagttaccaacatatctatatcttctccgtgatctgcataacaaattagataatctgaatccttcaatcaagccttttcttagtacttctaaagcaaaatatactcctactcattgccataagagtacacaagattttcttgacaaaatccagccactattcttagttttaaggaagcatctggatggagcagtttcaatgatcaaagatggtaaccgtctattccataatttctgcttcctgttacttttacagtgtttgaattaataattagtgggctgagtcggtttcttaatggtcggggttgtatgtgctgggagggatcccccccctttatggatcttttcttcttagtgaaatgacacacagctttcctgcgttgcttgagaaaaacaatcaaggttattaaaacgacgaaacgttgaaacgctcatgggtggagttttaacttttaaacggtttaaacaaagtttaaacgtagttttaaacaacatagagaaatttcaatatataataatttcagacaataacataaagtcaaataccaaacaaccaacataagttcacataataatattgtgcaaaataaagtggaat

SEQ ID NO: 28043 - DNA, 3568 bp, Zea Mays
cttcctcccgtggcgccaaaaatttcatttcattttccccaaacccatcccccaattcccccccaaaaccttcccagtgtgtcttctcgacgaaggaagccatctcgtctctctccgctccggcgattgatcggcggcgccgatggtgttcctgcagcgcagccgccccgtcaacccccgcaagcgcccggcaccgccgcccgagctcgagcccgagcccgagccccccaggcccggcccggacgcttcatccgccgtcgacgcggcggcggcgctgctcgcggacgcgggctgcacgctcctcgtcccgccgcaccagccgccgtccctcccctcgccgcactccttcgctgcccgcctctcccgcaagctctccgccggcggggacgcctcctcgccctcggcccccgcccggcgcctcctcgagggcctcgccgccttcgcggcctcctcccccgcgcggctccgccagctgctcctcccgacggcgccgcacgagccgagccttgcccgcgcgctcctctccgtccccgcgctccagccgggcctgctcgcgctgctcctcgagaagctgcccgagcacttcggcggcgacggcgcgctcgacggatcgccgctgcaggacgacgtggggaggctcatcgtgtcgcagttccgctggctcgatttcctcgccgacgccgacgccttcgtcgacaagctcgtggaggtgctctccgtggccccgcaccgcctgaagaaggagatcatcggctcgctcccggagatcgttggcgacaagagccacgccgccgtggtcgccgcgctcgagaagctcctgcaggaggactccgaaatcgttgtcgccgtgctcgatgtgctgtcggatcttaacctcaacgaggagctgcaggagcaggcagtgactgttgcgatatcatgcatccggacaattgctccagaccagacgcctcatctgctcaggttcttgctgttgtcggctacaccagtcaatgctgggaggattatatcgcagatacgtgagcagctcaagtttgttggtgttgtcgatccacgggctgcacggagtaagaagctcaaagggaaggcatcagctaatagcactgatggggcaatacttgatacactgagatcaggcctacggtttaagaatatgctttgtgaggctttcctgaaggagctgaagtcagttgaccacccgagggatcacaaagtgattgatgtttggctcatcatgcttatctatgccaatggtggtgctctagagaaggctgcaaagaaaatactgaagtccaagatcttacatgagtgcataagagagacactgtttgatcaatgtattcatgggaacactgaactggtaaaggaacatttcatgtcatacctctcagttagcgattacttgttggcttgcaaggaagagaaagctagagagtttgcggcttatttgttcacagcactatttgaagagttcactgatacatactccaggcaagagcttgtgggttcattggtcactcatataggatctggggttagttacgaagtttcatctgctctggatatcatgatttctttaacatccaacaattcggaagaactgattcctatatcttcacacataactggaatattggattacttggagagttttggcgaagataatcttcggaaggtttatgatatcttctgtcgtttggcactggctgctggcttcaatactggttcaggtggctcttcagttgctaacgaggttctaatggtggtgaggaagcaggttagtaatccagacatgaagtatagacggatgggaataattggggttttaaggatagtttctactatcgcttccactgatgtcaatgctgctgtgaactgttcatcatctcagcaaccaaattgtgaggaggccctagaattgctgaagatgtctgtcaactcatgcaaatttgtgacattactcttgatttttctatatgatgaattagctgctttgctggatagcaaagttatccactcttcaattcatgactgggtaggagagcatgttgcagagttatttgagacaccttttcttgccgatcttgaaaatggtgaactaccagagaaatatctatgtgatggcatagaaggagaattatggatgaagttggatggaaatatctctccaatccttatgtcccaattttcacttttaacaacaattgaacgtttaggaaatgaaggctcacttggtggaatagatgcactacttggctgtcctttgcaccttccctctaccaagcacttggatggagctaactggggaaacctgtcaggattgcagaaaaaaacagtgtgctattccctatactatgcaataaactggatcagggagttgctcaatgctttcggcacacaggttgaaagtagggttgataatgtttcacagaaagcaaggaacgagacagcagtaaaacttctgaagcgtctaagaaatctgatattacttgaaggcttgctgaatgcatttctcaaagattatccattatctttacctgagttgcgatatcttggggattgctctggatcagcaagcaccagcaaattcaacattccaaagaacatgggagaggagagcataaatggtgcttccagcaaaagacagaagggttgcaagggcaaagtctcagaaaaagtgaatcctgatgataaactcaagcaacctacaatactggatgctttcaaaagagcaggagtaacagtcagtcaagcaacaaataaagcttcttcacaaccatcatcaagtggaatgatgtcaaaggatatcgaacaagatgctactgatcctggtgaacttgggcttatagatttaatggcagcaccagttaaactagatatgcaaagatacaaattcagaactatccgtgcaacgtgcttgtctttgttgaactactcagagtgtcaaggttcatcttcttaccttcaaactgagttaccaacatatctatatcttctccgtgatctgcataacaaattagataatctgaatccttcaatcaagccttttcttagtacttctaaagcaaaatatactcctactcattgccataagagtacacaagattttcttgacaaaatccagccactattcttagttttaaggaagcatctggatggagcagtttcaatgatcaaagatggtaaccgtctattccataatttctgcttcctgttacttttacagtgtttgaattaataattagtgggctgagtcggtttcttaatggtcggggttgtatgtgctgggagggatcccccccctttatggatcttttcttcttagtgaaatgacacacagctttcctgcgttgcttgagaaaaacaatcaaggttattaaaacgacgaaacgttgaaacgctcatgggtggagttttaacttttaaacggtttaaacaaagtttaaacgtagttttaaacaacatagagaaatttcaatatataataatttcagacaataacataaagtcaaataccaaacaaccaacataagttcacataataatattgtgcaaaataaagtggaat

SEQ ID NO: 28044 - DNA, 1410 bp, Zea Mays
tggagagggcggttccggagagacgcggccgcatgggtccaccaccaaagccttgggagcgatctggaactgaaggaacttcaggtccagcacctttcaagcccccatctggtggaagcaccagtgatgttgttgaagcttctggtaccgctaaacccagcgaaaatgttactgcgatggaggggaatgccgctcctaatgtaaatagcactgtttcaaggcctatgccacagcggccttggcagcagacaggttatggaaacacctatggagggtatggtggatccaacatgtatagttcatatggtggatttggcaacacttatggtaccggtggactcggaaatagcatgtactcgagttacggaggaggttatggtggtggcatgtacggcggtggcatgtatggaggaggcatgtatggtgggatgggaggttatggtggttacggcatgggcggaatgggtggtatgggcatgggtccatacggtaatcaggatccaaattcgatgggccctcctgcatccccgccaggtttctgggtgtccttcctccgagtggtattggtcacaaccacttgcagtgccattacatttacaaaatgtcgaatcacctcactttttatttccagaaggacccaaatgcatggtgttgtcaatttcttcggacgaatctcattccttgttgaacagaacactcaggcatcctatttcttcatgacagcaatgctgcagctcttcgaccggtccggtatgctctacggtgagcttgcacggtttgtgctgcgtttgctaggagtgagaagaaagccaaagaaggggggcagcattcaggggccagaagcgctggcgttcgagggacctagccggcagtctaccgaggcaccgaaaacgaacaactgggacaacgtctggggaaactgagatcatgcctatgggtgcaacgagttgaatcatatagaagaagtgcaagggctatgacctatgggagtttgcttgccttttgattcatcaaaaagaagattgcggccagataccgcctttggtggcaacttaggggaagctgtgaagaagaaactgctgggcctctcttgcttttcccagctttgccttgatgtacctgcgagggccatggcccatgacactggtaggttttttttttcatcgcaactgtaaggtttggtgaagaacggtttcacagtgcactgatatatatgtagctgcttgctgctgttgtgatatcagtgtgggtatcgattgtttgtatatctctatctgggtaaatagtgtccgccttcgaaaagaatacatcaaatgtttgtgcaccctttacagcctcgtctaacttggttttgaatttggacttggacttgttgagagtccccaccccatgcaagtgtcgattctgttg

SEQ ID NO: 28045 - DNA, 1320 bp, Zea Mays
agcggtcggactcctcgtcccctgtcatgtcccccatggtggagagggcggttccggagagacgcggccgcatgggtccagcacctttcaagcccccatctggtggaagcaccagtgatgttgttgaagcttctggtaccgctaaacccagcgaaaatgttactgcgatggaggggaatgccgctcctaatgtaaatagcactgtttcaaggcctatgccacagcggccttggcagcagacaggttatggaaacacctatggagggtatggtggatccaacatgtatagttcatatggtggatttggcaacacttatggtaccggtggactcggaaatagcatgtactcgagttacggaggaggttatggtggtggcatgtacggcggtggcatgtatggaggaggcatgtatggtgggatgggaggttatggtggttacggcatgggcggaatgggtggtatgggcatgggtccatacggtaatcaggatccaaattcgatgggccctcctgcatccccgccaggtttctgggtgtccttcctccgagtgatgcatggtgttgtcaatttcttcggacgaatctcattccttgttgaacagaacactcaggcatcctatttcttcatgacagcaatgctgcagctcttcgaccggtccggtatgctctacggtgagcttgcacggtttgtgctgcgtttgctaggagtgagaagaaagccaaagaaggggggcagcattcaggggccagaagcgctggcgttcgagggacctagccggcagtctaccgaggcaccgaaaacgaacaactgggacaacgtctggggaaactgagatcatgcctatgggtgcaacgagttgaatcatatagaagaagtgcaagggctatgacctatgggagtttgcttgccttttgattcatcaaaaagaagattgcggccagataccgcctttggtggcaacttaggggaagctgtgaagaagaaactgctgggcctctcttgcttttcccagctttgccttgatgtacctgcgagggccatggcccatgacactggtaggttttttttttcatcgcaactgtaaggtttggtgaagaacggtttcacagtgcactgatatatatgtagctgcttgctgctgttgtgatatcagtgtgggtatcgattgtttgtatatctctatctgggtaaatagtgtccgccttcgaaaagaatacatcaaatgtttgtgcaccctttacagcctcgtctaacttggttttgaatttggacttggacttgttgagagtccccaccccatgcaagtgtcgattctgttg

SEQ ID NO: 28046 - DNA, 1475 bp, Zea Mays
caaccaccaaacgcgtcgacgcgcagcgcacgcacgaacacacacgagcaggtttcctgcaacgcagcgcgtcgagcagaccagacccgcccggcctggttgtggtcgaggaggagactggaggaggacgggatagcagacgagaggagaggacgcgcacgccatgtcagtgcactttgcaggtccaccaccaaagccttgggagcgatctggaactgaaggaacttcaggtccagcacctttcaagcccccatctggtggaagcaccagtgatgttgttgaagcttctggtaccgctaaacccagcgaaaatgttactgcgatggaggggaatgccgctcctaatgtaaatagcactgtttcaaggcctatgccacagcggccttggcagcagacaggttatggaaacacctatggagggtatggtggatccaacatgtatagttcatatggtggatttggcaacacttatggtaccggtggactcggaaatagcatgtactcgagttacggaggaggttatggtggtggcatgtacggcggtggcatgtatggaggaggcatgtatggtgggatgggaggttatggtggttacggcatgggcggaatgggtggtatgggcatgggtccatacggtaatcaggatccaaattcgatgggccctcctgcatccccgccaggtttctgggtgtccttcctccgagtgatgcatggtgttgtcaatttcttcggacgaatctcattccttgttgaacagaacactcaggcatcctatttcttcatgacagcaatgctgcagctcttcgaccggtccggtatgctctacggtgagcttgcacggtttgtgctgcgtttgctaggagtgagaagaaagccaaagaaggggggcagcattcaggggccagaagcgctggcgttcgagggacctagccggcagtctaccgaggcaccgaaaacgaacaactgggacaacgtctggggaaactgagatcatgcctatgggtgcaacgagttgaatcatatagaagaagtgcaagggctatgacctatgggagtttgcttgccttttgattcatcaaaaagaagattgcggccagataccgcctttggtggcaacttaggggaagctgtgaagaagaaactgctgggcctctcttgcttttcccagctttgccttgatgtacctgcgagggccatggcccatgacactggtaggttttttttttcatcgcaactgtaaggtttggtgaagaacggtttcacagtgcactgatatatatgtagctgcttgctgctgttgtgatatcagtgtgggtatcgattgtttgtatatctctatctgggtaaatagtgtccgccttcgaaaagaatacatcaaatgtttgtgcaccctttacagcctcgtctaacttggttttgaatttggacttggacttgttgagagtccccaccccatgcaagtgtcgattctgttg

SEQ ID NO: 28047 - DNA, 1400 bp, Zea Mays
caaccaccaaacgcgtcgacgcgcagcgcacgcacgaacacacacgagcaggtttcctgcaacgcagcgcgtcgagcagaccagacccgcccggcctggttgtggtcgaggaggagactggaggaggacgggatagcagacgagaggagaggacgcgcacgccatgtcaggtccaccaccaaagccttgggagcgatctggaactgaaggaacttcaggtccagcacctttcaagcccccatctggtggaagcaccagtgatgttgttgaagcttctggtaccgctaaacccagcgaaaatgttactgcgatggaggggaatgccgctcctaatgtaaatagcactgtttcaaggcctatgccacagcggccttggcagcagacaggttatggaaacacctatggagggtatggtggatccaacatgtatagttcatatggtggatttggcaacacttatggtaccggtggactcggaaatagcatgtactcgagttacggaggaggttatggtggttacggcatgggcggaatgggtggtatgggcatgggtccatacggtaatcaggatccaaattcgatgggccctcctgcatccccgccaggtttctgggtgtccttcctccgagtgatgcatggtgttgtcaatttcttcggacgaatctcattccttgttgaacagaacactcaggcatcctatttcttcatgacagcaatgctgcagctcttcgaccggtccggtatgctctacggtgagcttgcacggtttgtgctgcgtttgctaggagtgagaagaaagccaaagaaggggggcagcattcaggggccagaagcgctggcgttcgagggacctagccggcagtctaccgaggcaccgaaaacgaacaactgggacaacgtctggggaaactgagatcatgcctatgggtgcaacgagttgaatcatatagaagaagtgcaagggctatgacctatgggagtttgcttgccttttgattcatcaaaaagaagattgcggccagataccgcctttggtggcaacttaggggaagctgtgaagaagaaactgctgggcctctcttgcttttcccagctttgccttgatgtacctgcgagggccatggcccatgacactggtaggttttttttttcatcgcaactgtaaggtttggtgaagaacggtttcacagtgcactgatatatatgtagctgcttgctgctgttgtgatatcagtgtgggtatcgattgtttgtatatctctatctgggtaaatagtgtccgccttcgaaaagaatacatcaaatgtttgtgcaccctttacagcctcgtctaacttggttttgaatttggacttggacttgttgagagtccccaccccatgcaagtgtcgattctgttg

SEQ ID NO: 28048 - DNA, 1437 bp, Zea Mays
cccgcctccccggtctgtgtttgccccctgcccggttggcccctggctctcctcccgcccgcccggccgcccccaccccacccaatcctaccccgcggggggaattctcagttctcgcggcgacgactgggagaccgccgccgccgccatcctactccaggtgccctgagaactcgatcgggctcttcgctggcgacgaacacccaccagttacaacctactgcaacttcttctgcaaaaaagctatcaggtgtacaaccatgtacttcaccgtgtccgcccctgcaatgtctctatgatcctccagctacggtagacgccccgttcgctagctgaggacctcctggttcctgtgagcaggcggcgtggttagctgctgccttcaagaatgcagagacccaatgcgccgtcggcttgcgccaccatcaccttcgcggaggctctaaggagggagatggagtaccgcaagtgggtggagaggacccacccacatctgctcgtcggaatctgcggagcccctgaaatgcagagagatttcagtgcaggaccagtacctgatgcgatcaagagaaaactagctgccgagaccagtgtgcctccacaacaatcaagtttcagctgtgtaactggacagaagcagccccaaaactggtaccccacaaagaaaaaggtgaaagttccacatcttccatcgcagattctgcagtgtcccagaccaaacgtggtgccatccttctggtgcaaaatctgcaaggtcgactgtgtcaccgagttcaatttcagcgctcacgttggaggcaaaaagcacaaggccaaaaagctagagattctaggtaagaggaacgctgggggacctgctagccgatgcgcaggcaacaggagcgctggacagaatggactagcagtttctgggagcagaagcagcgaacagaatgtggctggcagcgttgctgctggaccgaactgtgacatgtcgtctgagagcagaactaatggaacagaaggaagtgggtgcactgtccggctatgagcagcttgggtttcactcgagtctggtatttcaataaaagttcgccttgcacattttcttctcaagggcacagttaacatatttatgtgtcagatggctaggccgctagggagatttcatctgatgggttggactgaacaacactagtcagataataagttgaaacgtatgcactatgcagtgtcctattcccatgtgagagcagtacattgtttggacatatatctgacagcagatgcatcctgtgtcctttcgcttccttctcgaaaatgtacagtagctaaccttgttcgggtaggaggtggaagttgaggacgctgttctgagtatgtactgggtagttataatgtatgacatcatggcttgtttgttgtttccatttcttactggtgattgaatcattgaag

SEQ ID NO: 28049 - DNA, 1340 bp, Zea Mays
cccgcctccccggtctgtgtttgccccctgcccggttggcccctggctctcctcccgcccgcccggccgcccccaccccacccaatcctaccccgcggggggaattctcagttctcgcggcgacgactgggagaccgccgccgccgccatcctactccaggtgccctgagaactcgatcgggctcttcgctggcgacgaacacccaccagctacggtagacgccccgttcgctagctgaggacctcctggttcctgtgagcaggcggcgtggttagctgctgccttcaagaatgcagagacccaatgcgccgtcggcttgcgccaccatcaccttcgcggaggctctaaggagggagatggagtaccgcaagtgggtggagaggacccacccacatctgctcgtcggaatctgcggagcccctgaaatgcagagagatttcagtgcaggaccagtacctgatgcgatcaagagaaaactagctgccgagaccagtgtgcctccacaacaatcaagtttcagctgtgtaactggacagaagcagccccaaaactggtaccccacaaagaaaaaggtgaaagttccacatcttccatcgcagattctgcagtgtcccagaccaaacgtggtgccatccttctggtgcaaaatctgcaaggtcgactgtgtcaccgagttcaatttcagcgctcacgttggaggcaaaaagcacaaggccaaaaagctagagattctaggtaagaggaacgctgggggacctgctagccgatgcgcaggcaacaggagcgctggacagaatggactagcagtttctgggagcagaagcagcgaacagaatgtggctggcagcgttgctgctggaccgaactgtgacatgtcgtctgagagcagaactaatggaacagaaggaagtgggtgcactgtccggctatgagcagcttgggtttcactcgagtctggtatttcaataaaagttcgccttgcacattttcttctcaagggcacagttaacatatttatgtgtcagatggctaggccgctagggagatttcatctgatgggttggactgaacaacactagtcagataataagttgaaacgtatgcactatgcagtgtcctattcccatgtgagagcagtacattgtttggacatatatctgacagcagatgcatcctgtgtcctttcgcttccttctcgaaaatgtacagtagctaaccttgttcgggtaggaggtggaagttgaggacgctgttctgagtatgtactgggtagttataatgtatgacatcatggcttgtttgttgtttccatttcttactggtgattgaatcattgaag

SEQ ID NO: 28050 - DNA, 1287 bp, Zea Mays
cccgcctccccggtctgtgtttgccccctgcccggttggcccctggctctcctcccgcccgcccggccgcccccaccccacccaatcctaccccgcggggggaattctcagttctcgcggcgacgactgggagaccgccgccgccgccatcctactccaggtgccctgagaactcgatcgggctcttcgctggcgacgaacacccaccaggcggcgtggttagctgctgccttcaagaatgcagagacccaatgcgccgtcggcttgcgccaccatcaccttcgcggaggctctaaggagggagatggagtaccgcaagtgggtggagaggacccacccacatctgctcgtcggaatctgcggagcccctgaaatgcagagagatttcagtgcaggaccagtacctgatgcgatcaagagaaaactagctgccgagaccagtgtgcctccacaacaatcaagtttcagctgtgtaactggacagaagcagccccaaaactggtaccccacaaagaaaaaggtgaaagttccacatcttccatcgcagattctgcagtgtcccagaccaaacgtggtgccatccttctggtgcaaaatctgcaaggtcgactgtgtcaccgagttcaatttcagcgctcacgttggaggcaaaaagcacaaggccaaaaagctagagattctaggtaagaggaacgctgggggacctgctagccgatgcgcaggcaacaggagcgctggacagaatggactagcagtttctgggagcagaagcagcgaacagaatgtggctggcagcgttgctgctggaccgaactgtgacatgtcgtctgagagcagaactaatggaacagaaggaagtgggtgcactgtccggctatgagcagcttgggtttcactcgagtctggtatttcaataaaagttcgccttgcacattttcttctcaagggcacagttaacatatttatgtgtcagatggctaggccgctagggagatttcatctgatgggttggactgaacaacactagtcagataataagttgaaacgtatgcactatgcagtgtcctattcccatgtgagagcagtacattgtttggacatatatctgacagcagatgcatcctgtgtcctttcgcttccttctcgaaaatgtacagtagctaaccttgttcgggtaggaggtggaagttgaggacgctgttctgagtatgtactgggtagttataatgtatgacatcatggcttgtttgttgtttccatttcttactggtgattgaatcattgaag

SEQ ID NO: 28051 - DNA, 1397 bp, Zea Mays
cccgcctccccggtctgtgtttgccccctgcccggttggcccctggctctcctcccgcccgcccggccgcccccaccccacccaatcctaccccgcggggggaattctcagttctcgcggcgacgactgggagaccgccgccgccgccatcctactccaggtgccctgagaactcgatcgggctcttcgctggcgacgaacacccaccaggtgtacaaccatgtacttcaccgtgtccgcccctgcaatgtctctatgatcctccagctacggtagacgccccgttcgctagctgaggacctcctggttcctgtgagcaggcggcgtggttagctgctgccttcaagaatgcagagacccaatgcgccgtcggcttgcgccaccatcaccttcgcggaggctctaaggagggagatggagtaccgcaagtgggtggagaggacccacccacatctgctcgtcggaatctgcggagcccctgaaatgcagagagatttcagtgcaggaccagtacctgatgcgatcaagagaaaactagctgccgagaccagtgtgcctccacaacaatcaagtttcagctgtgtaactggacagaagcagccccaaaactggtaccccacaaagaaaaaggtgaaagttccacatcttccatcgcagattctgcagtgtcccagaccaaacgtggtgccatccttctggtgcaaaatctgcaaggtcgactgtgtcaccgagttcaatttcagcgctcacgttggaggcaaaaagcacaaggccaaaaagctagagattctaggtaagaggaacgctgggggacctgctagccgatgcgcaggcaacaggagcgctggacagaatggactagcagtttctgggagcagaagcagcgaacagaatgtggctggcagcgttgctgctggaccgaactgtgacatgtcgtctgagagcagaactaatggaacagaaggaagtgggtgcactgtccggctatgagcagcttgggtttcactcgagtctggtatttcaataaaagttcgccttgcacattttcttctcaagggcacagttaacatatttatgtgtcagatggctaggccgctagggagatttcatctgatgggttggactgaacaacactagtcagataataagttgaaacgtatgcactatgcagtgtcctattcccatgtgagagcagtacattgtttggacatatatctgacagcagatgcatcctgtgtcctttcgcttccttctcgaaaatgtacagtagctaaccttgttcgggtaggaggtggaagttgaggacgctgttctgagtatgtactgggtagttataatgtatgacatcatggcttgtttgttgtttccatttcttactggtgattgaatcattgaag

SEQ ID NO: 28052 - DNA, 1442 bp, Zea Mays
cccgcctccccggtctgtgtttgccccctgcccggttggcccctggctctcctcccgcccgcccggccgcccccaccccacccaatcctaccccgcggggggaattctcagttctcgcggcgacgactgggagaccgccgccgccgccatcctactccaggtgccctgagaactcgatcgggctcttcgctggcgacgaacacccaccagttacaacctactgcaacttcttctgcaaaaaagctatcaggtgtacaaccatgtacttcaccgtgtccgcccctgcaatgtctctatgatcctccagctacggtagacgccccgttcgctagctgaggacctcctggttcctgtgagcaggcggcgtggttagctgctgccttcaagaatgcagagacccaatgcgccgtcggcttgcgccaccatcaccttcgcggaggctctaaggagggagatggagtaccgcaagtgggtggagaggacccacccacatctgctcgtcggaatctgcggagcccctgaaatgcagagagtaaggatttcagtgcaggaccagtacctgatgcgatcaagagaaaactagctgccgagaccagtgtgcctccacaacaatcaagtttcagctgtgtaactggacagaagcagccccaaaactggtaccccacaaagaaaaaggtgaaagttccacatcttccatcgcagattctgcagtgtcccagaccaaacgtggtgccatccttctggtgcaaaatctgcaaggtcgactgtgtcaccgagttcaatttcagcgctcacgttggaggcaaaaagcacaaggccaaaaagctagagattctaggtaagaggaacgctgggggacctgctagccgatgcgcaggcaacaggagcgctggacagaatggactagcagtttctgggagcagaagcagcgaacagaatgtggctggcagcgttgctgctggaccgaactgtgacatgtcgtctgagagcagaactaatggaacagaaggaagtgggtgcactgtccggctatgagcagcttgggtttcactcgagtctggtatttcaataaaagttcgccttgcacattttcttctcaagggcacagttaacatatttatgtgtcagatggctaggccgctagggagatttcatctgatgggttggactgaacaacactagtcagataataagttgaaacgtatgcactatgcagtgtcctattcccatgtgagagcagtacattgtttggacatatatctgacagcagatgcatcctgtgtcctttcgcttccttctcgaaaatgtacagtagctaaccttgttcgggtaggaggtggaagttgaggacgctgttctgagtatgtactgggtagttataatgtatgacatcatggcttgtttgttgtttccatttcttactggtgattgaatcattgaag

SEQ ID NO: 28053 - DNA, 1306 bp, Zea Mays
cccgcctccccggtctgtgtttgccccctgcccggttggcccctggctctcctcccgcccgcccggccgcccccaccccacccaatcctaccccgcggggggaattctcagttctcgcggcgacgactgggagaccgccgccgccgccatcctactccaggtgccctgagaactcgatcgggctcttcgctggcgacgaacacccaccagctatcaggtgtacaaccatgcggcgtggttagctgctgccttcaagaatgcagagacccaatgcgccgtcggcttgcgccaccatcaccttcgcggaggctctaaggagggagatggagtaccgcaagtgggtggagaggacccacccacatctgctcgtcggaatctgcggagcccctgaaatgcagagagatttcagtgcaggaccagtacctgatgcgatcaagagaaaactagctgccgagaccagtgtgcctccacaacaatcaagtttcagctgtgtaactggacagaagcagccccaaaactggtaccccacaaagaaaaaggtgaaagttccacatcttccatcgcagattctgcagtgtcccagaccaaacgtggtgccatccttctggtgcaaaatctgcaaggtcgactgtgtcaccgagttcaatttcagcgctcacgttggaggcaaaaagcacaaggccaaaaagctagagattctaggtaagaggaacgctgggggacctgctagccgatgcgcaggcaacaggagcgctggacagaatggactagcagtttctgggagcagaagcagcgaacagaatgtggctggcagcgttgctgctggaccgaactgtgacatgtcgtctgagagcagaactaatggaacagaaggaagtgggtgcactgtccggctatgagcagcttgggtttcactcgagtctggtatttcaataaaagttcgccttgcacattttcttctcaagggcacagttaacatatttatgtgtcagatggctaggccgctagggagatttcatctgatgggttggactgaacaacactagtcagataataagttgaaacgtatgcactatgcagtgtcctattcccatgtgagagcagtacattgtttggacatatatctgacagcagatgcatcctgtgtcctttcgcttccttctcgaaaatgtacagtagctaaccttgttcgggtaggaggtggaagttgaggacgctgttctgagtatgtactgggtagttataatgtatgacatcatggcttgtttgttgtttccatttcttactggtgattgaatcattgaag

SEQ ID NO: 28054 - DNA, 1294 bp, Zea Mays
cccgcctccccggtctgtgtttgccccctgcccggttggcccctggctctcctcccgcccgcccggccgcccccaccccacccaatcctaccccgcggggggaattctcagttctcgcggcgacgactgggagaccgccgccgccgccatcctactccaggtgccctgagaactcgatcgggctcttcgctggcgacgaacacccaccagctatcaggcggcgtggttagctgctgccttcaagaatgcagagacccaatgcgccgtcggcttgcgccaccatcaccttcgcggaggctctaaggagggagatggagtaccgcaagtgggtggagaggacccacccacatctgctcgtcggaatctgcggagcccctgaaatgcagagagatttcagtgcaggaccagtacctgatgcgatcaagagaaaactagctgccgagaccagtgtgcctccacaacaatcaagtttcagctgtgtaactggacagaagcagccccaaaactggtaccccacaaagaaaaaggtgaaagttccacatcttccatcgcagattctgcagtgtcccagaccaaacgtggtgccatccttctggtgcaaaatctgcaaggtcgactgtgtcaccgagttcaatttcagcgctcacgttggaggcaaaaagcacaaggccaaaaagctagagattctaggtaagaggaacgctgggggacctgctagccgatgcgcaggcaacaggagcgctggacagaatggactagcagtttctgggagcagaagcagcgaacagaatgtggctggcagcgttgctgctggaccgaactgtgacatgtcgtctgagagcagaactaatggaacagaaggaagtgggtgcactgtccggctatgagcagcttgggtttcactcgagtctggtatttcaataaaagttcgccttgcacattttcttctcaagggcacagttaacatatttatgtgtcagatggctaggccgctagggagatttcatctgatgggttggactgaacaacactagtcagataataagttgaaacgtatgcactatgcagtgtcctattcccatgtgagagcagtacattgtttggacatatatctgacagcagatgcatcctgtgtcctttcgcttccttctcgaaaatgtacagtagctaaccttgttcgggtaggaggtggaagttgaggacgctgttctgagtatgtactgggtagttataatgtatgacatcatggcttgtttgttgtttccatttcttactggtgattgaatcattgaag

SEQ ID NO: 28055 - DNA, 2595 bp, Zea Mays
ctcgtctcgtgccgccgccaccgtgcgccgctggccctgacactgtcacactactcacggcagccggcagccggcagccattggccattgccgaaccggcagaggcggcagcaggccacgccgtcccttcgctcgtgccacctcgcctcgtgccgcgcacctactactgcgctgcccagcaggcagcagctcccctttatcctccgcccccgtcctcataaaatctcgcttctcgcttctcgcctgtcagtcatcactagtcaccacccaccaccaccatcgctggcggcagtcagtctcagtcaggcagccactccctccctccctccatccatcacgctcccccagaccttcgcctcccgactccgcgcgccgcccgccgccgcgccgtgggcgcagcagcacccggcctcgcggatctaccgcgtctcccgggcctccggcggcaaggaccgccacagcaaggtgtacacggccaagggcatcagggaccgccgcgtccgcctctccgttgccaccgccatccagttctacgacctgcaggaccgcctcggctacgaccagcccagcaaggccatcgagtggctcatcagggccgctgccgaggccatcgacaagctcccctcgctcgacgccgccgcgggcttccccgcgcacccggcctccgccaaggaccacgccccgcctgtcggtgacgacgacgaccaccaccaccagcagcagcagcagctcacgaggtccggatgcagcagcacgtccgagaccagcaagggctccgtcctctccctctcccgctccgagagccgggtcaaggcgcgggagcgcgcaagggagcggaacaccgttgccagggacaaggaccccgccgccaacgacaccaccgccaccacctcggcgcaggcggcgtccttcaccgagctgcttacggggatggccgcggccagcgccgcccccgctcaacacaagcaccagctgcggcagtcgtcggtgtcctggcagccgacgattgtctccgccaccaccgactacatcgggttcgcgcagccccggaagggcggggggcacgcgatggcgcacgccttcgcctcccccgctcctcacctcggcaacattgcgtccatcgccatggccccagcgcagcacttcggcttggccagtggtgccgtcaccgtcgcctccgggggcggcggcgagccgcacgccgagatgacgcacttctcgttcttgcaggaccatttcatgcccgtccacgcggcaccggcgccggccccggcgtcggctcccgccggagaatacaacctcgacttctccatgtcctcgggtcttatgggtgtcaacactaggggggcccttcagtccaattcgcagccgcatatctccggccaccatcaccagcagcagcagctccagaggctgtctactccactggacgctcccaacatacccttcctgtacagctctgccgccgctgcagctgcggcggtcaccacgcccaccacggccgacggccagttcgccgcgttccagctctggaacgggttccagcacgcagacatgaaggagaagggcaagcactgatcgacacctgcccagcgcagtgcgctgctatctggatggacgtggaaactggaaaggcgtcaaataatcgcagcctgtccctacaaagcaccatccattattgcctgaagctgctgccatgattgcagtggggatggttcctccccccgaattcttggaagtagatcatccttatttcaggctatcacactgaagaacctcgtcgtccttactctggcaaataaccttccgcacttctttttctgcctgctgctgtactcatttcctggaggcgaggttttcgggggcatgatttgccagaccagagcgcccccgtcagagatctactgtgatcattcccactcgaaaactttgccggtggatgggttcggtttggcccccttgatcggctctctctcgagctttagtgatcagttagttagttcttatatccctgccatttgtatggttctcggttgtgtgttgcacgaggagtgggaggactccagtgcatgacgtgtgtgtgcaagtttgtgcccctgttgtgtactactggcatagtgagagttctcctcgtatgtaaattttatttttattgttttgcagtggttatctcgtgttgctccctgatttgcgaaaaggcttgcacaactcgtggtcggtacgtacatgctggctatactatattgtatttatactgaagaagagttgggtgtttagcacccaggcgtggttcatgtactgaagagcaaaggcgatgaaaaggcgtagagtgactcaagcgcctttcttcgccggcgacgcgtagccgtcctcatccagttctcgtgcacgttccacgtacgggtaccagcagcatggatgctttgatctcgacgccaagtgcccgttcccgggcttgacgcgtaggggtgaggaagatgcaagcaaggaaaggaaatcctcccagtcccagacgtcacgtggatgagctgcacaagaagaagcacgacatagagtgagtcaaagaaccgcgctggctctgtacaagaagatggg

SEQ ID NO: 28056 - DNA, 414 bp, Zea Mays
gttcctcttcccctttccttcgcaaacagagcccgctcaacggggatcacgggcgggcgaccttctgcatgggataaatactgcaccagggccttcatcgttggtggattaggggggactcgccgcgagaaagtgaggccgtgggcaccaacgtcttgggccgtcgccgtgcggagtgagattgtgagtgccaccatcatcggtgacaggattcacccacggtcgggcctcaaaagttagcctagtttgatcgccggtgcctctggagcgtggtggcgtcgtccctgggtgtggatagtgctgcgcggcagcggaatcgctcgccgacgttcaccaccgccacagattccacctagtggtgtggtcagcactgctaccatccctaaccgccggcgagcaagccactgaggatca

SEQ ID NO: 28057 - DNA, 1650 bp, Zea Mays
tttgcatcccggatgcaaataatttttttccgccaaagccaggattcctctgctcttcctgtttagggtttccccctctctctgctcctgccggatgcgatggcgattccgccgcggactccttccccgccgccatcgtggtcgcgctctgtaaccgagaccgttcgggggtcccaccagttcaccgtacggggctactccctcgccaagggcatgggccccggccgctacctcgccagcgacgtcttcgccgtcggaggataccactgggccgtctacctctaccccgacggcaagaacgccgaggacaactccaactacgtctccgttttcgtcgccctcgcttccgacggcatcgacgtccgagccctcttcgagctcaccctcctcgaccagtccggccgcggctgccacaaggttcactcgcactttgaccgctcgctcaagttcggcccatacccccctcaagtacaggggatccatgtggggttacaagcgcttctacaaaagaacactcttggaagaatctgatttcttaaagaatgattgcctagtgatgaactgcacagtaggtgttgtcaagaaccgtatagaaacaccaaaggacatccagattcatgttccacgatcagacatgggccgctgcttcaaggagctcctcagccgctgcattggatgtgacataacattcgaagtgcgagatgagaaagtcagggcacacaagtggattcttgctgctcgctccccagtatttaaagcccagttctttggtcctattggaaagcctgacctgcacacggttgttgtggaggatgtggaacctgttgtcttcaaggcaatggtgaacttcatttacgctgatgaactccccagcattcctgagctagctgggtctgcctcaacgtggacatcaacagtagtagtacagcatttgttggcagcagctgatagatatggactgcccttgctgaacagcaccattgtgctgagctgaagtctgcatgtctaaagttcattgctttgcgaggaaatttgggagctgttatggagacggaaggctttgattacctggaggatacatgcccgtccctactatctgacttgttagctactgtggcagtcgtggacgacgatcttgcatcccttaaccgaaaaaggggagtcagcgggaaccaagtcatggctctagtgggaagcgttgaaaggcgcacccggaggaagctttagtagctggcttccctagagggagactgtagttgacaacgatttgatttggacgctggtagctgtgaataatatcgtatccagatgattttttttttttttttgcagaagcagaagttgtaaattttttgaattgaatgcctttttttttcctgtttgggacccttccttacgtaaagttctagcttttatactgttttcaataccctaaattgtcccctaccctaccctatatttagagaagattcttctctaagctgcagcactgtccagattctctctctttttttctctatccattttaatactttaaaaagaggattaagtcaaactaatattatatatataggacatttaagggtattgataataaatatgtacaaaaaactagagcaaatatgtccctaacatatgtatttaacatac

SEQ ID NO: 28058 - DNA, 902 bp, Zea Mays
tttgcatcccggatgcaaataatttttttccgccaaagccaggattcctctgctcttcctgtttagggtttccccctctctctgctcctgccggatgcgatggcgattccgccgcggactccttccccgccgccatcgtggtcgcgctctgtaaccgagaccgttcgggggtcccaccagttcaccgtacggggctactccctcgccaagggcatgggccccggccgctacctcgccagcgacgtcttcgccgtcggaggataccactgggccgtctacctctaccccgacggcaagaacgccgaggacaactccaactacgtctccgttttcgtcgccctcgcttccgacggcatcgacgtccgagccctcttcgagctcaccctcctcgaccagtccggccgcggctgccacaaggttcactcgcactttgaccgctcgctcaagttcggcccatacccccctcaagtacaggggatccatgtggggttacaagcgcttctacaaaagaacactcttggaagaatctgatttcttaaagaatgattgcctagtgatgaactgcacagtaggtgttgtcaagaaccgtatagaaacaccaaaggacatccagattcatgttccacgatcagacatgggccgctgcttcaaggagctcctcagccgctgcattggatgtgacataacattcgaagtgcgagatgagaaagtcagggcacacaagtggattcttgctgctcgctccccagtatttaaagcccagttctttggtcctattggaaagcctgacctgcacacggttgttgtggaggatgtggaacctgttgtcttcaaggttcttgccattttggacctcttacttcaaaaacaaaacaaaattgctatttgattgaaggtatcac

SEQ ID NO: 28059 - DNA, 774 bp, Zea Mays
caagcttcatttgctcccccctcttccggctgcttcctccacaggctaggagtctcccaacagacaagctgaggcctgcatacattgccgttaacaccatcatatacgttgttcaggtttgcatatggatataccttgggataaatgataatgctgtggtcgagctagccagcaaaatattcatcgtagctgtctccttcgttgcgcttcttggcttttcagtatatggtggaaggttatttgtcttgctgagacgtttccctattgaatctaaggggcggcaaaagaagctttatgaggttgggactgtgacagcaatttgtgttacctgcttcctgataagatgtgttgtggttgcattatctgcgtttgatgccgatgtatctctcgaggttttggaccatccagtcctagatttcttctattatatgcttgcggagatactgccttctgcgctagttctcttcgtccttcggaagcttcctcccaagcgggtttcggcacaataccaccctattaactagagagttttgtttttttttaatgatgttacatgctaagaactccggataatctgaaactactggaaacctacagccggctgtagttggatgcttttgcttgtgctgttatgtttatggaagcatcagtgttggcgatgaatataatgacgatcattctatatggggaagtggtgctaatgaatgaatactccttttatatatggttgcatctcatgttgttatttggtcggtttgtgcactgcatgacatg

SEQ ID NO: 28060 - DNA, 1974 bp, Zea Mays
ggtatagatcaaccctactgctatgtatacctatcattgcaagtgcagcggataaagaatccaattcatctcagacattgcaacatcttgaattgtttgagatggaatgtcgctgtttctagatggaaagattcagggtaccctttgttctaagttgttgagtgagcagaatgaaggctagaagtagaagctacactggccggtttcaggtcgcgttgtctttttgtatcattcttgtccaaaagcatgggcaaccagtgacatccatctccatgatctatccacaaaacaaacaatggcgaagcagactgagagctacgagctgcacaaactgcggccccaggtggatgacctgttcaaggagttcgacgccctggtcgacagacctctggatgagagggaggacctggctgcaatcttcaaggtcctcgaagagatcagggacaagatcaagatcaaacacggtggcaagaaagtagacgacgacgagctccttccgcggagcaagaggggggacctggccaacctgctccccctcatcaggactgcactggagctacgcagcaagccgccgccgccgcctgtgcagcaggacgccacgggcggtgcccacgacagcaagccgaccggctgcatcccctgcaagccccggccgtcgcagcagcacaaggaagaaaaagaaggcagcaaggaagtcgtgtcactcaagctgctgctccggctgacccagaacgtgctggagccggagcagtactacgagtggacgaccagctacgtggacgaggagaggatctacgggtgggacaaggaggccggcgaggtgatcgacgccctcgtggccgccgccgacggctcgggggcgcggatgttccgggccgcgggcatcgcgggcatccacggcagcggcaagacggcgctggcgcggaaggtgttcgtgcacgacaaggccaaggacaacttcgcgctccgcctgtgggtgtgcgtcggcccgccggactcggaggaccgcttcaacctcctctaccggatgctcgacaacctcggcctcgacaccgacaaggtcgaggaggtcgtcgacaagtccagcgtcgtcagagacgccaggggcagaacggaggcggagctccggaaggccgcagccagacctgccgagcagaagaaggcgagggcagcgtcgtcgtcaccgaggccggcgccggtggagatgccaacaggcaggcaaaggacgaggagctgctcaaggagaaggtagagaacagccgcgccgtcgagaaatccaaaatcggagtgctgctctacatcctcaacatggtcctgtccaagacgtcgtacatgatcgtgttcgacgacatccgggcgtaccgccacgacgacgacgacgcacagggatgctggtacagcaacctcacgctgctgccgccggcggagggcgagtggggggaccgcctcgcctacggcctgcccaagacgaaacacaggggcgccgtgctggtgacctgccgcaaggaagacgacgccaagaccatggcgcgcacgggcctcgtggtccgcccgcccaagctcgaaggtgatgacgcctggaagctcttcagaagagagtacgaccaggccaaggacgacaagcgcaacaaggacggcggcggcaaagaaggcagcaagggggaggaggaggacctgctcctcaagcagctgcaggagatgaagaaggagatcgtgggcaagtgcctcggcctgccggtggccatcatcgaggcggctaggggcttcgccgacctcgagcccttgccggatgatactagtcccctcaaaccggtgaccagcaaggacattgacaaggacaagcagctgtctcaagcaaataagtaacagattagttgaattcgtgctgtgtaatgcttctgcgttgctttggctctcttctaataaaatttaattatgggctataaaagtcaaaaattttaatttgaaatataa

SEQ ID NO: 28061 - DNA, 2542 bp, Zea Mays
tccgctttgtctcagcctctctcttccgtactgcttctcctctacctccgtcgccagccagccactacctcgattcgctcccctccggccctcctgtcgcgcgcgctctgcctcactggcgccacggtcgcccgcgccggcaggctcgagtccctcgacgccatcgcctagattgtctactagctggcccccgctcgccgcgaggtggtgcttgcggaggtggcggcgatcgtgcctgcatggtgctcgacaaaaaggtgctctacgagacgacatctgcttccgcgcgcacaagctcaccatgcgcagcttcggtgacgtttagccacgtcatctccgccaccatgagcggcgtcacctgctgcctttgcttctccggtcagctcaactccgatctccgtaggctagccgtcaacctgatcccgttcccgcgcctgcacttcttcatgatatgggacgccaagaacatgatgtgcatcgtggacccgcgccacggttgctacctgacggcgtccgccatgttctgcgacaagatgagcaacagggaggtggacgagcagatgcttaacgtgccaaacaatgactcctacttcgtggactcgatctccaacaacgttcagtccacggatgtgcctcttttgagagtgaattatacttttactcaattaggatattgtgtttctttggatctttgtttgattaatgatttttttggatgagagtgtggctacaggatgaagcaatgcattttttgatggaacacacatgtgcagtatacaaatggaccatcaggttgcggctatataaaagaagcatgggcaaccagtgacatccatctccatgatctatccacaaaacaaacaatggcgaagcagactgagagctacgagctgcacaaactgcggccccaggtggatgacctgttcaaggagttcgacgccctggtcgacagacctctggatgagagggaggacctggctgcaatcttcaaggtcctcgaagagatcagggacaagatcaagatcaaacacggtggcaagaaagtagacgacgacgagctccttccgcggagcaagaggggggacctggccaacctgctccccctcatcaggactgcactggagctacgcagcaagccgccgccgccgcctgtgcagcaggacgccacgggcggtgcccacgacagcaagccgaccggctgcatcccctgcaagccccggccgtcgcagcagcacaaggaagaaaaagaaggcagcaaggaagtcgtgtcactcaagctgctgctccggctgacccagaacgtgctggagccggagcagtactacgagtggacgaccagctacgtggacgaggagaggatctacgggtgggacaaggaggccggcgaggtgatcgacgccctcgtggccgccgccgacggctcgggggcgcggatgttccgggccgcgggcatcgcgggcatccacggcagcggcaagacggcgctggcgcggaaggtgttcgtgcacgacaaggccaaggacaacttcgcgctccgcctgtgggtgtgcgtcggcccgccggactcggaggaccgcttcaacctcctctaccggatgctcgacaacctcggcctcgacaccgacaaggtcgaggaggtcgtcgacaagtccagcgtcgtcagagacgccaggggcagaacggaggcggagctccggaaggccgcagccagacctgccgagcagaagaaggcgagggcagcgtcgtcgtcaccgaggccggcgccggtggagatgccaacaggcaggcaaaggacgaggagctgctcaaggagaaggtagagaacagccgcgccgtcgagaaatccaaaatcggagtgctgctctacatcctcaacatggtcctgtccaagacgtcgtacatgatcgtgttcgacgacatccgggcgtaccgccacgacgacgacgacgcacagggatgctggtacagcaacctcacgctgctgccgccggcggagggcgagtggggggaccgcctcgcctacggcctgcccaagacgaaacacaggggcgccgtgctggtgacctgccgcaaggaagacgacgccaagaccatggcgcgcacgggcctcgtggtccgcccgcccaagctcgaaggtgatgacgcctggaagctcttcagaagagagtacgaccaggccaaggacgacaagcgcaacaaggacggcggcggcaaagaaggcagcaagggggaggaggaggacctgctcctcaagcagctgcaggagatgaagaaggagatcgtgggcaagtgcctcggcctgccggtggccatcatcgaggcggctaggggcttcgccgacctcgagcccttgccggatgatactagtcccctcaaaccggtgaccagcaaggacattgacaaggacaagcagctgtctcaagcaaataagtaacagattagttgaattcgtgctgtgtaatgcttctgcgttgctttggctctcttctaataaaatttaattatgggctataaaagtcaaaaattttaatttgaaatataa

SEQ ID NO: 28062 - DNA, 2174 bp, Zea Mays
tccgctttgtctcagcctctctcttccgtactgcttctcctctacctccgtcgccagccagccactacctcgattcgctcccctccggccctcctgtcgcgcgcgctctgcctcactggcgccacggtcgcccgcgccggcaggctcgagtccctcgacgccatcgcctagattgtctactagctggcccccgctcgccgcgaggtggtgcttgcggaggtggcggcgatcgtgcctgcatggtgctcgacaaaaaggatgaagcaatgcattttttgatggaacacacatgtgcagtatacaaatggaccatcaggttgcgggtaccctttgttctaagttgttgagtgagcagaatgaaggctagaagtagaagctacactggccggtttcaggtcgcgttgtctttttgtatcattcttgtccaaaagctatataaaagaagcatgggcaaccagtgacatccatctccatgatctatccacaaaacaaacaatggcgaagcagactgagagctacgagctgcacaaactgcggccccaggtggatgacctgttcaaggagttcgacgccctggtcgacagacctctggatgagagggaggacctggctgcaatcttcaaggtcctcgaagagatcagggacaagatcaagatcaaacacggtggcaagaaagtagacgacgacgagctccttccgcggagcaagaggggggacctggccaacctgctccccctcatcaggactgcactggagctacgcagcaagccgccgccgccgcctgtgcagcaggacgccacgggcggtgcccacgacagcaagccgaccggctgcatcccctgcaagccccggccgtcgcagcagcacaaggaagaaaaagaaggcagcaaggaagtcgtgtcactcaagctgctgctccggctgacccagaacgtgctggagccggagcagtactacgagtggacgaccagctacgtggacgaggagaggatctacgggtgggacaaggaggccggcgaggtgatcgacgccctcgtggccgccgccgacggctcgggggcgcggatgttccgggccgcgggcatcgcgggcatccacggcagcggcaagacggcgctggcgcggaaggtgttcgtgcacgacaaggccaaggacaacttcgcgctccgcctgtgggtgtgcgtcggcccgccggactcggaggaccgcttcaacctcctctaccggatgctcgacaacctcggcctcgacaccgacaaggtcgaggaggtcgtcgacaagtccagcgtcgtcagagacgccaggggcagaacggaggcggagctccggaaggccgcagccagacctgccgagcagaagaaggcgagggcagcgtcgtcgtcaccgaggccggcgccggtggagatgccaacaggcaggcaaaggacgaggagctgctcaaggagaaggtagagaacagccgcgccgtcgagaaatccaaaatcggagtgctgctctacatcctcaacatggtcctgtccaagacgtcgtacatgatcgtgttcgacgacatccgggcgtaccgccacgacgacgacgacgcacagggatgctggtacagcaacctcacgctgctgccgccggcggagggcgagtggggggaccgcctcgcctacggcctgcccaagacgaaacacaggggcgccgtgctggtgacctgccgcaaggaagacgacgccaagaccatggcgcgcacgggcctcgtggtccgcccgcccaagctcgaaggtgatgacgcctggaagctcttcagaagagagtacgaccaggccaaggacgacaagcgcaacaaggacggcggcggcaaagaaggcagcaagggggaggaggaggacctgctcctcaagcagctgcaggagatgaagaaggagatcgtgggcaagtgcctcggcctgccggtggccatcatcgaggcggctaggggcttcgccgacctcgagcccttgccggatgatactagtcccctcaaaccggtgaccagcaaggacattgacaaggacaagcagctgtctcaagcaaataagtaacagattagttgaattcgtgctgtgtaatgcttctgcgttgctttggctctcttctaataaaatttaattatgggctataaaagtcaaaaattttaatttgaaatataa

SEQ ID NO: 28063 - DNA, 2458 bp, Zea Mays
tccgctttgtctcagcctctctcttccgtactgcttctcctctacctccgtcgccagccagccactacctcgattcgctcccctccggccctcctgtcgcgcgcgctctgcctcactggcgccacggtcgcccgcgccggcaggctcgagtccctcgacgccatcgcctagattgtctactagctggcccccgctcgccgcgaggtggtgcttgcggaggtggcggcgatcgtgcctgcatggtgctcgacaaaaagatatgggacgccaagaacatgatgtgcatcgtggacccgcgccacggttgctacctgacggcgtccgccatgttctgcgacaagatgagcaacagggaggtggacgagcagatgcttaacgtgccaaacaatgactcctacttcgtggactcgatctccaacaacgttcagtccacggatgtgcctcttttgagagtgaattatacttttactcaattaggatattgtgtttctttggatctttgtttgattaatgatttttttggatgagagtgtggctacaggatgaagcaatgcattttttgatggaacacacatgtgcagtatacaaatggaccatcaggttgcgggtaccctttgttctaagttgttgagtgagcagaatgaaggctagaagtagaagctacactggccggtttcaggtcgcgttgtctttttgtatcattcttgtccaaaagctatataaaagaagcatgggcaaccagtgacatccatctccatgatctatccacaaaacaaacaatggcgaagcagactgagagctacgagctgcacaaactgcggccccaggtggatgacctgttcaaggagttcgacgccctggtcgacagacctctggatgagagggaggacctggctgcaatcttcaaggtcctcgaagagatcagggacaagatcaagatcaaacacggtggcaagaaagtagacgacgacgagctccttccgcggagcaagaggggggacctggccaacctgctccccctcatcaggactgcactggagctacgcagcaagccgccgccgccgcctgtgcagcaggacgccacgggcggtgcccacgacagcaagccgaccggctgcatcccctgcaagccccggccgtcgcagcagcacaaggaagaaaaagaaggcagcaaggaagtcgtgtcactcaagctgctgctccggctgacccagaacgtgctggagccggagcagtactacgagtggacgaccagctacgtggacgaggagaggatctacgggtgggacaaggaggccggcgaggtgatcgacgccctcgtggccgccgccgacggctcgggggcgcggatgttccgggccgcgggcatcgcgggcatccacggcagcggcaagacggcgctggcgcggaaggtgttcgtgcacgacaaggccaaggacaacttcgcgctccgcctgtgggtgtgcgtcggcccgccggactcggaggaccgcttcaacctcctctaccggatgctcgacaacctcggcctcgacaccgacaaggtcgaggaggtcgtcgacaagtccagcgtcgtcagagacgccaggggcagaacggaggcggagctccggaaggccgcagccagacctgccgagcagaagaaggcgagggcagcgtcgtcgtcaccgaggccggcgccggtggagatgccaacaggcaggcaaaggacgaggagctgctcaaggagaaggtagagaacagccgcgccgtcgagaaatccaaaatcggagtgctgctctacatcctcaacatggtcctgtccaagacgtcgtacatgatcgtgttcgacgacatccgggcgtaccgccacgacgacgacgacgcacagggatgctggtacagcaacctcacgctgctgccgccggcggagggcgagtggggggaccgcctcgcctacggcctgcccaagacgaaacacaggggcgccgtgctggtgacctgccgcaaggaagacgacgccaagaccatggcgcgcacgggcctcgtggtccgcccgcccaagctcgaaggtgatgacgcctggaagctcttcagaagagagtacgaccaggccaaggacgacaagcgcaacaaggacggcggcggcaaagaaggcagcaagggggaggaggaggacctgctcctcaagcagctgcaggagatgaagaaggagatcgtgggcaagtgcctcggcctgccggtggccatcatcgaggcggctaggggcttcgccgacctcgagcccttgccggatgatactagtcccctcaaaccggtgaccagcaaggacattgacaaggacaagcagctgtctcaagcaaataagtaacagattagttgaattcgtgctgtgtaatgcttctgcgttgctttggctctcttctaataaaatttaattatgggctataaaagtcaaaaattttaatttgaaatataa

SEQ ID NO: 28064 - DNA, 2744 bp, Zea Mays
gttcgattccgctttgtctcagcctctctcttccgtactgcttctcctctacctccgtcgccagccagccactacctcgattcgctcccctccggccctcctgtcgcgcgcgctctgcctcactggcgccacggtcgcccgcgccggcaggctcgagtccctcgacgccatcgcctagattgtctactagctggcccccgctcgccgcgaggtggtgcttgcggaggtggcggcgatcgtgcctgcatggtgctcgacaaaaaggtgctctacgagacgacatctgcttccgcgcgcacaagctcaccatgcgcagcttcggtgacgtttagccacgtcatctccgccaccatgagcggcgtcacctgctgcctttgcttctccggtcagctcaactccgatctccgtaggctagccgtcaacctgatcccgttcccgcgcctgcacttcttcatgatatgggacgccaagaacatgatgtgcatcgtggacccgcgccacggttgctacctgacggcgtccgccatgttctgcgacaagatgagcaacagggaggtggacgagcagatgcttaacgtgccaaacaatgactcctacttcgtggactcgatctccaacaacgttcagtccacggatgtgcctcttttgagagtgaattatacttttactcaattaggatattgtgtttctttggatctttgtttgattaatgatttttttggatgagagtgtggctacaggatgaagcaatgcattttttgatggaacacacatgtgcagtatacaaatggaccatcaggttgcggagcattccattattccaaccttattccagagtagttctgtgcactttaaagccgaacgtttgtggatccagaaaagaagcaaattttgtaccctttgttctaagttgttgagtgagcagaatgaaggctagaagtagaagctacactggccggtttcaggtcgcgttgtctttttgtatcattcttgtccaaaagctatataaaagaagcatgggcaaccagtgacatccatctccatgatctatccacaaaacaaacaatggcgaagcagactgagagctacgagctgcacaaactgcggccccaggtggatgacctgttcaaggagttcgacgccctggtcgacagacctctggatgagagggaggacctggctgcaatcttcaaggtcctcgaagagatcagggacaagatcaagatcaaacacggtggcaagaaagtagacgacgacgagctccttccgcggagcaagaggggggacctggccaacctgctccccctcatcaggactgcactggagctacgcagcaagccgccgccgccgcctgtgcagcaggacgccacgggcggtgcccacgacagcaagccgaccggctgcatcccctgcaagccccggccgtcgcagcagcacaaggaagaaaaagaaggcagcaaggaagtcgtgtcactcaagctgctgctccggctgacccagaacgtgctggagccggagcagtactacgagtggacgaccagctacgtggacgaggagaggatctacgggtgggacaaggaggccggcgaggtgatcgacgccctcgtggccgccgccgacggctcgggggcgcggatgttccgggccgcgggcatcgcgggcatccacggcagcggcaagacggcgctggcgcggaaggtgttcgtgcacgacaaggccaaggacaacttcgcgctccgcctgtgggtgtgcgtcggcccgccggactcggaggaccgcttcaacctcctctaccggatgctcgacaacctcggcctcgacaccgacaaggtcgaggaggtcgtcgacaagtccagcgtcgtcagagacgccaggggcagaacggaggcggagctccggaaggccgcagccagacctgccgagcagaagaaggcgagggcagcgtcgtcgtcaccgaggccggcgccggtggagatgccaacaggcaggcaaaggacgaggagctgctcaaggagaaggtagagaacagccgcgccgtcgagaaatccaaaatcggagtgctgctctacatcctcaacatggtcctgtccaagacgtcgtacatgatcgtgttcgacgacatccgggcgtaccgccacgacgacgacgacgcacagggatgctggtacagcaacctcacgctgctgccgccggcggagggcgagtggggggaccgcctcgcctacggcctgcccaagacgaaacacaggggcgccgtgctggtgacctgccgcaaggaagacgacgccaagaccatggcgcgcacgggcctcgtggtccgcccgcccaagctcgaaggtgatgacgcctggaagctcttcagaagagagtacgaccaggccaaggacgacaagcgcaacaaggacggcggcggcaaagaaggcagcaagggggaggaggaggacctgctcctcaagcagctgcaggagatgaagaaggagatcgtgggcaagtgcctcggcctgccggtggccatcatcgaggcggctaggggcttcgccgacctcgagcccttgccggatgatactagtcccctcaaaccggtgaccagcaaggacattgacaaggacaagcagctgtctcaagcaaataagtaacagattagttgaattcgtgctgtgtaatgcttctgcgttgctttggctctcttctaataaaatttaattatgggctataaaagtcaaaaattttaatttgaaatataa

SEQ ID NO: 28065 - DNA, 2700 bp, Zea Mays
gttcgattccgctttgtctcagcctctctcttccgtactgcttctcctctacctccgtcgccagccagccactacctcgattcgctcccctccggccctcctgtcgcgcgcgctctgcctcactggcgccacggtcgcccgcgccggcaggctcgagtccctcgacgccatcgcctagattgtctactagctggcccccgctcgccgcgaggtggtgcttgcggaggtggcggcgatcgtgcctgcatggtgctcgacaaaaagccacgtcatctccgccaccatgagcggcgtcacctgctgcctttgcttctccggtcagctcaactccgatctccgtaggctagccgtcaacctgatcccgttcccgcgcctgcacttcttcatgatatgggacgccaagaacatgatgtgcatcgtggacccgcgccacggttgctacctgacggcgtccgccatgttctgcgacaagatgagcaacagggaggtggacgagcagatgcttaacgtgccaaacaatgactcctacttcgtggactcgatctccaacaacgttcagtccacggatgtgcctcttttgagagtgaattatacttttactcaattaggatattgtgtttctttggatctttgtttgattaatgatttttttggatgagagtgtggctacaggatgaagcaatgcattttttgatggaacacacatgtgcagtatacaaatggaccatcaggttgcggagcattccattattccaaccttattccagagtagttctgtgcactttaaagccgaacgtttgtggatccagaaaagaagcaaattttgtatgtatatatgtgtagatccaggtaccctttgttctaagttgttgagtgagcagaatgaaggctagaagtagaagctacactggccggtttcaggtcgcgttgtctttttgtatcattcttgtccaaaagctatataaaagaagcatgggcaaccagtgacatccatctccatgatctatccacaaaacaaacaatggcgaagcagactgagagctacgagctgcacaaactgcggccccaggtggatgacctgttcaaggagttcgacgccctggtcgacagacctctggatgagagggaggacctggctgcaatcttcaaggtcctcgaagagatcagggacaagatcaagatcaaacacggtggcaagaaagtagacgacgacgagctccttccgcggagcaagaggggggacctggccaacctgctccccctcatcaggactgcactggagctacgcagcaagccgccgccgccgcctgtgcagcaggacgccacgggcggtgcccacgacagcaagccgaccggctgcatcccctgcaagccccggccgtcgcagcagcacaaggaagaaaaagaaggcagcaaggaagtcgtgtcactcaagctgctgctccggctgacccagaacgtgctggagccggagcagtactacgagtggacgaccagctacgtggacgaggagaggatctacgggtgggacaaggaggccggcgaggtgatcgacgccctcgtggccgccgccgacggctcgggggcgcggatgttccgggccgcgggcatcgcgggcatccacggcagcggcaagacggcgctggcgcggaaggtgttcgtgcacgacaaggccaaggacaacttcgcgctccgcctgtgggtgtgcgtcggcccgccggactcggaggaccgcttcaacctcctctaccggatgctcgacaacctcggcctcgacaccgacaaggtcgaggaggtcgtcgacaagtccagcgtcgtcagagacgccaggggcagaacggaggcggagctccggaaggccgcagccagacctgccgagcagaagaaggcgagggcagcgtcgtcgtcaccgaggccggcgccggtggagatgccaacaggcaggcaaaggacgaggagctgctcaaggagaaggtagagaacagccgcgccgtcgagaaatccaaaatcggagtgctgctctacatcctcaacatggtcctgtccaagacgtcgtacatgatcgtgttcgacgacatccgggcgtaccgccacgacgacgacgacgcacagggatgctggtacagcaacctcacgctgctgccgccggcggagggcgagtggggggaccgcctcgcctacggcctgcccaagacgaaacacaggggcgccgtgctggtgacctgccgcaaggaagacgacgccaagaccatggcgcgcacgggcctcgtggtccgcccgcccaagctcgaaggtgatgacgcctggaagctcttcagaagagagtacgaccaggccaaggacgacaagcgcaacaaggacggcggcggcaaagaaggcagcaagggggaggaggaggacctgctcctcaagcagctgcaggagatgaagaaggagatcgtgggcaagtgcctcggcctgccggtggccatcatcgaggcggctaggggcttcgccgacctcgagcccttgccggatgatactagtcccctcaaaccggtgaccagcaaggacattgacaaggacaagcagctgtctcaagcaaataagtaacagattagttgaattcgtgctgtgtaatgcttctgcgttgctttggctctcttctaataaaatttaattatgggctataaaagtcaaaaattttaatttgaaatataa

SEQ ID NO: 28066 - DNA, 2590 bp, Zea Mays
tgacgttcgattccgctttgtctcagcctctctcttccgtactgcttctcctctacctccgtcgccagccagccactacctcgattcgctcccctccggccctcctgtcgcgcgcgctctgcctcactggcgccacggtcgcccgcgccggcaggctcgagtccctcgacgccatcgcctagattgtctactagctggcccccgctcgccgcgaggtggtgcttgcggaggtggcggcgatcgtgcctgcatggtgctcgacaaaaaggtgctctacgagacgacatctgcttccgcgcgcacaagctcaccatgcgcagcttcggtgacgtttagccacgtcatctccgccaccatgagcggcgtcacctgctgcctttgcttctccgatatgggacgccaagaacatgatgtgcatcgtggacccgcgccacggttgctacctgacggcgtccgccatgttctgcgacaagatgagcaacagggaggtggacgagcagatgcttaacgtgccaaacaatgactcctacttcgtggactcgatctccaacaacgttcagtccacggatgtgcctcttttgagagtgaattatacttttactcaattaggatattgtgtttctttggatctttgtttgattaatgatttttttggatgagagtgtggctacaggatgaagcaatgcattttttgatggaacacacatgtgcagtatacaaatggaccatcaggttgcgggtaccctttgttctaagttgttgagtgagcagaatgaaggctagaagtagaagctacactggccggtttcaggtcgcgttgtctttttgtatcattcttgtccaaaagctatataaaagaagcatgggcaaccagtgacatccatctccatgatctatccacaaaacaaacaatggcgaagcagactgagagctacgagctgcacaaactgcggccccaggtggatgacctgttcaaggagttcgacgccctggtcgacagacctctggatgagagggaggacctggctgcaatcttcaaggtcctcgaagagatcagggacaagatcaagatcaaacacggtggcaagaaagtagacgacgacgagctccttccgcggagcaagaggggggacctggccaacctgctccccctcatcaggactgcactggagctacgcagcaagccgccgccgccgcctgtgcagcaggacgccacgggcggtgcccacgacagcaagccgaccggctgcatcccctgcaagccccggccgtcgcagcagcacaaggaagaaaaagaaggcagcaaggaagtcgtgtcactcaagctgctgctccggctgacccagaacgtgctggagccggagcagtactacgagtggacgaccagctacgtggacgaggagaggatctacgggtgggacaaggaggccggcgaggtgatcgacgccctcgtggccgccgccgacggctcgggggcgcggatgttccgggccgcgggcatcgcgggcatccacggcagcggcaagacggcgctggcgcggaaggtgttcgtgcacgacaaggccaaggacaacttcgcgctccgcctgtgggtgtgcgtcggcccgccggactcggaggaccgcttcaacctcctctaccggatgctcgacaacctcggcctcgacaccgacaaggtcgaggaggtcgtcgacaagtccagcgtcgtcagagacgccaggggcagaacggaggcggagctccggaaggccgcagccagacctgccgagcagaagaaggcgagggcagcgtcgtcgtcaccgaggccggcgccggtggagatgccaacaggcaggcaaaggacgaggagctgctcaaggagaaggtagagaacagccgcgccgtcgagaaatccaaaatcggagtgctgctctacatcctcaacatggtcctgtccaagacgtcgtacatgatcgtgttcgacgacatccgggcgtaccgccacgacgacgacgacgcacagggatgctggtacagcaacctcacgctgctgccgccggcggagggcgagtggggggaccgcctcgcctacggcctgcccaagacgaaacacaggggcgccgtgctggtgacctgccgcaaggaagacgacgccaagaccatggcgcgcacgggcctcgtggtccgcccgcccaagctcgaaggtgatgacgcctggaagctcttcagaagagagtacgaccaggccaaggacgacaagcgcaacaaggacggcggcggcaaagaaggcagcaagggggaggaggaggacctgctcctcaagcagctgcaggagatgaagaaggagatcgtgggcaagtgcctcggcctgccggtggccatcatcgaggcggctaggggcttcgccgacctcgagcccttgccggatgatactagtcccctcaaaccggtgaccagcaaggacattgacaaggacaagcagctgtctcaagcaaataagtaacagattagttgaattcgtgctgtgtaatgcttctgcgttgctttggctctcttctaataaaatttaattatgggctataaaagtcaaaaattttaatttgaaatataa

SEQ ID NO: 28067 - DNA, 2556 bp, Zea Mays
gttgacgttcgattccgctttgtctcagcctctctcttccgtactgcttctcctctacctccgtcgccagccagccactacctcgattcgctcccctccggccctcctgtcgcgcgcgctctgcctcactggcgccacggtcgcccgcgccggcaggctcgagtccctcgacgccatcgcctagattgtctactagctggcccccgctcgccgcgaggtggtgcttgcggaggtggcggcgatcgtgcctgcatggtgctcgacaaaaaggtgctctacgagacgacatctgcttccgcgcgcacaagctcaccatgcgcagcttcggtgacgtttagccacgtcatctccgccaccatgagcggcgtcacctgctgcctttgcttctccgatatgggacgccaagaacatgatgtgcatcgtggacccgcgccacggttgctacctgacggcgtccgccatgttctgcgacaagatgagcaacagggaggtggacgagcagatgcttaacgtgccaaacaatgactcctacttcgtggactcgatctccaacaacgttcagtccacggatgtgcctcttttgagagtgaattatacttttactcaattaggatattgtgtttctttggatctttgtttgattaatgatttttttggatgagagtgtggctacaggatgaagcaatgcattttttgatggaacacacatgtgcagtatacaaatggaccatcaggttgcgggtaccctttgttctaagttgttgagtgagcagaatgaaggctagaagtagaagctacactggccggtttcagctatataaaagaagcatgggcaaccagtgacatccatctccatgatctatccacaaaacaaacaatggcgaagcagactgagagctacgagctgcacaaactgcggccccaggtggatgacctgttcaaggagttcgacgccctggtcgacagacctctggatgagagggaggacctggctgcaatcttcaaggtcctcgaagagatcagggacaagatcaagatcaaacacggtggcaagaaagtagacgacgacgagctccttccgcggagcaagaggggggacctggccaacctgctccccctcatcaggactgcactggagctacgcagcaagccgccgccgccgcctgtgcagcaggacgccacgggcggtgcccacgacagcaagccgaccggctgcatcccctgcaagccccggccgtcgcagcagcacaaggaagaaaaagaaggcagcaaggaagtcgtgtcactcaagctgctgctccggctgacccagaacgtgctggagccggagcagtactacgagtggacgaccagctacgtggacgaggagaggatctacgggtgggacaaggaggccggcgaggtgatcgacgccctcgtggccgccgccgacggctcgggggcgcggatgttccgggccgcgggcatcgcgggcatccacggcagcggcaagacggcgctggcgcggaaggtgttcgtgcacgacaaggccaaggacaacttcgcgctccgcctgtgggtgtgcgtcggcccgccggactcggaggaccgcttcaacctcctctaccggatgctcgacaacctcggcctcgacaccgacaaggtcgaggaggtcgtcgacaagtccagcgtcgtcagagacgccaggggcagaacggaggcggagctccggaaggccgcagccagacctgccgagcagaagaaggcgagggcagcgtcgtcgtcaccgaggccggcgccggtggagatgccaacaggcaggcaaaggacgaggagctgctcaaggagaaggtagagaacagccgcgccgtcgagaaatccaaaatcggagtgctgctctacatcctcaacatggtcctgtccaagacgtcgtacatgatcgtgttcgacgacatccgggcgtaccgccacgacgacgacgacgcacagggatgctggtacagcaacctcacgctgctgccgccggcggagggcgagtggggggaccgcctcgcctacggcctgcccaagacgaaacacaggggcgccgtgctggtgacctgccgcaaggaagacgacgccaagaccatggcgcgcacgggcctcgtggtccgcccgcccaagctcgaaggtgatgacgcctggaagctcttcagaagagagtacgaccaggccaaggacgacaagcgcaacaaggacggcggcggcaaagaaggcagcaagggggaggaggaggacctgctcctcaagcagctgcaggagatgaagaaggagatcgtgggcaagtgcctcggcctgccggtggccatcatcgaggcggctaggggcttcgccgacctcgagcccttgccggatgatactagtcccctcaaaccggtgaccagcaaggacattgacaaggacaagcagctgtctcaagcaaataagtaacagattagttgaattcgtgctgtgtaatgcttctgcgttgctttggctctcttctaataaaatttaattatgggctataaaagtcaaaaattttaatttgaaatataa

SEQ ID NO: 28068 - DNA, 2703 bp, Zea Mays
gttgacgttcgattccgctttgtctcagcctctctcttccgtactgcttctcctctacctccgtcgccagccagccactacctcgattcgctcccctccggccctcctgtcgcgcgcgctctgcctcactggcgccacggtcgcccgcgccggcaggctcgagtccctcgacgccatcgcctagattgtctactagctggcccccgctcgccgcgaggtggtgcttgcggaggtggcggcgatcgtgcctgcatggtgctcgacaaaaaggtgctctacgagacgacatctgcttccgcgcgcacaagctcaccatgcgcagcttcggtgacgtttagccacgtcatctccgccaccatgagcggcgtcacctgctgcctttgcttctccgatatgggacgccaagaacatgatgtgcatcgtggacccgcgccacggttgctacctgacggcgtccgccatgttctgcgacaagatgagcaacagggaggtggacgagcagatgcttaacgtgccaaacaatgactcctacttcgtggactcgatctccaacaacgttcagtccacggatgtgcctcttttgagagtgaattatacttttactcaattaggatattgtgtttctttggatctttgtttgattaatgatttttttggatgagagtgtggctacaggatgaagcaatgcattttttgatggaacacacatgtgcagtatacaaatggaccatcaggttgcggagcattccattattccaaccttattccagagtagttctgtgcactttaaagccgaacgtttgtggatccagaaaagaagcaaattttgtatgtatatatgtgtagatccaggtaccctttgttctaagttgttgagtgagcagaatgaaggctagaagtagaagctacactggccggtttcaggtcgcgttgtctttttgtatcattcttgtccaaaagctatataaaagaagcatgggcaaccagtgacatccatctccatgatctatccacaaaacaaacaatggcgaagcagactgagagctacgagctgcacaaactgcggccccaggtggatgacctgttcaaggagttcgacgccctggtcgacagacctctggatgagagggaggacctggctgcaatcttcaaggtcctcgaagagatcagggacaagatcaagatcaaacacggtggcaagaaagtagacgacgacgagctccttccgcggagcaagaggggggacctggccaacctgctccccctcatcaggactgcactggagctacgcagcaagccgccgccgccgcctgtgcagcaggacgccacgggcggtgcccacgacagcaagccgaccggctgcatcccctgcaagccccggccgtcgcagcagcacaaggaagaaaaagaaggcagcaaggaagtcgtgtcactcaagctgctgctccggctgacccagaacgtgctggagccggagcagtactacgagtggacgaccagctacgtggacgaggagaggatctacgggtgggacaaggaggccggcgaggtgatcgacgccctcgtggccgccgccgacggctcgggggcgcggatgttccgggccgcgggcatcgcgggcatccacggcagcggcaagacggcgctggcgcggaaggtgttcgtgcacgacaaggccaaggacaacttcgcgctccgcctgtgggtgtgcgtcggcccgccggactcggaggaccgcttcaacctcctctaccggatgctcgacaacctcggcctcgacaccgacaaggtcgaggaggtcgtcgacaagtccagcgtcgtcagagacgccaggggcagaacggaggcggagctccggaaggccgcagccagacctgccgagcagaagaaggcgagggcagcgtcgtcgtcaccgaggccggcgccggtggagatgccaacaggcaggcaaaggacgaggagctgctcaaggagaaggtagagaacagccgcgccgtcgagaaatccaaaatcggagtgctgctctacatcctcaacatggtcctgtccaagacgtcgtacatgatcgtgttcgacgacatccgggcgtaccgccacgacgacgacgacgcacagggatgctggtacagcaacctcacgctgctgccgccggcggagggcgagtggggggaccgcctcgcctacggcctgcccaagacgaaacacaggggcgccgtgctggtgacctgccgcaaggaagacgacgccaagaccatggcgcgcacgggcctcgtggtccgcccgcccaagctcgaaggtgatgacgcctggaagctcttcagaagagagtacgaccaggccaaggacgacaagcgcaacaaggacggcggcggcaaagaaggcagcaagggggaggaggaggacctgctcctcaagcagctgcaggagatgaagaaggagatcgtgggcaagtgcctcggcctgccggtggccatcatcgaggcggctaggggcttcgccgacctcgagcccttgccggatgatactagtcccctcaaaccggtgaccagcaaggacattgacaaggacaagcagctgtctcaagcaaataagtaacagattagttgaattcgtgctgtgtaatgcttctgcgttgctttggctctcttctaataaaatttaattatgggctataaaagtcaaaaattttaatttgaaatataa

SEQ ID NO: 28069 - DNA, 1967 bp, Zea Mays
cagattcttctccctgtcgcgacctctgacgatgcggtctccaagtccaggatgaagcaatgcattttttgatggaacacacatgtgcagtatacaaatggaccatcaggttgcgggtaccctttgttctaagttgttgagtgagcagaatgaaggctagaagtagaagctacactggccggtttcaggtcgcgttgtctttttgtatcattcttgtccaaaagctatataaaagaagcatgggcaaccagtgacatccatctccatgatctatccacaaaacaaacaatggcgaagcagactgagagctacgagctgcacaaactgcggccccaggtggatgacctgttcaaggagttcgacgccctggtcgacagacctctggatgagagggaggacctggctgcaatcttcaaggtcctcgaagagatcagggacaagatcaagatcaaacacggtggcaagaaagtagacgacgacgagctccttccgcggagcaagaggggggacctggccaacctgctccccctcatcaggactgcactggagctacgcagcaagccgccgccgccgcctgtgcagcaggacgccacgggcggtgcccacgacagcaagccgaccggctgcatcccctgcaagccccggccgtcgcagcagcacaaggaagaaaaagaaggcagcaaggaagtcgtgtcactcaagctgctgctccggctgacccagaacgtgctggagccggagcagtactacgagtggacgaccagctacgtggacgaggagaggatctacgggtgggacaaggaggccggcgaggtgatcgacgccctcgtggccgccgccgacggctcgggggcgcggatgttccgggccgcgggcatcgcgggcatccacggcagcggcaagacggcgctggcgcggaaggtgttcgtgcacgacaaggccaaggacaacttcgcgctccgcctgtgggtgtgcgtcggcccgccggactcggaggaccgcttcaacctcctctaccggatgctcgacaacctcggcctcgacaccgacaaggtcgaggaggtcgtcgacaagtccagcgtcgtcagagacgccaggggcagaacggaggcggagctccggaaggccgcagccagacctgccgagcagaagaaggcgagggcagcgtcgtcgtcaccgaggccggcgccggtggagatgccaacaggcaggcaaaggacgaggagctgctcaaggagaaggtagagaacagccgcgccgtcgagaaatccaaaatcggagtgctgctctacatcctcaacatggtcctgtccaagacgtcgtacatgatcgtgttcgacgacatccgggcgtaccgccacgacgacgacgacgcacagggatgctggtacagcaacctcacgctgctgccgccggcggagggcgagtggggggaccgcctcgcctacggcctgcccaagacgaaacacaggggcgccgtgctggtgacctgccgcaaggaagacgacgccaagaccatggcgcgcacgggcctcgtggtccgcccgcccaagctcgaaggtgatgacgcctggaagctcttcagaagagagtacgaccaggccaaggacgacaagcgcaacaaggacggcggcggcaaagaaggcagcaagggggaggaggaggacctgctcctcaagcagctgcaggagatgaagaaggagatcgtgggcaagtgcctcggcctgccggtggccatcatcgaggcggctaggggcttcgccgacctcgagcccttgccggatgatactagtcccctcaaaccggtgaccagcaaggacattgacaaggacaagcagctgtctcaagcaaataagtaacagattagttgaattcgtgctgtgtaatgcttctgcgttgctttggctctcttctaataaaatttaattatgggctataaaagtcaaaaattttaatttgaaatataa

SEQ ID NO: 28070 - DNA, 1489 bp, Zea Mays
cttttttatatgacatctactttagaattgaatccatcagtgatgaaggatggaacgatgagacaattaatctgggtaaaagagcttctgttgatatccatgggattaatgatccgatgtttgacaaatctgggaaaaaacccagaaatgaagatgaaattggtgatgaagacccattgcctaattttagggtgggtgagacctcctctcaaggcaaagaatcctttaaaaaatctgaagttttcatagatagttctaaagacaaaccaggtgatgggctgagattggaagatcttagtgatgagaaagtggattttgatcccaatgaagatgacctgttgagttctcaagagttagaagaatttgcaaaagatatggaagaaatgcagactgacttccaagctaaagtgggtgaggtgatctcgattccctcgactaaagatgaaaagcaggatctggtgggtaaaaaatcaagcgagattcagatgtctactactgaaggcataaaaaagctcaagattggagaagaacgaagatattaaggtggtagacaaggctattttcagagctgaagctaaggccgccttcctcaacaaatcgctgtcatcgccgccgccgtcagccgtcctggcggcggacgacgacggcaccacgcacctgcacttcttcatgcacgacgtggtgaccgggagcaacccgacggcggtgcaggtgatcaagggcgcggggtcgtcggtcgtcccggggctggcgttcggcgacaccacggtgatcgacgacgcgctgacggagacgtcgtcgcccacgtccgccgccgtgggccgcgctcagggcttctacatgatgtcgtcgcagtcgggcatcgtgctcatggtgtgcgccaacctgctgctcaccgcgggggaccacaacggcagcacgctcgcggtggtgggccgggacgacgtcgcggcggacgtgcgggagctctccgtcgtcggcggcacgggccggttcaggatggccaccggctacgtgctgtggaagacgtccagcatgaacgggcctgacgctaccgtcgagctcgacgtgcacgtgaggacggccacaaccgccgccacgggtagcggcaccactggtgccttctcgggcgccgctgccaagcgggtcggagcagggtgggtcattgcgtgcgccgtcgccgtcgttggggcggtggttggatccggcgtctggtggtgatcggctggcgtgcagtgcagtggtgcacacagtttggtgacatgtccatgactccatgtacttgcattgcttctgctagtggtcattctgaatcatcatggtggatgtagtgttggtttacttttcgcttgtttttcagttggatattatttgacctttttctgtcatgtcgagattctgggtcgaactttttcccttttgaaatgtaagtttttgttaaactaaatatgagtacatcaaattgataattaaacggattttggaacac

SEQ ID NO: 28071 - DNA, 968 bp, Zea Mays
cttgcttcaaccctaatccattcaccgcagattcttctccctgtcgcgacctctgacgatgcggtctccaagtccagcgctgtcatcgccgccgccgtcagccgtcctggcggcggacgacgacggcaccacgcacctgcacttcttcatgcacgacgtggtgaccgggagcaacccgacggcggtgcaggtgatcaagggcgcggggtcgtcggtcgtcccggggctggcgttcggcgacaccacggtgatcgacgacgcgctgacggagacgtcgtcgcccacgtccgccgccgtgggccgcgctcagggcttctacatgatgtcgtcgcagtcgggcatcgtgctcatggtgtgcgccaacctgctgctcaccgcgggggaccacaacggcagcacgctcgcggtggtgggccgggacgacgtcgcggcggacgtgcgggagctctccgtcgtcggcggcacgggccggttcaggatggccaccggctacgtgctgtggaagacgtccagcatgaacgggcctgacgctaccgtcgagctcgacgtgcacgtgaggacggccacaaccgccgccacgggtagcggcaccactggtgccttctcgggcgccgctgccaagcgggtcggagcagggtgggtcattgcgtgcgccgtcgccgtcgttggggcggtggttggatccggcgtctggtggtgatcggctggcgtgcagtgcagtggtgcacacagtttggtgacatgtccatgactccatgtacttgcattgcttctgctagtggtcattctgaatcatcatggtggatgtagtgttggtttacttttcgcttgtttttcagttggatattatttgacctttttctgtcatgtcgagattctgggtcgaactttttcccttttgaaatgtaagtttttgttaaactaaatatgagtacatcaaattgataattaaacggattttggaacac

SEQ ID NO: 28072 - DNA, 1732 bp, Zea Mays
gcttaacgagccagctcgaactcgaacgagccgagccggctcgttatccacaccatgtcataaacaaccctccaaatcatggcccatcacgagtgacagcccaatacccgtcccatcggtcgacgccctctgataaaaatctggcagaaaccgaaccgtagagcccgagcctcgcggtcgcggatccgtcctgcaaatctcctctcatacttctccaccggatccctgtaagattcccggagatgtcggacgaggagcaccagttcgagtccaaggccgacgccggcgcctccaagacctacccgcagcaggccggcaccatccgcaagaacggctacatcgtcatcaagggacgtccctgcaaggtgagagatttggccatcgcatgtttgaggcagatttcttagctgtggatttagatatacttcaagtgctgggtctgctgcattcacacctggaaggattttgctgcagatgtgtctatggatatgtataccgtgacctacagtgccgctctgtaggataaagatttggtttcaattttgccacagtttccatctggatgaagtgctccatggggctattcccatgtggtggttctgcacctaacatgttgtctgaacatgtctaaacaatttagtatacgttcttgttttaggttgttgaggtctccacttccaagactgggaagcatgggcatgccaagtgccactttgttggcattgacgttttcactggaaagaagcttgaggatattgttccttcttctcacaactgtgatgttccccatgttgatcgcactgagtatcagctgattgacatcactgaagatggatttgtgagccttttgactgacagtggcaacactaaggatgacctcaggcttccgactgatgaagctctggaaggccagatcaagagcggatatgatgatggaaaggacctcctcctgacggtgatgtcttccatgggcgaggaacagatctgcgctgtcaaggagatcgggggcaagaactaaagccgctgctgctgtctcgtgtgcttagagttgagatgcatagataaagcgtataagttatctgtggttttgggtttacctggaaatttgtcgaggtggttggtgttactactctacttggttagcgatctgtggtattcttttcaacttagttatggtcaatatgtattcagttgaaatatttggtttaaattcttgcctacagtcttgttatgccttgtaggatcggcagcagctctatcctatgcctttgtattgagggttgcgacggtctgctcgtgttcattttctgtatatctcgctgatttagatatatctaaaatatccaacacagcaagaggaggctctgtgcagttgggccaacctaaccgaaaggccaaaccagcattacgaaggtccaaaataccaagaccacatcaactcctttggacgacaggcaacgcaacacctctcaaccgtgtttgtacatgtctcttgacttgcgtatgtgtagagctcgaagtcagtcaatgatgatggtgaaagtagtggattcgtgcttatggactctgataaatgtcaaataccacaaggccttgagtaatagctctataaataagagggaaatcctctaggctaagtgttcaagaccatataccatggcatacaaacatccaagaagtaactgcaaaacttattggtgtttaactgtttattacaaaaaaaaaaaaaaaa

SEQ ID NO: 28073 - DNA, 1141 bp, Zea Mays
attcttcatagtttgatgcatgtctgcatagtggccagaagatttctggtttagtgcaccaaagaaggggattatggtttttgcattgccgggagaacctggcttagccgaggtagctggtgatttcaagatccagtttcatgatcgacagggagatttttactgctggctaaacacaacaatgatggagaacagggtaaccttgaacccaactgatcttgatgattttgacaagagaaaactgccctcacctggattccagattgaggttgtcctggtagattacgatggctcgcaaccagcaaaaccaaaaccaggcgctggacctgctgctgataaatctcatgctgattcctcggctagcacggttgcaaaagaaaatagtgctgcacctgaagaatccaacaagggaactggaagcaataatgatagagatgaagtcttctctgacagcgacggggaggatggatcttctaacggaaggaaggagaagactgccggcggtggtcaaagcagtgtaaatgctgctaaaccatcccagacaggcaacatggaggaggcggcggcatctgctgctgctagcagactggacaaagtggctataagcagcgaacagggaaccacaaaggcacctgatggtacatctctcaaaactgaagtcagcagcaaggccagctccaccacagcaccacctcctccagctgctgactcttccagcatgagcgaattcaaggcgattgccgcagatgcctcggtgttctcgttcggagatgaagatgattatgaaagtgagtaatgattctatgggtgggtacggtgttgagtttccgctgtacagtttggtgcttctaggaccccccatcatagaatgccaaagtccagagatgttaattcattcttgcatttcgtctccactgtagcagtgtcatcggtctgatgttgtacccagatgatgaaacttgttgtaactcaaccaggtcttgaacctctcctgtttgtttacagaaatgccttgtacacgaactcacttaaacagcgcaactactttttattattgatagttaaaagtgtgggtaatgtgtgtgcagccttggaaattaacaacggaaactaacactttggttgttttcggataaaaaaa

SEQ ID NO: 28074 - DNA, 2411 bp, Zea Mays
cctggcgcgagatgatttaaggcattgccaaggggattcagtcctttctgctattttacatgcttctctagtagtccattggagtaattaacatcgattacacggtcatggaagagcaccaagtcaagccatcggatctgccacccactagtttgcacaaccaggattcagccgcaactcctgttaccagtgctgaccctgctcgtcctgctgcttcaaatgattctcccagtcaggttgccagtgcagctcctgctgctgtttctgcacctaccgctgctcctgcagaagatgctgcagggcgtgaggcgtcagcatctgtgttctctgcgtctggtttatcctcctgggctaagaacctaaaaattcctcagccttcaccaggtcaagaatcacctacaggaaagaatacctttgcccgtttaacaagtggccttggactgcgtttgtctccaaaagcggcacagcaagatgagggtgctgaaggaagcacctccccaacaacaggacagcctggtgtttttggttctttaacgaaaggcattgtggattcctctaagaatgctgtaaaggcagtgcaagtcaaggctcgccacatggtctcacagaataaaagacgataccaggaaggaggatttgatttagacatgacatatattactgagaacataattgctatgggttttcctgctggtgatttgagttcagggctttttggatattttgagggtttctaccgcaaccacatggaggaagtcatcaggttctttgaaatgcaccataaggggaagtataaggtgtacaatctttgttctgaaaggctatatgatgcatctctttttgaaggaaaggtggcctgctttccttttgatgatcataactgccccccgatacaacttgtcatatcattctgccatagtgcctactcatggttgaaggaggatatagaaaatgtggtggttgtccattgcaaagctggtaaggcaaggacaggattgatgatctcgagtcttctactatttctaaagttctttcctactgctgaggagtccattgaatactataaccagaaaagatgtgtagatggaaaagggctgattctaccaagtcagattagatatgtgaagtattttgagcgcatcttaacttacttcaatggtgaaaatcagccacccaggaggtgtatgcttagggggtttcgtcttcatagatgcccctattggattaggccatcaattacagtctctaaccacaatggtgttcttttttctacaaagaagcatccaagaacaaaagaactaatgccagaagatttctggtttagtgcaccaaagaaggggattatggtttttgcattgccgggagaacctggcttagccgaggtagctggtgatttcaagatccagtttcatgatcgacagggagatttttactgctggctaaacacaacaatgatggagaacagggtaaccttgaacccaactgatcttgatgattttgacaagagaaaactgccctcacctggattccagattgaggttgtcctggtagattacgatggctcgcaaccagcaaaaccaaaaccaggcgctggacctgctgctgataaatctcatgctgattcctcggctagcacggttgcaaaagaaaatagtgctgcacctgaagaatccaacaagggaactggaagcaataatgatagagatgaagtcttctctgacagcgacggggaggatggatcttctaacggaaggaaggagaagactgccggcggtggtcaaagcagtgtaaatgctgctaaaccatcccagacaggcaacatggaggaggcggcggcatctgctgctgctagcagactggacaaagtggctataagcagcgaacagggaaccacaaaggcacctgatggtacatctctcaaaactgaagtcagcagcaaggccagctccaccacagcaccacctcctccagctgctgactcttccagcatgagcgaattcaaggcgattgccgcagatgcctcggtgttctcgttcggagatgaagatgattatgaaagtgagtaatgattctatgggtgggtacggtgttgagtttccgctgtacagtttggtgcttctaggaccccccatcatagaatgccaaagtccagagatgttaattcattcttgcatttcgtctccactgtagcagtgtcatcggtctgatgttgtacccagatgatgaaacttgttgtaactcaaccaggtcttgaacctctcctgtttgtttacagaaatgccttgtacacgaactcacttaaacagcgcaactactttttattattgatagttaaaagtgtgggtaatgtgtgtgcagccttggaaattaacaacggaaactaacactttggttgttttcggataaaaaaa

SEQ ID NO: 28075 - DNA, 2579 bp, Zea Mays
gtccacccggtggccggtgcggtgccgactgctcctcgcctgtcgcctcgcacaccggatctcgtcgccgccctcgcttctgtagtttgttcctcgcgagatctcgtgcgccgtccgtcctaccacgctgccctctgccgccaccgccaccgccaccgccaccatcaccacctgcgccggcgctcctctaggacgcagttcgcctccgaccccgactccagattttacatgcttctctagtagtccattggagtaattaacatcgattacacggtcatggaagagcaccaagtcaagccatcggatctgccacccactagtttgcacaaccaggattcagccgcaactcctgttaccagtgctgaccctgctcgtcctgctgcttcaaatgattctcccagtcaggttgccagtgcagctcctgctgctgtttctgcacctaccgctgctcctgcagaagatgctgcagggcgtgaggcgtcagcatctgtgttctctgcgtctggtttatcctcctgggctaagaacctaaaaattcctcagccttcaccaggtcaagaatcacctacaggaaagaatacctttgcccgtttaacaagtggccttggactgcgtttgtctccaaaagcggcacagcaagatgagggtgctgaaggaagcacctccccaacaacaggacagcctggtgtttttggttctttaacgaaaggcattgtggattcctctaagaatgctgtaaaggcagtgcaagtcaaggctcgccacatggtctcacagaataaaagacgataccaggaaggaggatttgatttagacatgacatatattactgagaacataattgctatgggttttcctgctggtgatttgagttcagggctttttggatattttgagggtttctaccgcaaccacatggaggaagtcatcaggttctttgaaatgcaccataaggggaagtataaggtgtacaatctttgttctgaaaggctatatgatgcatctctttttgaaggaaaggtggcctgctttccttttgatgatcataactgccccccgatacaacttgtcatatcattctgccatagtgcctactcatggttgaaggaggatatagaaaatgtggtggttgtccattgcaaagctggtaaggcaaggacaggattgatgatctcgagtcttctactatttctaaagttctttcctactgctgaggagtccattgaatactataaccagaaaagatgtgtagatggaaaagggctgattctaccaagtcagatagatatgtgaagtattttgagcgcatcttaacttacttcaatggtgaaaatcagccacccaggaggtgtatgcttagggggtttcgtcttcatagatgcccctattggattaggccatcaattacagtctctaaccacaatggtgttcttttttctacaaagaagcatccaagaacaaaagaactaatgccagaagatttctggtttagtgcaccaaagaaggggattatggtttttgcattgccgggagaacctggcttagccgaggtagctggtgatttcaagatccagtttcatgatcgacagggagatttttactgctggctaaacacaacaatgatggagaacagggtaaccttgaacccaactgatcttgatgattttgacaagagaaaactgccctcacctggattccagattgaggttgtcctggtagattacgatggctcgcaaccagcaaaaccaaaaccaggcgctggacctgctgctgataaatctcatgctgattcctcggctagcacggttgcaaaagaaaatagtgctgcacctgaagaatccaacaagggaactggaagcaataatgatagagatgaagtcttctctgacagcgacggggaggatggatcttctaacggaaggaaggagaagactgccggcggtggtcaaagcagtgtaaatgctgctaaaccatcccagacaggcaacatggaggaggcggcggcatctgctgctgctagcagactggacaaagtggctataagcagcgaacagggaaccacaaaggcacctgatggtacatctctcaaaactgaagtcagcagcaaggccagctccaccacagcaccacctcctccagctgctgactcttccagcatgagcgaattcaaggcgattgccgcagatgcctcggtgttctcgttcggagatgaagatgattatgaaagtgagtaatgattctatgggtgggtacggtgttgagtttccgctgtacagtttggtgcttctaggaccccccatcatagaatgccaaagtccagagatgttaattcattcttgcatttcgtctccactgtagcagtgtcatcggtctgatgttgtacccagatgatgaaacttgttgtaactcaaccaggtcttgaacctctcctgtttgtttacagaaatgccttgtacacgaactcacttaaacagcgcaactactttttattattgatagttaaaagtgtgggtaatgtgtgtgcagccttggaaattaacaacggaaactaacactttggttgttttcggataaaaaaa

SEQ ID NO: 28076 - DNA, 2611 bp, Zea Mays
gcgaggcccacacgtcagtcgcgtagccgctcagggtccacccggtggccggtgcggtgccgactgctcctcgcctgtcgcctcgcacaccggatctcgtcgccgccctcgcttctgtagtttgttcctcgcgagatctcgtgcgccgtccgtcctaccacgctgccctctgccgccaccgccaccgccaccgccaccatcaccacctgcgccggcgctcctctaggacgcagttcgcctccgaccccgactccagattttacatgcttctctagtagtccattggagtaattaacatcgattacacggtcatggaagagcaccaagtcaagccatcggatctgccacccactagtttgcacaaccaggattcagccgcaactcctgttaccagtgctgaccctgctcgtcctgctgcttcaaatgattctcccagtcaggttgccagtgcagctcctgctgctgtttctgcacctaccgctgctcctgcagaagatgctgcagggcgtgaggcgtcagcatctgtgttctctgcgtctggtttatcctcctgggctaagaacctaaaaattcctcagccttcaccaggtcaagaatcacctacaggaaagaatacctttgcccgtttaacaagtggccttggactgcgtttgtctccaaaagcggcacagcaagatgagggtgctgaaggaagcacctccccaacaacaggacagcctggtgtttttggttctttaacgaaaggcattgtggattcctctaagaatgctgtaaaggcagtgcaagtcaaggctcgccacatggtctcacagaataaaagacgataccaggaaggaggatttgatttagacatgacatatattactgagaacataattgctatgggttttcctgctggtgatttgagttcagggctttttggatattttgagggtttctaccgcaaccacatggaggaagtcatcaggttctttgaaatgcaccataaggggaagtataaggtgtacaatctttgttctgaaaggctatatgatgcatctctttttgaaggaaaggtggcctgctttccttttgatgatcataactgccccccgatacaacttgtcatatcattctgccatagtgcctactcatggttgaaggaggatatagaaaatgtggtggttgtccattgcaaagctggtaaggcaaggacaggattgatgatctcgagtcttctactatttctaaagttctttcctactgctgaggagtccattgaatactataaccagaaaagatgtgtagatggaaaagggctgattctaccaagtcagattagatatgtgaagtattttgagcgcatcttaacttacttcaatggtgaaaatcagccacccaggaggtgtatgcttagggggtttcgtcttcatagatgcccctattggattaggccatcaattacagtctctaaccacaatggtgttcttttttctacaaagaagcatccaagaacaaaagaactaatgaagatttctggtttagtgcaccaaagaaggggattatggtttttgcattgccgggagaacctggcttagccgaggtagctggtgatttcaagatccagtttcatgatcgacagggagatttttactgctggctaaacacaacaatgatggagaacagggtaaccttgaacccaactgatcttgatgattttgacaagagaaaactgccctcacctggattccagattgaggttgtcctggtagattacgatggctcgcaaccagcaaaaccaaaaccaggcgctggacctgctgctgataaatctcatgctgattcctcggctagcacggttgcaaaagaaaatagtgctgcacctgaagaatccaacaagggaactggaagcaataatgatagagatgaagtcttctctgacagcgacggggaggatggatcttctaacggaaggaaggagaagactgccggcggtggtcaaagcagtgtaaatgctgctaaaccatcccagacaggcaacatggaggaggcggcggcatctgctgctgctagcagactggacaaagtggctataagcagcgaacagggaaccacaaaggcacctgatggtacatctctcaaaactgaagtcagcagcaaggccagctccaccacagcaccacctcctccagctgctgactcttccagcatgagcgaattcaaggcgattgccgcagatgcctcggtgttctcgttcggagatgaagatgattatgaaagtgagtaatgattctatgggtgggtacggtgttgagtttccgctgtacagtttggtgcttctaggaccccccatcatagaatgccaaagtccagagatgttaattcattcttgcatttcgtctccactgtagcagtgtcatcggtctgatgttgtacccagatgatgaaacttgttgtaactcaaccaggtcttgaacctctcctgtttgtttacagaaatgccttgtacacgaactcacttaaacagcgcaactactttttattattgatagttaaaagtgtgggtaatgtgtgtgcagccttggaaattaacaacggaaactaacactttggttgttttcggataaaaaaa

SEQ ID NO: 28077 - DNA, 5477 bp, Zea Mays
atgtaagcaggctaaatggtttgccacatcagatttttgccaagttggaggagagagaagagaagaaaaagaagaagtgtgctgctaattatcagtcgactaagagccggctgcagcacagtttccaaaacaagcggtccatttggaggcccaggataccacaatcaagaacgtgagaagcactttgaacatcttacacctaatatgagcaaaacacgaaatggatctgcattttctcaggatgaaattaactcacacagagagcattttcgtaatgaactgaccccagattcagttgcttcaaagaagccaaaagtaaggaagaaagaaattaacaattctgtttcaacttctccccacagcattcctaataatcaagaagttattgctaccttctgtgaggcggtggaggatttctgtggaaaagctgaaattcctgacgatggtgatggtggtgactggttgtcaatcccacttgacgatgttaaggttcttgtgaatgaaattacatctgttcgatccaaaaggatattgcatgaggttcctatggatacagttacaaggttattagacgtgattgaccgtcagattcgatgttctcaaggtttgtcgatagatgtgaaggaaaattctgacgcctttgatgctgaacctctggttttctctgctttggagtccagtcatgctgcgttggcaattatgacccaccatgatatgccaaagcaactgtatcgggaagaacttattgagcgtattatcgatttctcaaggcatcagatcacagattgtatggcagcaagtaacccaacctttcgagctctctacaaaccagctggaaatgttgcaaatgatggagatgatgatgaaggtgatttggaaaatggacaagttagcaaaaggagacgtactgctactaatttgagcatgagaaaatcttcaaacagagtttctgcttctgtttattctgctgtgcagaaactatgcttgatattgggttttcttaaggaactgctcacaacagtgcgcttgtcagatagttgtattctgcaattagcgaaaacatgctttactacattcttggtggataatatgcagctattacaattgaaagcgattggggttatttgcacggtgttttcatcatacacacagcacaggagttacttggttgatgaaacacttcaccttcttcgtaagttgcagttttccaagaatgccgttagaacctaccatctagcagatgaagaccaaaagcaaatccagatgataacagcactgttagttcacttggttcagtttagtgctattgttcctgatagcttaaagggaacagttgattggaccactatcgttgatgcctctagtgatgctgattattatccaattcaatgccatgaagcggcaacagaggcttgttgtcgtttttggactgatgtccttcaacgttttactgctgctaaatctcaagatatgtcggaaaccaaagggataatagacaatcttgttcaggatttcctaacgatactaaacttgccggagtatccagctgctgcttctattcttgaggttctctgcgtgttgctgcttcagaatgctggattgaaatctaaggacattaatgctcggtgctttgctattgatcttcttggtggtattgcatcaagattaaagcgtgattctgtcgtctgtagtgaagaaaagctttggatattgcaagatttcactgataaaggcagtgacggctcaatttttttgaaaaacaagtgttgcgtttgtcttggtggaagaggcataaatatagcctgtaatgaatgtggaagatgtttccattcagattgtatgggggctggtagtcaggataacttacagcgtgatagtgtctgccccttgtgtttttgcaaacaacagctcaatgtgctacagtcgtactgccagtcacaaattaaagaaaatggcaaaaaaactgctgcctctgccagtaagaaatctgctaaaccaactgaggtgtcagcagtggaaattgttcaacaaatactactgagttatctccaagaagctggttcacaagatgatgggaacctgtttactcgatggttctatctgtgcatctggaacaaagatgaccaacattctcaggagaagatcatttactatcttgctagattaaaatccaaggagattctgcgagattctggcaatggtctggcaatttccagagattcagcaaagaaaatttgcttggcacttggtcagaagaactcattttgtaggggttttgataaaattcttgcccttcttttggctagtttgagagaaaattctcctgtaataagagcaaaagcattacgtgcggtcagctgtatagttgaagctgatcctgaggtcttgggtgacaaacgtgtccaatatgctgttgaagggagattttgtgattcagctatttctgttcgtgaagctgcccttgaacttgttgggaggcatattgcttcacatcctgatgtgggcctgaagtatatagaaaaagttgctgagcggataaaggacactggagtcagcgttcgcaagcgtgcaatcaaaattataagggatctttgtgcttcaaatccgaacacggacacaactcatgcctttgtggagataatttctcgtgttaatgatgaggagtccagtgtacaggatcttgtatgtaaaacattttatgaactatggtttgaagaaccaactgggagtcataagcacttggttgctgatggaagttcagttccaatggagatagctaaaaagactgagcaaattgttgacatgttgaggaagatgcccaatcaccaacccctgattaccatcataaaacgtaacttgactcttgatttcctccctcagtcaaccaaggctgcagggattaactcatccatggtggcatcaattcggaagcgttgtgaattgatatgcaaacgcttattagaaagaatattgcaggttgaggagggagctgctaatgagatggaaatccacacactaccttatattgttgccttgcaagcattctgtattgttgatcccacactctgcattccagtaactgatccttctaagtttgttgtgacactgcaaccataccttaatattcaggttgacaataaatcatctgcccagttgcttgaaagtattatttttgtgattgatgctgttcttccactcataaggaagccaccacaaaatgttgttgaagaacttgagaaggatctgaaacatatgatagttcgccattcgtatttgacagttgtacatgcctgtatcaagtgcctttgtgctctgagcaagtcagcaggtagaggtccaggattagtggaaaaccttgttaatattttctacaagcatctgtgtggagctaattcagatagtcagctgttgggtcgatcactgttttgtcttggactcctccttcggtatggttatcaattgatgctaacatctgaaaatcagcttgattttcccaagatcatcaacttgctccagagaaaatatcttctcaaggatgatttcagcttgaaggttcgagctttgcagactttgggatacatacttattgcgaagcctgaatttatgctacaaaaggatatgttgaatctcatagagacagcactctcttctgaggttgattatagattcaagattcaaggacttcaaaacctctacgagtatcttagagatgctgaaagccaacttactgctgagagtactgcgaaacctcctgggcagtgtgaaataaatggcagaagtgaagtgcctgttgctgctggtgctggagacaccaacatatgtggtggtattatccaattgtattggagttctattcttgaaaggtgcttggatacaaatgatcaagttcgccagagtgcacttaagattgttgaagttgtacttcgtcagggtttagtccaccctattacctgtgtacctcaccttatagcacttgaaatggacccgctggaggggaattcgaagttggctcatcatctcttgatgaatatgaatgaaaagtacccttcattttttgaaagtcgcttgggtgatggactgcaattgtcatttaaattctttgaatccatagtcagcaaccataagatgtccgcaaacataaaatcaaatccaattgcatttgtcaaacctggcatatctagaatataccgtcttatccgttcaaatcgaaattctagaaacaaatttgtccactcgatagttcggaaattcgagtctgatagccggagtcgcagcacagttagctttcttgtatactgtgctgaagttctcgcctctctgcctttcacatgctctgatgaaccactttacttgatctatgatataaatcgagctattcaccttagagctggaggagtcgagggcaatttgaaaaggtggacttctatgtctcagtctcaagagatggcgggtatgccaaccttgccaggagagagtcatgttgtcatgcaagaagagcctggcggatattatgataacatgggagatgccactgaaagggtgaatgacaatccttgcagtacttcagatgtggacattgccaaagttcagggagattgccatgatgcaatagccctccagctacttctgaaattgaagagacatttgaaagttgtttatggtttagatgatgcccgctgtcaggcattttccctgaaggagcccccgaaatctggagaaacattctccaggcagaatgtttcttttaatattggcaacactaacctcagtctgccgagctgcctgcaggacgcagcctctgtttaccaggatttcaagacagtgcttcgcgaagattccatggactttgctgtgttcgtcccttcagtccagactaggaagcgcccaaccccaagaaatacaacgagcccaaccccaagaagtatgacgagagtcaggagaacggctgccccgagtgttacaaaagcccgtggtggtgcacgtggcgacgattccgacgataccgatgacgacgactggaccgggggtccaagagtgctagacttcagtgggggcggccgcgtgacaaggcagagggtccaagtatgatgtttcttttttgcgtgcgtgcgtgtgtacattatagggaagggaaacctatagcaggcttagcagctgacacgagagagttaggggttgaattttaggtttcaggtcgtttattttagggtacatagaagcagaaaggaaaggaagatagccttttacttagatgtcattaatttggagcactccttttcttgctctgcccctgtcctgtttgtaatttccgtggggcttcggcaaaaaactgacaaaataggttgtgctccggtttctgatctctgattcaatgggaaatggaattattccttttgctttgcctgtgtaagcagttagcgcctactccgtctgttccaatatacaatttgttttagcattttatttttgtgtctata

SEQ ID NO: 28078 - DNA, 5464 bp, Zea Mays
caaggctcaatggattattctaagagcaagtataataggatgatgtaagcaggctaaatggtttgccacatcagatttttgccaagttggaggagagagaagagaagaaaaagaagaagtgtgctgctaattatcagtcgactaagagccggctgcagcacagtttccaaaacaagcggtccatttggaggcccaggataccacaatcaagaacgtgagaagcactttgaacatcttacacctaatatgagcaaaacacgaaatggatctgcattttctcaggatgaaattaactcacacagagagcattttcgtaatgaactgaccccagattcagttgcttcaaagaagccaaaagtaaggaagaaagaaattaacaattctgtttcaacttctccccacagcattcctaataatcaagaagttattgctaccttctgtgaggcggtggaggatttctgtggaaaagctgaaattcctgacgatggtgatggtggtgactggttgtcaatcccacttgacgatgttaaggttcttgtgaatgaaattacatctgttcgatccaaaaggatattgcatgaggttcctatggatacagttacaaggttattagacgtgattgaccgtcagattcgatgttctcaaggtttgtcgatagatgtgaaggaaaattcatgctgcgttggcaattatgacccaccatgatatgccaaagcaactgtatcgggaagaacttattgagcgtattatcgatttctcaaggcatcagatcacagattgtatggcagcaagtaacccaacctttcgagctctctacaaaccagctggaaatgttgcaaatgatggagatgatgatgaaggtgatttggaaaatggacaagttagcaaaaggagacgtactgctactaatttgagcatgagaaaatcttcaaacagagtttctgcttctgtttattctgctgtgcagaaactatgcttgatattgggttttcttaaggaactgctcacaacagtgcgcttgtcagatagttgtattctgcaattagcgaaaacatgctttactacattcttggtggataatatgcagctattacaattgaaagcgattggggttatttgcacggtgttttcatcatacacacagcacaggagttacttggttgatgaaacacttcaccttcttcgtaagttgcagttttccaagaatgccgttagaacctaccatctagcagatgaagaccaaaagcaaatccagatgataacagcactgttagttcacttggttcagtttagtgctattgttcctgatagcttaaagggaacagttgattggaccactatcgttgatgcctctagtgatgctgattattatccaattcaatgccatgaagcggcaacagaggcttgttgtcgtttttggactgatgtccttcaacgttttactgctgctaaatctcaagatatgtcggaaaccaaagggataatagacaatcttgttcaggatttcctaacgatactaaacttgccggagtatccagctgctgcttctattcttgaggttctctgcgtgttgctgcttcagaatgctggattgaaatctaaggacattaatgctcggtgctttgctattgatcttcttggtggtattgcatcaagattaaagcgtgattctgtcgtctgtagtgaagaaaagctttggatattgcaagatttcactgataaaggcagtgacggctcaatttttttgaaaaacaagtgttgcgtttgtcttggtggaagaggcataaatatagcctgtaatgaatgtggaagatgtttccattcagattgtatgggggctggtagtcaggataacttacagcgtgatagtgtctgccccttgtgtttttgcaaacaacagctcaatgtgctacagtcgtactgccagtcacaaattaaagaaaatggcaaaaaaactgctgcctctgccagtaagaaatctgctaaaccaactgaggtgtcagcagtggaaattgttcaacaaatactactgagttatctccaagaagctggttcacaagatgatgggaacctgtttactcgatggttctatctgtgcatctggaacaaagatgaccaacattctcaggagaagatcatttactatcttgctagattaaaatccaaggagattctgcgagattctggcaatggtctggcaatttccagagattcagcaaagaaaatttgcttggcacttggtcagaagaactcattttgtaggggttttgataaaattcttgcccttcttttgtttgagagaaaattctcctgtaataagagcaaaagcattacgtgcggtcagctgtatagttgaagctgatcctgaggtcttgggtgacaaacgtgtccaatatgctgttgaagggagattttgtgattcagctatttctgttcgtgaagctgcccttgaacttgttgggaggcatattgcttcacatcctgatgtgggcctgaagtatatagaaaaagttgctgagcggataaaggacactggagtcagcgttcgcaagcgtgcaatcaaaattataagggatctttgtgcttcaaatccgaacacggacacaactcatgcctttgtggagataatttctcgtgttaatgatgaggagtccagtgtacaggatcttgtatgtaaaacattttatgaactatggtttgaagaaccaactgggagtcataagcacttggttgctgatggaagttcagttccaatggagatagctaaaaagactgagcaaattgttgacatgttgaggaagatgcccaatcaccaacccctgattaccatcataaaacgtaacttgactcttgatttcctccctcagtcaaccaaggctgcagggattaactcatccatggtggcatcaattcggaagcgttgtgaattgatatgcaaacgcttattagaaagaatattgcaggttgaggagggagctgctaatgagatggaaatccacacactaccttatattgttgccttgcaagcattctgtattgttgatcccacactctgcattccagtaactgatccttctaagtttgttgtgacactgcaaccataccttaatattcaggttgacaataaatcatctgcccagttgcttgaaagtattatttttgtgattgatgctgttcttccactcataaggaagccaccacaaaatgttgttgaagaacttgagaaggatctgaaacatatgatagttcgccattcgtatttgacagttgtacatgcctgtatcaagtgcctttgtgctctgagcaagtcagcaggtagaggtccaggattagtggaaaaccttgttaatattttctacaagcatctgtgtggagctaattcagatagtcagctgttgggtcgatcactgttttgtcttggactcctccttcggtatggttatcaattgatgctaacatctgaaaatcagcttgattttcccaagatcatcaacttgctccagagaaaatatcttctcaaggatgatttcagcttgaaggttcgagctttgcagactttgggatacatacttattgcgaagcctgaatttatgctacaaaaggatatgttgaatctcatagagacagcactctcttctgaggttgattatagattcaagattcaaggacttcaaaacctctacgagtatcttagagatgctgaaagccaacttactgctgagagtactgcgaaacctcctgggcagtgtgaaataaatggcagaagtgaagtgcctgttgctgctggtgctggagacaccaacatatgtggtggtattatccaattgtattggagttctattcttgaaaggtgcttggatacaaatgatcaagttcgccagagtgcacttaagattgttgaagttgtacttcgtcagggtttagtccaccctattacctgtgtacctcaccttatagcacttgaaatggacccgctggaggggaattcgaagttggctcatcatctcttgatgaatatgaatgaaaagtacccttcattttttgaaagtcgcttgggtgatggactgcaattgtcatttaaattctttgaatccatagtcagcaaccataagatgtccgcaaacataaaatcaaatccaattgcatttgtcaaacctggcatatctagaatataccgtcttatccgttcaaatcgaaattctagaaacaaatttgtccactcgatagttcggaaattcgagtctgatagccggagtcgcagcacagttagctttcttgtatactgtgctgaagttctcgcctctctgcctttcacatgctctgatgaaccactttacttgatctatgatataaatcgagctattcaccttagagctggaggagtcgagggcaatttgaaaaggtggacttctatgtctcagtctcaagagatggcgggtatgccaaccttgccaggagagagtcatgttgtcatgcaagaagagcctggcggatattatgataacatgggagatgccactgaaagggtgaatgacaatccttgcagtacttcagatgtggacattgccaaagttcagggagattgccatgatgcaatagccctccagctacttctgaaattgaagagacatttgaaagttgtttatggtttagatgatgcccgctgtcaggcattttccctgaaggagcccccgaaatctggagaaacattctccaggcagaatgtttcttttaatattggcaacactaacctcagtctgccgagctgcctgcaggacgcagcctctgtttaccaggatttcaagacagtgcttcgcgaagattccatggactttgctgtgttcgtcccttcagtccagactaggaagcgcccaaccccaagaaatacaacgagcccaaccccaagaagtatgacgagagtcaggagaacggctgccccgagtgttacaaaagcccgtggtggtgcacgtggcgacgattccgacgataccgatgacgacgactggaccgggggtccaagagtgctagacttcagtgggggcggccgcgtgacaaggcagagggtccaagtatgatgtttcttttttgcgtgcgtgcgtgtgtacattatagggaagggaaacctatagcaggcttagcagctgacacgagagagttaggggttgaattttaggtttcaggtcgtttattttagggtacatagaagcagaaaggaaaggaagatagccttttacttagatgtcattaatttggagcactccttttcttgctctgcccctgtcctgtttgtaatttccgtggggcttcggcaaaaaactgacaaaataggttgtgctccggtttctgatctctgattcaatgggaaatggaattattccttttgctttgcctgtgtaagcagttagcgcctactccgtctgttccaatatacaatttgttttagcattttatttttgtgtctata

SEQ ID NO: 28079 - DNA, 5733 bp, Zea Mays
tggctgctcctgtgccttttgtgttgcgggcactattttgtagcactgaggtatttctaattccacagactgggatggaaaacatgatatacagcaggacagtgagcacttgtgcagttcatggtaaaaaaacttcgtgggcgtttcttaggccataaatgcgtgtccatcattagttcagagaaacaaggctcaatggattattctaagagcaagtataataggatgatgtaagcaggctaaatggtttgccacatcagatttttgccaagttggaggagagagaagagaagaaaaagaagaagtgtgctgctaattatcagtcgactaagagccggctgcagcacagtttccaaaacaagcggtccatttggaggcccaggataccacaatcaagaacgtgagaagcactttgaacatcttacacctaatatgagcaaaacacgaaatggatctgcattttctcaggatgaaattaactcacacagagagcattttcgtaatgaactgaccccagattcagttgcttcaaagaagccaaaagtaaggaagaaagaaattaacaattctgtttcaacttctccccacagcattcctaataatcaagaagttattgctaccttctgtgaggcggtggaggatttctgtggaaaagctgaaattcctgacgatggtgatggtggtgactggttgtcaatcccacttgacgatgttaaggttcttgtgaatgaaattacatctgttcgatccaaaaggatattgcatgaggttcctatggatacagttacaaggttattagacgtgattgaccgtcagattcgatgttctcaaggtttgtcgatagatgtgaaggaaaattctgacgcctttgatgctgaacctctggttttctctgctttggagtccagtcatgctgcgttggcaattatgacccaccatgatatgccaaagcaactgtatcgggaagaacttattgagcgtattatcgatttctcaaggcatcagatcacagattgtatggcagcaagtaacccaacctttcgagctctctacaaaccagctggaaatgttgcaaatgatggagatgatgatgaaggtgatttggaaaatggacaagttagcaaaaggagacgtactgctactaatttgagcatgagaaaatcttcaaacagagtttctgcttctgtttattctgctgtgcagaaactatgcttgatattgggttttcttaaggaactgctcacaacagtgcgcttgtcagatagttgtattctgcaattagcgaaaacatgctttactacattcttggtggataatatgcagctattacaattgaaagcgattggggttatttgcacggtgttttcatcatacacacagcacaggagttacttggttgatgaaacacttcaccttcttcgtaagttgcagttttccaagaatgccgttagaacctaccatctagcagatgaagaccaaaagcaaatccagatgataacagcactgttagttcacttggttcagtttagtgctattgttcctgatagcttaaagggaacagttgattggaccactatcgttgatgcctctagtgatgctgattattatccaattcaatgccatgaagcggcaacagaggcttgttgtcgtttttggactgatgtccttcaacgttttactgctgctaaatctcaagatatgtcggaaaccaaagggataatagacaatcttgttcaggatttcctaacgatactaaacttgccggagtatccagctgctgcttctattcttgaggttctctgcgtgttgctgcttcagaatgctggattgaaatctaaggacattaatgctcggtgctttgctattgatcttcttggtggtattgcatcaagattaaagcgtgattctgtcgtctgtagtgaagaaaagctttggatattgcaagatttcactgataaaggcagtgacggctcaatttttttgaaaaacaagtgttgcgtttgtcttggtggaagaggcataaatatagcctgtaatgaatgtggaagatgtttccattcagattgtatgggggctggtagtcaggataacttacagcgtgatagtgtctgccccttgtgtttttgcaaacaacagctcaatgtgctacagtcgtactgccagtcacaaattaaagaaaatggcaaaaaaactgctgcctctgccagtaagaaatctgctaaaccaactgaggtgtcagcagtggaaattgttcaacaaatactactgagttatctccaagaagctggttcacaagatgatgggaacctgtttactcgatggttctatctgtgcatctggaacaaagatgaccaacattctcaggagaagatcatttactatcttgctagattaaaatccaaggagattctgcgagattctggcaatggtctggcaatttccagagattcagcaaagaaaatttgcttggcacttggtcagaagaactcattttgtaggggttttgataaaattcttgcccttcttttggtatgcggttgcttccagatagttcagtttaatgtatatgttctagagttaattcccaattcttttcaggctagtttgagagaaaattctcctgtaataagagcaaaagcattacgtgcggtgagtatatgtctgtatagttgaagctgatcctgaggtcttgggtgacaaacgtgtccaatatgctgttgaagggagattttgtgattcagctatttctgttcgtgaagctgcccttgaacttgttgggaggcatattgcttcacatcctgatgtgggcctgaagtatatagaaaaagttgctgagcggataaaggacactggagtcagcgttcgcaagcgtgcaatcaaaattataagggatctttgtgcttcaaatccgaacacggacacaactcatgcctttgtggagataatttctcgtgttaatgatgaggagtccagtgtacaggatcttgtatgtaaaacattttatgaactatggtttgaagaaccaactgggagtcataagcacttggttgctgatggaagttcagttccaatggagatagctaaaaagactgagcaaattgttgacatgttgaggaagatgcccaatcaccaacccctgattaccatcataaaacgtaacttgactcttgatttcctccctcagtcaaccaaggctgcagggattaactcatccatggtggcatcaattcggaagcgttgtgaattgatatgcaaacgcttattagaaagaatattgcaggttgaggagggagctgctaatgagatggaaatccacacactaccttatattgttgccttgcaagcattctgtattgttgatcccacactctgcattccagtaactgatccttctaagtttgttgtgacactgcaaccataccttaatattcaggttgacaataaatcatctgcccagttgcttgaaagtattatttttgtgattgatgctgttcttccactcataaggaagccaccacaaaatgttgttgaagaacttgagaaggatctgaaacatatgatagttcgccattcgtatttgacagttgtacatgcctgtatcaagtgcctttgtgctctgagcaagtcagcaggtagaggtccaggattagtggaaaaccttgttaatattttctacaagcatctgtgtggagctaattcagatagtcagctgttgggtcgatcactgttttgtcttggactcctccttcggtatggttatcaattgatgctaacatctgaaaatcagcttgattttcccaagatcatcaacttgctccagagaaaatatcttctcaaggatgatttcagcttgaaggttcgagctttgcaggatatgttgaatctcatagagacagcactctcttctgaggttgattatagattcaagattcaaggacttcaaaacctctacgagtatcttagagatgctgaaagccaacttactgctgagagtactgcgaaacctcctgggcagtgtgaaataaatggcagaagtgaagtgcctgttgctgctggtgctggagacaccaacatatgtggtggtattatccaattgtattggagttctattcttgaaaggtgcttggatacaaatgatcaagttcgccagagtgcacttaagattgttgaagttgtacttcgtcagggtttagtccaccctattacctgtgtacctcaccttatagcacttgaaatggacccgctggaggggaattcgaagttggctcatcatctcttgatgaatatgaatgaaaagtacccttcattttttgaaagtcgcttgggtgatggactgcaattgtcatttaaattctttgaatccatagtcagcaaccataagatgtccgcaaacataaaatcaaatccaattgcatttgtcaaacctggcatatctagaatataccgtcttatccgttcaaatcgaaattctagaaacaaatttgtccactcgatagttcggaaattcgagtctgatagccggagtcgcagcacagttagctttcttgtatactgtgctgaagttctcgcctctctgcctttcacatgctctgatgaaccactttacttgatctatgatataaatcgagctattcaccttagagctggaggagtcgagggcaatttgaaaaggtggacttctatgtctcagtctcaagagatggcgggtatgccaaccttgccaggagagagtcatgttgtcatgcaagaagagcctggcggatattatgataacatgggagatgccactgaaagggtgaatgacaatccttgcagtacttcagatgtggacattgccaaagttcagggagattgccatgatgcaatagccctccagctacttctgaaattgaagagacatttgaaagttgtttatggtttagatgatgcccgctgtcaggcattttccctgaaggagcccccgaaatctggagaaacattctccaggcagaatgtttcttttaatattggcaacactaacctcagtctgccgagctgcctgcaggacgcagcctctgtttaccaggatttcaagacagtgcttcgcgaagattccatggactttgctgtgttcgtcccttcagtccagactaggaagcgcccaaccccaagaaatacaacgagcccaaccccaagaagtatgacgagagtcaggagaacggctgccccgagtgttacaaaagcccgtggtggtgcacgtggcgacgattccgacgataccgatgacgacgactggaccgggggtccaagagtgctagacttcagtgggggcggccgcgtgacaaggcagagggtccaagtatgatgtttcttttttgcgtgcgtgcgtgtgtacattatagggaagggaaacctatagcaggcttagcagctgacacgagagagttaggggttgaattttaggtttcaggtcgtttattttagggtacatagaagcagaaaggaaaggaagatagccttttacttagatgtcattaatttggagcactccttttcttgctctgcccctgtcctgtttgtaatttccgtggggcttcggcaaaaaactgacaaaataggttgtgctccggtttctgatctctgattcaatgggaaatggaattattccttttgctttgcctgtgtaagcagttagcgcctactccgtctgttccaatatacaatttgttttagcattttatttttgtgtctata

SEQ ID NO: 28080 - DNA, 5881 bp, Zea Mays
ctccacccttcgaaattgaaatcaaatcaaagcagcccaccaccctcgattcattcaccaccacctctccacactttgaaatcaactcaatcaaagcagcccctcctccagtcctccccaacaatcgaattccggtgcgaattggagccctcagccctcccgcgcatctagggttttgcccatggaccccgacgccggcggggctggggccgggggccgggcgggcttcgagcgggcgtgccggctgcccaacaccgtccactccgaggtcctgccgtcgctgccgctccccaccctcccgcgcgagctcggcttcgacgcgctccgcgacgacgagcccctcgccgcgcccgaccgccccgacatgatcatgcaggccgccaacatcgcccgcatcctcgccgacaccgacgtctcccacctgggcttcaccgcggcggacaacgtcgaagtggatcccagccggtgctcctggctctggagggaggtgctcaagcacaaccccgacgccttcaaggtcaaggcgcccgggccgtcttctcaaggtccatttggaggcccaggataccacaatcaagaacgtgagaagcactttgaacatcttacacctaatatgagcaaaacacgaaatggatctgcattttctcaggatgaaattaactcacacagagagcattttcgtaatgaactgaccccagattcagttgcttcaaagaagccaaaagtaaggaagaaagaaattaacaattctgtttcaacttctccccacagcattcctaataatcaagaagttattgctaccttctgtgaggcggtggaggatttctgtggaaaagctgaaattcctgacgatggtgatggtggtgactggttgtcaatcccacttgacgatgttaaggttcttgtgaatgaaattacatctgttcgatccaaaaggatattgcatgaggttcctatggatacagttacaaggttattagacgtgattgaccgtcagattcgatgttctcaaggtttgtcgatagatgtgaaggaaaattctgacgcctttgatgctgaacctctggttttctctgctttggagtccagtcatgctgcgttggcaattatgacccaccatgatatgccaaagcaactgtatcgggaagaacttattgagcgtattatcgatttctcaaggcatcagatcacagattgtatggcagcaagtaacccaacctttcgagctctctacaaaccagctggaaatgttgcaaatgatggagatgatgatgaaggtgatttggaaaatggacaagttagcaaaaggagacgtactgctactaatttgagcatgagaaaatcttcaaacagagtttctgcttctgtttattctgctgtgcagaaactatgcttgatattgggttttcttaaggaactgctcacaacagtgcgcttgtcagatagttgtattctgcaattagcgaaaacatgctttactacattcttggtggataatatgcagctattacaattgaaagcgattggggttatttgcacggtgttttcatcatacacacagcacaggagttacttggttgatgaaacacttcaccttcttcgtaagttgcagttttccaagaatgccgttagaacctaccatctagcagatgaagaccaaaagcaaatccagatgataacagcactgttagttcacttggttcagtttagtgctattgttcctgatagcttaaagggaacagttgattggaccactatcgttgatgcctctagtgatgctgattattatccaattcaatgccatgaagcggcaacagaggcttgttgtcgtttttggactgatgtccttcaacgttttactgctgctaaatctcaagatatgtcggaaaccaaagggataatagacaatcttgttcaggatttcctaacgatactaaacttgccggagtatccagctgctgcttctattcttgaggttctctgcgtgttgctgcttcagaatgctggattgaaatctaaggacattaatgctcggtgctttgctattgatcttcttggtggtattgcatcaagattaaagcgtgattctgtcgtctgtagtgaagaaaagctttggatattgcaagatttcactgataaaggcagtgacggctcaatttttttgaaaaacaagtgttgcgtttgtcttggtggaagaggcataaatatagcctgtaatgaatgtggaagatgtttccattcagattgtatgggggctggtagtcaggataacttacagcgtgatagtgtctgccccttgtgtttttgcaaacaacagctcaatgtgctacagtcgtactgccagtcacaaattaaagaaaatggcaaaaaaactgctgcctctgccagtaagaaatctgctaaaccaactgaggtgtcagcagtggaaattgttcaacaaatactactgagttatctccaagaagctggttcacaagatgatgggaacctgtttactcgatggttctatctgtgcatctggaacaaagatgaccaacattctcaggagaagatcatttactatcttgctagattaaaatccaaggagattctgcgagattctggcaatggtctggcaatttccagagattcagcaaagaaaatttgcttggcacttggtcagaagaactcattttgtaggggttttgataaaattcttgcccttcttttgtttgagagaaaattctcctgtaataagagcaaaagcattacgtgcggtcagctgtatagttgaagctgatcctgaggtcttgggtgacaaacgtgtccaatatgctgttgaagggagattttgtgattcagctatttctgttcgtgaagctgcccttgaacttgttgggaggcatattgcttcacatcctgatgtgggcctgaagtatatagaaaaagttgctgagcggataaaggacactggagtcagcgttcgcaagcgtgcaatcaaaattataagggatctttgtgcttcaaatccgaacacggacacaactcatgcctttgtggagataatttctcgtgttaatgatgaggagtccagtgtacaggatcttgtatgtaaaacattttatgaactatggtttgaagaaccaactgggagtcataagcacttggttgctgatggaagttcagttccaatggagatagctaaaaagactgagcaaattgttgacatgttgaggaagatgcccaatcaccaacccctgattaccatcataaaacgtaacttgactcttgatttcctccctcagtcaaccaaggctgcagggattaactcatccatggtggcatcaattcggaagcgttgtgaattgatatgcaaacgcttattagaaagaatattgcaggttgaggagggagctgctaatgagatggaaatccacacactaccttatattgttgccttgcaagcattctgtattgttgatcccacactctgcattccagtaactgatccttctaagtttgttgtgacactgcaaccataccttaatattcaggttgacaataaatcatctgcccagttgcttgaaagtattatttttgtgattgatgctgttcttccactcataaggaagccaccacaaaatgttgttgaagaacttgagaaggatctgaaacatatgatagttcgccattcgtatttgacagttgtacatgcctgtatcaagtgcctttgtgctctgagcaagtcagcaggtagaggtccaggattagtggaaaaccttgttaatattttctacaagcatctgtgtggagctaattcagatagtcagctgttgggtcgatcactgttttgtcttggactcctccttcggtatggttatcaattgatgctaacatctgaaaatcagcttgattttcccaagatcatcaacttgctccagagaaaatatcttctcaaggatgatttcagcttgaaggttcgagctttgcagactttgggatacatacttattgcgaagcctgaatttatgctacaaaaggatatgttgaatctcatagagacagcactctcttctgaggttgattatagattcaagattcaaggacttcaaaacctctacgagtatcttagagatgctgaaagccaacttactgctgagagtactgcgaaacctcctgggcagtgtgaaataaatggcagaagtgaagtgcctgttgctgctggtgctggagacaccaacatatgtggtggtattatccaattgtattggagttctattcttgaaaggtgcttggatacaaatgatcaagttcgccagagtgcacttaagattgttgaagttgtacttcgtcagggtttagtccaccctattacctgtgtacctcaccttatagcacttgaaatggacccgctggaggggaattcgaagttggctcatcatctcttgatgaatatgaatgaaaagtacccttcattttttgaaagtcgcttgggtgatggactgcaattgtcatttaaattctttgaatccatagtcagcaaccataagatgtccgcaaacataaaatcaaatccaattgcatttgtcaaacctggcatatctagaatataccgtcttatccgttcaaatcgaaattctagaaacaaatttgtccactcgatagttcggaaattcgagtctgatagccggagtcgcagcacagttagctttcttgtatactgtgctgaagttctcgcctctctgcctttcacatgctctgatgaaccactttacttgatctatgatataaatcgagctattcaccttagagctggaggagtcgagggcaatttgaaaaggtggacttctatgtctcagtctcaagagatggcgggtatgccaaccttgccaggagagagtcatgttgtcatgcaagaagagcctggcggatattatgataacatgggagatgccactgaaagggtgaatgacaatccttgcagtacttcagatgtggacattgccaaagttcagggagattgccatgatgcaatagccctccagctacttctgaaattgaagagacatttgaaagttgtttatggtttagatgatgcccgctgtcaggcattttccctgaaggagcccccgaaatctggagaaacattctccaggcagaatgtttcttttaatattggcaacactaacctcagtctgccgagctgcctgcaggacgcagcctctgtttaccaggatttcaagacagtgcttcgcgaagattccatggactttgctgtgttcgtcccttcagtccagactaggaagcgcccaaccccaagaaatacaacgagcccaaccccaagaagtatgacgagagtcaggagaacggctgccccgagtgttacaaaagcccgtggtggtgcacgtggcgacgattccgacgataccgatgacgacgactggaccgggggtccaagagtgctagacttcagtgggggcggccgcgtgacaaggcagagggtccaagtatgatgtttcttttttgcgtgcgtgcgtgtgtacattatagggaagggaaacctatagcaggcttagcagctgacacgagagagttaggggttgaattttaggtttcaggtcgtttattttagggtacatagaagcagaaaggaaaggaagatagccttttacttagatgtcattaatttggagcactccttttcttgctctgcccctgtcctgtttgtaatttccgtggggcttcggcaaaaaactgacaaaataggttgtgctccggtttctgatctctgattcaatgggaaatggaattattccttttgctttgcctgtgtaagcagttagcgcctactccgtctgttccaatatacaatttgttttagcattttatttttgtgtctata

SEQ ID NO: 28081 - DNA, 5962 bp, Zea Mays
tgactatacgcagtagtagataaatactactactgaatttgtcccccatttgttatagtctcaccacctctccacccttcgaaattgaaatcaaatcaaagcagcccaccaccctcgattcattcaccaccacctctccacactttgaaatcaactcaatcaaagcagcccctcctccagtcctccccaacaatcgaattccggtgcgaattggagccctcagccctcccgcgcatctagggttttgcccatggaccccgacgccggcggggctggggccgggggccgggcgggcttcgagcgggcgtgccggctgcccaacaccgtccactccgaggtcctgccgtcgctgccgctccccaccctcccgcgcgagctcggcttcgacgcgctccgcgacgacgagcccctcgccgcgcccgaccgccccgacatgatcatgcaggccgccaacatcgcccgcatcctcgccgacaccgacgtctcccacctgggcttcaccgcggcggacaacgtcgaagtggatcccagccggtgctcctggctctggagggaggtgctcaagcacaaccccgacgccttcaaggtcaaggcgcccgggccgtcttctcaagttttcaggtccatttggaggcccaggataccacaatcaagaacgtgagaagcactttgaacatcttacacctaatatgagcaaaacacgaaatggatctgcattttctcaggatgaaattaactcacacagagagcattttcgtaatgaactgaccccagattcagttgcttcaaagaagccaaaagtaaggaagaaagaaattaacaattctgtttcaacttctccccacagcattcctaataatcaagaagttattgctaccttctgtgaggcggtggaggatttctgtggaaaagctgaaattcctgacgatggtgatggtggtgactggttgtcaatcccacttgacgatgttaaggttcttgtgaatgaaattacatctgttcgatccaaaaggatattgcatgaggttcctatggatacagttacaaggttattagacgtgattgaccgtcagattcgatgttctcaaggtttgtcgatagatgtgaaggaaaattctgacgcctttgatgctgaacctctggttttctctgctttggagtccagtcatgctgcgttggcaattatgacccaccatgatatgccaaagcaactgtatcgggaagaacttattgagcgtattatcgatttctcaaggcatcagatcacagattgtatggcagcaagtaacccaacctttcgagctctctacaaaccagctggaaatgttgcaaatgatggagatgatgatgaaggtgatttggaaaatggacaagttagcaaaaggagacgtactgctactaatttgagcatgagaaaatcttcaaacagagtttctgcttctgtttattctgctgtgcagaaactatgcttgatattgggttttcttaaggaactgctcacaacagtgcgcttgtcagatagttgtattctgcaattagcgaaaacatgctttactacattcttggtggataatatgcagctattacaattgaaagcgattggggttatttgcacggtgttttcatcatacacacagcacaggagttacttggttgatgaaacacttcaccttcttcgtaagttgcagttttccaagaatgccgttagaacctaccatctagcagatgaagaccaaaagcaaatccagatgataacagcactgttagttcacttggttcagtttagtgctattgttcctgatagcttaaagggaacagttgattggaccactatcgttgatgcctctagtgatgctgattattatccaattcaatgccatgaagcggcaacagaggcttgttgtcgtttttggactgatgtccttcaacgttttactgctgctaaatctcaagatatgtcggaaaccaaagggataatagacaatcttgttcaggatttcctaacgatactaaacttgccggagtatccagctgctgcttctattcttgaggttctctgcgtgttgctgcttcagaatgctggattgaaatctaaggacattaatgctcggtgctttgctattgatcttcttggtggtattgcatcaagattaaagcgtgattctgtcgtctgtagtgaagaaaagctttggatattgcaagatttcactgataaaggcagtgacggctcaatttttttgaaaaacaagtgttgcgtttgtcttggtggaagaggcataaatatagcctgtaatgaatgtggaagatgtttccattcagattgtatgggggctggtagtcaggataacttacagcgtgatagtgtctgccccttgtgtttttgcaaacaacagctcaatgtgctacagtcgtactgccagtcacaaattaaagaaaatggcaaaaaaactgctgcctctgccagtaagaaatctgctaaaccaactgaggtgtcagcagtggaaattgttcaacaaatactactgagttatctccaagaagctggttcacaagatgatgggaacctgtttactcgatggttctatctgtgcatctggaacaaagatgaccaacattctcaggagaagatcatttactatcttgctagattaaaatccaaggagattctgcgagattctggcaatggtctggcaatttccagagattcagcaaagaaaatttgcttggcacttggtcagaagaactcattttgtaggggttttgataaaattcttgcccttcttttggctagtttgagagaaaattctcctgtaataagagcaaaagcattacgtgcggtcagctgtatagttgaagctgatcctgaggtcttgggtgacaaacgtgtccaatatgctgttgaagggagattttgtgattcagctatttctgttcgtgaagctgcccttgaacttgttgggaggcatattgcttcacatcctgatgtgggcctgaagtatatagaaaaagttgctgagcggataaaggacactggagtcagcgttcgcaagcgtgcaatcaaaattataagggatctttgtgcttcaaatccgaacacggacacaactcatgcctttgtggagataatttctcgtgttaatgatgaggagtccagtgtacaggatcttgtatgtaaaacattttatgaactatggtttgaagaaccaactgggagtcataagcacttggttgctgatggaagttcagttccaatggagatagctaaaaagactgagcaaattgttgacatgttgaggaagatgcccaatcaccaacccctgattaccatcataaaacgtaacttgactcttgatttcctccctcagtcaaccaaggctgcagggattaactcatccatggtggcatcaattcggaagcgttgtgaattgatatgcaaacgcttattagaaagaatattgcaggttgaggagggagctgctaatgagatggaaatccacacactaccttatattgttgccttgcaagcattctgtattgttgatcccacactctgcattccagtaactgatccttctaagtttgttgtgacactgcaaccataccttaatattcaggttgacaataaatcatctgcccagttgcttgaaagtattatttttgtgattgatgctgttcttccactcataaggaagccaccacaaaatgttgttgaagaacttgagaaggatctgaaacatatgatagttcgccattcgtatttgacagttgtacatgcctgtatcaagtgcctttgtgctctgagcaagtcagcaggtagaggtccaggattagtggaaaaccttgttaatattttctacaagcatctgtgtggagctaattcagatagtcagctgttgggtcgatcactgttttgtcttggactcctccttcggtatggttatcaattgatgctaacatctgaaaatcagcttgattttcccaagatcatcaacttgctccagagaaaatatcttctcaaggatgatttcagcttgaaggttcgagctttgcagactttgggatacatacttattgcgaagcctgaatttatgctacaaaaggatatgttgaatctcatagagacagcactctcttctgaggttgattatagattcaagattcaaggacttcaaaacctctacgagtatcttagagatgctgaaagccaacttactgctgagagtactgcgaaacctcctgggcagtgtgaaataaatggcagaagtgaagtgcctgttgctgctggtgctggagacaccaacatatgtggtggtattatccaattgtattggagttctattcttgaaaggtgcttggatacaaatgatcaagttcgccagagtgcacttaagattgttgaagttgtacttcgtcagggtttagtccaccctattacctgtgtacctcaccttatagcacttgaaatggacccgctggaggggaattcgaagttggctcatcatctcttgatgaatatgaatgaaaagtacccttcattttttgaaagtcgcttgggtgatggactgcaattgtcatttaaattctttgaatccatagtcagcaaccataagatgtccgcaaacataaaatcaaatccaattgcatttgtcaaacctggcatatctagaatataccgtcttatccgttcaaatcgaaattctagaaacaaatttgtccactcgatagttcggaaattcgagtctgatagccggagtcgcagcacagttagctttcttgtatactgtgctgaagttctcgcctctctgcctttcacatgctctgatgaaccactttacttgatctatgatataaatcgagctattcaccttagagctggaggagtcgagggcaatttgaaaaggtggacttctatgtctcagtctcaagagatggcgggtatgccaaccttgccaggagagagtcatgttgtcatgcaagaagagcctggcggatattatgataacatgggagatgccactgaaagggtgaatgacaatccttgcagtacttcagatgtggacattgccaaagttcagggagattgccatgatgcaatagccctccagctacttctgaaattgaagagacatttgaaagttgtttatggtttagatgatgcccgctgtcaggcattttccctgaaggagcccccgaaatctggagaaacattctccaggcagaatgtttcttttaatattggcaacactaacctcagtctgccgagctgcctgcaggacgcagcctctgtttaccaggatttcaagacagtgcttcgcgaagattccatggactttgctgtgttcgtcccttcagtccagactaggaagcgcccaaccccaagaaatacaacgagcccaaccccaagaagtatgacgagagtcaggagaacggctgccccgagtgttacaaaagcccgtggtggtgcacgtggcgacgattccgacgataccgatgacgacgactggaccgggggtccaagagtgctagacttcagtgggggcggccgcgtgacaaggcagagggtccaagtatgatgtttcttttttgcgtgcgtgcgtgtgtacattatagggaagggaaacctatagcaggcttagcagctgacacgagagagttaggggttgaattttaggtttcaggtcgtttattttagggtacatagaagcagaaaggaaaggaagatagccttttacttagatgtcattaatttggagcactccttttcttgctctgcccctgtcctgtttgtaatttccgtggggcttcggcaaaaaactgacaaaataggttgtgctccggtttctgatctctgattcaatgggaaatggaattattccttttgctttgcctgtgtaagcagttagcgcctactccgtctgttccaatatacaatttgttttagcattttatttttgtgtctata

SEQ ID NO: 28082 - DNA, 6132 bp, Zea Mays
cttcacctaaggccaacttgactatacgcagtagtagataaatactactactgaatttgtcccccatttgttatagtctcaccacctctccacccttcgaaattgaaatcaaatcaaagcagcccaccaccctcgattcattcaccaccacctctccacactttgaaatcaactcaatcaaagcagcccctcctccagtcctccccaacaatcgaattccggtgcgaattggagccctcagccctcccgcgcatctagggttttgcccatggaccccgacgccggcggggctggggccgggggccgggcgggcttcgagcgggcgtgccggctgcccaacaccgtccactccgaggtcctgccgtcgctgccgctccccaccctcccgcgcgagctcggcttcgacgcgctccgcgacgacgagcccctcgccgcgcccgaccgccccgacatgatcatgcaggccgccaacatcgcccgcatcctcgccgacaccgacgtctcccacctgggcttcaccgcggcggacaacgtcgaagtggatcccagccggtgctcctggctctggagggaggtgctcaagcacaaccccgacgccttcaaggtcaaggcgcccgggccgtcttctcaaggtccatttggaggcccaggataccacaatcaagaacgtgagaagcactttgaacatcttacacctaatatgagcaaaacacgaaatggatctgcattttctcaggatgaaattaactcacacagagagcattttcgtaatgaactgaccccagattcagttgcttcaaagaagccaaaagtaaggaagaaagaaattaacaattctgtttcaacttctccccacagcattcctaataatcaagaagttattgctaccttctgtgaggcggtggaggatttctgtggaaaagctgaaattcctgacgatggtgatggtggtgactggttgtcaatcccacttgacgatgttaaggttcttgtgaatgaaattacatctgttcgatccaaaaggatattgcatgaggttcctatggatacagttacaaggttattagacgtgattgaccgtcagattcgatgttctcaaggtttgtcgatagatgtgaaggaaaattctgacgcctttgatgctgaacctctggttttctctgctttggagtccagtcatgctgcgttggcaattatgacccaccatgatatgccaaagcaactgtatcgggaagaacttattgagcgtattatcgatttctcaaggcatcagatcacagattgtatggcagcaagtaacccaacctttcgagctctctacaaaccagctggaaatgttgcaaatgatggagatgatgatgaaggtgatttggaaaatggacaagttagcaaaaggagacgtactgctactaatttgagcatgagaaaatcttcaaacagagtttctgcttctgtttattctgctgtgcagaaactatgcttgatattgggttttcttaaggaactgctcacaacagtgcgcttgtcagatagttgtattctgcaattagcgaaaacatgctttactacattcttggtggataatatgcagctattacaattgaaagcgattggggttatttgcacggtgttttcatcatacacacagcacaggagttacttggttgatgaaacacttcaccttcttcgtaagttgcagttttccaagaatgccgttagaacctaccatctagcagatgaagaccaaaagcaaatccagatgataacagcactgttagttcacttggttcagtttagtgctattgttcctgatagcttaaagggaacagttgattggaccactatcgttgatgcctctagtgatgctgattattatccaattcaatgccatgaagcggcaacagaggcttgttgtcgtttttggactgatgtccttcaacgttttactgctgctaaatctcaagatatgtcggaaaccaaagggataatagacaatcttgttcaggatttcctaacgatactaaacttgccggagtatccagctgctgcttctattcttgaggttctctgcgtgttgctgcttcagaatgctggattgaaatctaaggacattaatgctcggtgctttgctattgatcttcttggtggtattgcatcaagattaaagcgtgattctgtcgtctgtagtgaagaaaagctttggatattgcaagatttcactgataaaggcagtgacggctcaatttttttgaaaaacaagtgttgcgtttgtcttggtggaagaggcataaatatagcctgtaatgaatgtggaagatgtttccattcagattgtatgggggctggtagtcaggataacttacagcgtgatagtgtctgccccttgtgtttttgcaaacaacagctcaatgtgctacagtcgtactgccagtcacaaattaaagaaaatggcaaaaaaactgctgcctctgccagtaagaaatctgctaaaccaactgaggtgtcagcagtggaaattgttcaacaaatactactgagttatctccaagaagctggttcacaagatgatgggaacctgtttactcgatggttctatctgtgcatctggaacaaagatgaccaacattctcaggagaagatcatttactatcttgctagattaaaatccaaggagattctgcgagattctggcaatggtctggcaatttccagagattcagcaaagaaaatttgcttggcacttggtcagaagaactcattttgtaggggttttgataaaattcttgcccttcttttggctagtttgagagaaaattctcctgtaataagagcaaaagcattacgtgcggtgagtatatgtgtaacatatgaaactatatgttttgcatctttatcattttgacaccattcatcagtatctaggactcaatttctctgtaggtcagctgtatagttgaagctgatcctgaggtcttgggtgacaaacgtgtccaatatgctgttgaagggagattttgtgattcagctatttctgttcgtgaagctgcccttgaacttgttgggaggcatattgcttcacatcctgatgtgggcctgaagtatatagaaaaagttgctgagcggataaaggacactggagtcagcgttcgcaagcgtgcaatcaaaattataagggatctttgtgcttcaaatccgaacacggacacaactcatgcctttgtggagataatttctcgtgttaatgatgaggagtccagtgtacaggatcttgtatgtaaaacattttatgaactatggtttgaagaaccaactgggagtcataagcacttggttgctgatggaagttcagttccaatggagatagctaaaaagactgagcaaattgttgacatgttgaggaagatgcccaatcaccaacccctgattaccatcataaaacgtaacttgactcttgatttcctccctcagtcaaccaaggctgcagggattaactcatccatggtggcatcaattcggaagcgttgtgaattgatatgcaaacgcttattagaaagaatattgcaggttgaggagggagctgctaatgagatggaaatccacacactaccttatattgttgccttgcaagcattctgtattgttgatcccacactctgcattccagtaactgatccttctaagtttgttgtgacactgcaaccataccttaatattcaggttgacaataaatcatctgcccagttgcttgaaagtattatttttgtgattgatgctgttcttccactcataaggaagccaccacaaaatgttgttgaagaacttgagaaggatctgaaacatatgatagttcgccattcgtatttgacagttgtacatgcctgtatcaacggtagagcttactgactgtaaccagaaggtcccaggttcgagcctcagcctctgcatattatgctggtgcctttgtgctctgagcaagtcagcaggtagaggtccaggattagtggaaaaccttgttaatattttctacaagcatctgtgtggagctaattcagatagtcagctgttgggtcgatcactgttttgtcttggactcctccttcggtatggttatcaattgatgctaacatctgaaaatcagcttgattttcccaagatcatcaacttgctccagagaaaatatcttctcaaggatgatttcagcttgaaggttcgagctttgcagactttgggatacatacttattgcgaagcctgaatttatgctacaaaaggatatgttgaatctcatagagacagcactctcttctgaggttgattatagattcaagattcaaggacttcaaaacctctacgagtatcttagagatgctgaaagccaacttactgctgagagtactgcgaaacctcctgggcagtgtgaaataaatggcagaagtgaagtgcctgttgctgctggtgctggagacaccaacatatgtggtggtattatccaattgtattggagttctattcttgaaaggtgcttggatacaaatgatcaagttcgccagagtgcacttaagattgttgaagttgtacttcgtcagggtttagtccaccctattacctgtgtacctcaccttatagcacttgaaatggacccgctggaggggaattcgaagttggctcatcatctcttgatgaatatgaatgaaaagtacccttcattttttgaaagtcgcttgggtgatggactgcaattgtcatttaaattctttgaatccatagtcagcaaccataagatgtccgcaaacataaaatcaaatccaattgcatttgtcaaacctggcatatctagaatataccgtcttatccgttcaaatcgaaattctagaaacaaatttgtccactcgatagttcggaaattcgagtctgatagccggagtcgcagcacagttagctttcttgtatactgtgctgaagttctcgcctctctgcctttcacatgctctgatgaaccactttacttgatctatgatataaatcgagctattcaccttagagctggaggagtcgagggcaatttgaaaaggtggacttctatgtctcagtctcaagagatggcgggtatgccaaccttgccaggagagagtcatgttgtcatgcaagaagagcctggcggatattatgataacatgggagatgccactgaaagggtgaatgacaatccttgcagtacttcagatgtggacattgccaaagttcagggagattgccatgatgcaatagccctccagctacttctgaaattgaagagacatttgaaagttgtttatggtttagatgatgcccgctgtcaggcattttccctgaaggagcccccgaaatctggagaaacattctccaggcagaatgtttcttttaatattggcaacactaacctcagtctgccgagctgcctgcaggacgcagcctctgtttaccaggatttcaagacagtgcttcgcgaagattccatggactttgctgtgttcgtcccttcagtccagactaggaagcgcccaaccccaagaaatacaacgagcccaaccccaagaagtatgacgagagtcaggagaacggctgccccgagtgttacaaaagcccgtggtggtgcacgtggcgacgattccgacgataccgatgacgacgactggaccgggggtccaagagtgctagacttcagtgggggcggccgcgtgacaaggcagagggtccaagtatgatgtttcttttttgcgtgcgtgcgtgtgtacattatagggaagggaaacctatagcaggcttagcagctgacacgagagagttaggggttgaattttaggtttcaggtcgtttattttagggtacatagaagcagaaaggaaaggaagatagccttttacttagatgtcattaatttggagcactccttttcttgctctgcccctgtcctgtttgtaatttccgtggggcttcggcaaaaaactgacaaaataggttgtgctccggtttctgatctctgattcaatgggaaatggaattattccttttgctttgcctgtgtaagcagttagcgcctactccgtctgttccaatatacaatttgttttagcattttatttttgtgtctata

SEQ ID NO: 28083 - DNA, 6005 bp, Zea Mays
gtcgcaagcatcggggtggcgttctcatcacccttcacctaaggccaacttgactatacgcagtagtagataaatactactactgaatttgtcccccatttgttatagtctcaccacctctccacccttcgaaattgaaatcaaatcaaagcagcccaccaccctcgattcattcaccaccacctctccacactttgaaatcaactcaatcaaagcagcccctcctccagtcctccccaacaatcgaattccggtgcgaattggagccctcagccctcccgcgcatctagggttttgcccatggaccccgacgccggcggggctggggccgggggccgggcgggcttcgagcgggcgtgccggctgcccaacaccgtccactccgaggtcctgccgtcgctgccgctccccaccctcccgcgcgagctcggcttcgacgcgctccgcgacgacgagcccctcgccgcgcccgaccgccccgacatgatcatgcaggccgccaacatcgcccgcatcctcgccgacaccgacgtctcccacctgggcttcaccgcggcggacaacgtcgaagtggatcccagccggtgctcctggctctggagggaggtgctcaagcacaaccccgacgccttcaaggtcaaggcgcccgggccgtcttctcaaggtccatttggaggcccaggataccacaatcaagaacgtgagaagcactttgaacatcttacacctaatatgagcaaaacacgaaatggatctgcattttctcaggatgaaattaactcacacagagagcattttcgtaatgaactgaccccagattcagttgcttcaaagaagccaaaagtaaggaagaaagaaattaacaattctgtttcaacttctccccacagcattcctaataatcaagaagttattgctaccttctgtgaggcggtggaggatttctgtggaaaagctgaaattcctgacgatggtgatggtggtgactggttgtcaatcccacttgacgatgttaaggttcttgtgaatgaaattacatctgttcgatccaaaaggatattgcatgaggttcctatggatacagttacaaggttattagacgtgattgaccgtcagattcgatgttctcaaggtttgtcgatagatgtgaaggaaaattctgacgcctttgatgctgaacctctggttttctctgctttggagtccagtcatgctgcgttggcaattatgacccaccatgatatgccaaagcaactgtatcgggaagaacttattgagcgtattatcgatttctcaaggcatcagatcacagattgtatggcagcaagtaacccaacctttcgagctctctacaaaccagctggaaatgttgcaaatgatggagatgatgatgaaggtgatttggaaaatggacaagttagcaaaaggagacgtactgctactaatttgagcatgagaaaatcttcaaacagagtttctgcttctgtttattctgctgtgcagaaactatgcttgatattgggttttcttaaggaactgctcacaacagtgcgcttgtcagatagttgtattctgcaattagcgaaaacatgctttactacattcttggtggataatatgcagctattacaattgaaagcgattggggttatttgcacggtgttttcatcatacacacagcacaggagttacttggttgatgaaacacttcaccttcttcgtaagttgcagttttccaagaatgccgttagaacctaccatctagcagatgaagaccaaaagcaaatccagatgataacagcactgttagttcacttggttcagtttagtgctattgttcctgatagcttaaagggaacagttgattggaccactatcgttgatgcctctagtgatgctgattattatccaattcaatgccatgaagcggcaacagaggcttgttgtcgtttttggactgatgtccttcaacgttttactgctgctaaatctcaagatatgtcggaaaccaaagggataatagacaatcttgttcaggatttcctaacgatactaaacttgccggagtatccagctgctgcttctattcttgaggttctctgcgtgttgctgcttcagaatgctggattgaaatctaaggacattaatgctcggtgctttgctattgatcttcttggtggtattgcatcaagattaaagcgtgattctgtcgtctgtagtgaagaaaagctttggatattgcaagatttcactgataaaggcagtgacggctcaatttttttgaaaaacaagtgttgcgtttgtcttggtggaagaggcataaatatagcctgtaatgaatgtggaagatgtttccattcagattgtatgggggctggtagtcaggataacttacagcgtgatagtgtctgccccttgtgtttttgcaaacaacagctcaatgtgctacagtcgtactgccagtcacaaattaaagaaaatggcaaaaaaactgctgcctctgccagtaagaaatctgctaaaccaactgaggtgtcagcagtggaaattgttcaacaaatactactgagttatctccaagaagctggttcacaagatgatgggaacctgtttactcgatggttctatctgtgcatctggaacaaagatgaccaacattctcaggagaagatcatttactatcttgctagattaaaatccaaggagattctgcgagattctggcaatggtctggcaatttccagagattcagcaaagaaaatttgcttggcacttggtcagaagaactcattttgtaggggttttgataaaattcttgcccttcttttggctagtttgagagaaaattctcctgtaataagagcaaaagcattacgtgcggtcagctgtatagttgaagctgatcctgaggtcttgggtgacaaacgtgtccaatatgctgttgaagggagattttgtgattcagctatttctgttcgtgaagctgcccttgaacttgttgggaggcatattgcttcacatcctgatgtgggcctgaagtatatagaaaaagttgctgagcggataaaggacactggagtcagcgttcgcaagcgtgcaatcaaaattataagggatctttgtgcttcaaatccgaacacggacacaactcatgcctttgtggagataatttctcgtgttaatgatgaggagtccagtgtacaggatcttgtatgtaaaacattttatgaactatggtttgaagaaccaactgggagtcataagcacttggttgctgatggaagttcagttccaatggagatagctaaaaagactgagcaaattgttgacatgttgaggaagatgcccaatcaccaacccctgattaccatcataaaacgtaacttgactcttgatttcctccctcagtcaaccaaggctgcagggattaactcatccatggtggcatcaattcggaagcgttgtgaattgatatgcaaacgcttattagaaagaatattgcaggttgaggagggagctgctaatgagatggaaatccacacactaccttatattgttgccttgcaagcattctgtattgttgatcccacactctgcattccagtaactgatccttctaagtttgttgtgacactgcaaccataccttaatattcaggttgacaataaatcatctgcccagttgcttgaaagtattatttttgtgattgatgctgttcttccactcataaggaagccaccacaaaatgttgttgaagaacttgagaaggatctgaaacatatgatagttcgccattcgtatttgacagttgtacatgcctgtatcaagtgcctttgtgctctgagcaagtcagcaggtagaggtccaggattagtggaaaaccttgttaatattttctacaagcatctgtgtggagctaattcagatagtcagctgttgggtcgatcactgttttgtcttggactcctccttcggtatggttatcaattgatgctaacatctgaaaatcagcttgattttcccaagatcatcaacttgctccagagaaaatatcttctcaaggatgatttcagcttgaaggttcgagctttgcagactttgggatacatacttattgcgaagcctgaatttatgctacaaaaggatatgttgaatctcatagagacagcactctcttctgaggttgattatagattcaagattcaaggacttcaaaacctctacgagtatcttagagatgctgaaagccaacttactgctgagagtactgcgaaacctcctgggcagtgtgaaataaatggcagaagtgaagtgcctgttgctgctggtgctggagacaccaacatatgtggtggtattatccaattgtattggagttctattcttgaaaggtgcttggatacaaatgatcaagttcgccagagtgcacttaagattgttgaagttgtacttcgtcagggtttagtccaccctattacctgtgtacctcaccttatagcacttgaaatggacccgctggaggggaattcgaagttggctcatcatctcttgatgaatatgaatgaaaagtacccttcattttttgaaagtcgcttgggtgatggactgcaattgtcatttaaattctttgaatccatagtcagcaaccataagatgtccgcaaacataaaatcaaatccaattgcatttgtcaaacctggcatatctagaatataccgtcttatccgttcaaatcgaaattctagaaacaaatttgtccactcgatagttcggaaattcgagtctgatagccggagtcgcagcacagttagctttcttgtatactgtgctgaagttctcgcctctctgcctttcacatgctctgatgaaccactttacttgatctatgatataaatcgagctattcaccttagagctggaggagtcgagggcaatttgaaaaggtggacttctatgtctcagtctcaagagatggcgggtatgccaaccttgccaggagagagtcatgttgtcatgcaagaagagcctggcggatattatgataacatgggagatgccactgaaagggtgaatgacaatccttgcagtacttcagatgtggacattgccaaagttcagggagattgccatgatgcaatagccctccagctacttctgaaattgaagagacatttgaaagttgtttatggtttagatgatgcccgctgtcaggcattttccctgaaggagcccccgaaatctggagaaacattctccaggcagaatgtttcttttaatattggcaacactaacctcagtctgccgagctgcctgcaggacgcagcctctgtttaccaggatttcaagacagtgcttcgcgaagattccatggactttgctgtgttcgtcccttcagtccagactaggaagcgcccaaccccaagaaatacaacgagcccaaccccaagaagtatgacgagagtcaggagaacggctgccccgagtgttacaaaagcccgtggtggtgcacgtggcgacgattccgacgataccgatgacgacgactggaccgggggtccaagagtgctagacttcagtgggggcggccgcgtgacaaggcagagggtccaagtatgatgtttcttttttgcgtgcgtgcgtgtgtacattatagggaagggaaacctatagcaggcttagcagctgacacgagagagttaggggttgaattttaggtttcaggtcgtttattttagggtacatagaagcagaaaggaaaggaagatagccttttacttagatgtcattaatttggagcactccttttcttgctctgcccctgtcctgtttgtaatttccgtggggcttcggcaaaaaactgacaaaataggttgtgctccggtttctgatctctgattcaatgggaaatggaattattccttttgctttgcctgtgtaagcagttagcgcctactccgtctgttccaatatacaatttgttttagcattttatttttgtgtctata

SEQ ID NO: 28084 - DNA, 1242 bp, Zea Mays
gcttagctaaaagttgatttaagtgagcaggatgactatgaagttgtcaggaaggtcgggagaggaaaatacagtgaagtatttgaaggtattaatgttaacaataatgagaaatgcatcatcaagatcctcaagcctgtgaagaaaaagaagatcaaaagagaaattaaaattcttcagaatctttgtggaggccctaacattgtgaagctgctcgatattgttagagatcagcattcgaaaacgcccagcttgatctttgaatatgttaacaacacagatttcaaagtgctgtacccaacattaacagattatgacattcggtattacatctacgagttactcaaggcattagattactgccattcacaaggtattatgcaccgagatgtgaagccccacaatgttatgatagatcatgagcttcggaaactccggctgatagactggggtcttgctgaattctatcatcctggcaaggaatataatgtccgtgttgcatccaggtacttcaaggggcctgagcttcttgttgacttgcaagattatgattactctttggacatgtggagtctgggctgcatgtttgctgggatgatttttcgtaaggaaccatttttctacgggcatgacaaccatgatcaacttgttaagatagccaaggtacttgggacagatgggctgaatgtttatttgaacaagtacagaattgagcttgaccctcagcttgaagccctcgttggaaggcatagcaggaaaccctggttaaagtttatgaacgcagataaccagcacctagtgtctcctgaggccatagatttccttgacaagcttttgcgttatgatcatcaggagaggcttactgcacttgaagctatgacgcacccgtacttccaacaagtgagagccgctgagaacagcaggacgcgagcgtgacaggcaaagagcgaagaccatctgctcttttatcagtcagtcaggttgtatgagatgagtagccgttgggtcacttggcagaaaataaacaatagcggtagagcctgtactgtacgtaacgtaacctcctcgaggagttgtgaggtttgggacgtgattgcgaacatggtatattaatgattgttcatgtaaggtgctgtttggttcaagaaatgtaacacaaatggtaatggtaatggtttacgctcgattactggcggtaacaaatttgaataggctgatatcaatttttagtgtgttatttga

SEQ ID NO: 28085 - DNA, 1165 bp, Zea Mays
catcagtggaccaagtggacatcttgacaggagtcacgctactcctgatagcaagggttcctgccaagttgggctacaggaagaatacattgtttgctccaactatcgcacttggcaaaatctcattattactggcaacagctgcacctgggttggatactggagaaggttgcctgaagagactactgaagctaagctactgatgcgttatttggttcagttaatcagttgtatcctctgcccttgtaggctgttgtacctcacctgtgtcagcaacatttttgtgaatctaaaacagttagcacatcaacaatgctgacagactagaaccgggctttgccggtctggatgtactgcttacgtgcattgatgctagtgtggacagcaaatctctgcactgcatcatcagactgtgttcttgaatgaaaactctggagagctgggacgcaaagacatctgtccgagccaactgcagaagatggaagacggttcagactggaaaatagcagcatgtcatcttagagattttgtgatattggcagcatgcatccagtctgtgtaaatgtcatgtgattcaaagagaactaactggaaaaagaagttctgtatgacggcagcaccttaggcagctgggctctcgtggagttccctatggtgtgcatggcatcaaccgcagagctaagagcgtttcttatcccttgaatatctgcctgaaaacatgaggtctcagtatttcaagatgagaagcaacagattgacgaaacttagttcctggtttatggaacaccaaccactgctccatcggagacaggaaggcgcaggacggtggcagtcagagcctgtgtagttcctgacaaagaatgggcatggcccctctccaagaagggccattcttccaggtatttcatctgcgttttttagccccaggaagtcaggaggaggggtcagtcaatgacccgacccctactggttaatgtaaatacatacgtaggaataaaaagaagatagcttgtactttcatctgcatattgtaattttatcagattttgtgcggacaatgtgtactcagaacgaatctagtgtcataaattagcgattagttactccagcgcggcaaactgggtgtacgagctttaacctttaagatagcaattatagttgcatc

SEQ ID NO: 28086 - DNA, 3960 bp, Zea Mays
gactcagcccactagcccagccccggcaaagcctcacatccatccggagggcgcagcccgtcgctccttctcgccggtcgccgccgcccccctctcatcgtccaaggctgcctccatgcacgccgccgccgccatgccctcccgctgctggcctattgcatcgctttgaaggctaaggatcatcatgatctcagggatatgcatagcttatcagcttgtgcaaagtacctttggagcacttctagggcaacagtgatccgcaatgaggtacttgtcgtattgtctgccatcagcctgttgttcatgaccacctttgggcccttgcgccgccggagcagaaactcgtttgtacagaatggtttcatggttgcatacactttgtcctcgtccctgatatcatacacacttggttcaatgtactcatctgcagtaaagagcagcatgtatcccatttgggcctcatccctgtatctcctcttttgttctgcggactctattacatcttattgtctcaatggcaacaatcaacaaaaggaacagcttattttgtttcttcttttccaaatatatgtcagccaaataactaatggatctgattctaatggctctctagttttttcggtagctgcttttaaatttatggaacgattctgggcataccagctggccaccggatcatggaatttgaacaaaatggttgctgactacatgtatgaggaacaatccagaagtggctcatcttatgatccaaccagcatgaaaggttatcattacttagttgattggcccttggatgagtcaaaactggaagcaaggatgtcatatgcaaaggaattaacagtggatgatgcacagatcattgacatagagaggatatttatgtgcagtgaactaagctccgagctgaaggatgtatgcctttccttctctctttttcttctgctgagaaggcgcttctttgggtttgtctgcgttgaagcttcacagcgaaagacacatgattttgtcttcaagggggttttgtcaaagaatcaggacggaaccctcaattacgacaggatcttcaggttgattgaggttgagttagcttttatgtatgatttcttcttcaccaagtatgctgttctttactatggatctaaaaaggtttcagcaatttggtccctggcatcagccagcttcatgtctgtgacaatctacaagctgatagaaagtgttctttctaaccagaatcggtctgaattcgtgggcacaacaacatctgatgttacaacaacatctgatgttgttgtaacaatactgatagtagcatgcattgttttgcttgagtttatccaagtattacttttttttagcaccatttggtgcagagtatcatttgtttgccattatgttcgagaacaagcaacgaacacaaggagaggcttctgcatgaaactgtttcaaaagttctgctgcatgagattcagggagattattcttaacatggctattggtatcaccaggtcaaggtcaagcgaatactactaccaaaataaacttgggcaatactccttgcttgaatcagtgattagttgcaagtacaagcagagtccacgtaaggtatggtttcacaggtttatgcatcgatattgtagtcttatagtggctccagactttgggtacctttgtaatacaaacaaagactttattcacgcacaacgtatccgcaagaaacatgtgaaacctgcagctatcaagataccagtagaagtaaaaaaggcagttgtccattccctccagcgtacacagggtgtcctagcgaatggagaatcgtcattagtgtacaatgaggtgcatgacctcttatgggcttgcaggcacaatatgctctcagacccaggcaccaactgttacctggacaaggagaatcagacacacatcattttgacttggcacattgcaacgtgttactgcgaggtgcaaacattgaaatgcctttatcctagagttgggggggcactcaagttacatcttgacatcgcaaccatactgtcaaagtactgtgcatacctggtggtctcagcaccgaagttgcttcctgggaactactatgattctagccttgtgtttgatgcagtagcagtggaagctgcacagtttctgcagaaagtggaagacaagtatgaagccttgagaagtttgcctgtatcaacagaaacctccatcttacagagggggatgaagttggcgaggcagctcgaggagatggaatgtgacaagtgttggaaggtgcttgcggatttctgggcagagatgttgctctatatcgcgccttcggaaaatgtgaatgagcatttcgaggcactggcaaatggaggggagtttataacacactggtgggcattgctcacccacgctggcattctagagagggctccaaggaatgtcaacaatgacatagaaaatcaatgggaaggatcatcatcatatggttgcccatctacaactcaggctgcagctgcagcctgtgccacaaatcaacagccaatggctggggaccgtactgtgcaactgattgaaatgaatgtcggagacatagaagatgctaagactgacaggcattatcctggagagatttcatatggtgctgctttaaggcttcgtcgtgcgaactcctacattagcaagtgtagagaagctgctaccttagccaccagcgccacgattaaaccagcaatacgtggaaactgtgagcaagtgaggatgatgattcggcaacaagcatatctaggtcaaaatgtggaactcgcaagtcccagcgcaagcactgctccaagtgagaacaaagagattgaaattgtaatagcatgttcctgccaagttgggctacaggaagaatacattgtttgctccaactatcgcacttggcaaaatctcattattactggcaacagctgcacctgggttggatactggagaaggttgcctgaagagactactgaagctaagctactgatgcgttatttggttcagttaatcagttgtatcctctgcccttgtaggctgttgtacctcacctgtgtcagcaacatttttgtgaatctaaaacagttagcacatcaacaatgctgacagactagaaccgggctttgccggtctggatgtactgcttacgtgcattgatgctagtgtggacagcaaatctctgcactgcatcatcagactgtgttcttgaatgaaaactctggagagctgggacgcaaagacatctgtccgagccaactgcagaagatggaagacggttcagactggaaaatagcagcatgtcatcttagagattttgtgatattggcagcatgcatccagtctgtgtaaatgtcatgtgattcaaagagaactaactggaaaaagaagttctgtatgacggcagcaccttaggcagctgggctctcgtggagttccctatggtgtgcatggcatcaaccgcagagctaagagcgtttcttatcccttgaatatctgcctgaaaacatgaggtctcagtatttcaagatgagaagcaacagattgacgaaacttagttcctggtttatggaacaccaaccactgctccatcggagacaggaaggcgcaggacggtggcagtcagagcctgtgtagttcctgacaaagaatgggcatggcccctctccaagaagggccattcttccaggtatttcatctgcgttttttagccccaggaagtcaggaggaggggtcagtcaatgacccgacccctactggttaatgtaaatacatacgtaggaataaaaagaagatagcttgtactttcatctgcatattgtaattttatcagattttgtgcggacaatgtgtactcagaacgaatctagtgtcataaattagcgattagttactccagcgcggcaaactgggtgtacgagctttaacctttaagatagcaattatagttgcatc

SEQ ID NO: 28087 - DNA, 3644 bp, Zea Mays
gactcagcccactagcccagccccggcaaagcctcacatccatccggagggcgcagcccgtcgctccttctcgccggtcgccgccgcccccctctcatcgtccaaggctgcctccatgcacgccgccgccgccatgccctcccgctgctggtccagactccaaagccctcactcctcccgagcgaacacccaactcacccctcgattgctgtctgtcctgtttctgtttggaatgccgcttctttggctgcttccattccatggcggaaaaatcgcagcctttctggatttgcatcggttatctctttgcctgtgcgggtggagctaagctgcccacgtcctgcacgctgtccccgtctccccgacggatacgcccagcccagtcgacgacaggggagcaacacaacagtgatgtagatggattcagattcagtgatgcaggaagcttctcctgaattactagacatgtagacatgatgacaattcgagtaatcaacttgagtgtcggtaatagtcgctggctccaaggttgtcgacttgtcgtggtgcttgtataaagtgtgtcctttacgaagccagagggcacatgtcatctgccttatctggagcacacttaggctttagggggagggaggaagggatatcagttcgtcgatccatccaggggatggctaactacacggcctattgcatcgctttgaaggctaaggatcatcatgatctcagggatatgcatagcttatcagcttgtgcaaagtacctttggagcacttctagggcaacagtgatccgcaatgaggtacttgtcgtattgtctgccatcagcctgttgttcatgaccacctttgggcccttgcgccgccggagcagaaactcgtttgtacagaatggtttcatggttgcatacactttgtcctcgtccctgatatcatacacacttggttcaatgtactcatctgcagtaaagagcagcatgtatcccatttgggcctcatccctgtatctcctcttttgttctgcggactctattacatcttattgtctcaatggcaacaatcaacaaaaggaacagcttattttgtttcttcttttccaaatatatgtcagccaaataactaatggatctgattctaatggctctctagttttttcggtagctgcttttaaatttatggaacgattctgggcataccagctggccaccggatcatggaatttgaacaaaatggttgctgactacatgtatgaggaacaatccagaagtggctcatcttatgatccaaccagcatgaaaggttatcattacttagttgattggcccttggatgagtcaaaactggaagcaaggatgtcatatgcaaaggaattaacagtggatgatgcacagatcattgacatagagaggatatttatgtgcagtgaactaagctccgagctgaaggatgtatgcctttccttctctctttttcttctgctgagaaggcgcttctttgggtttgtctgcgttgaagcttcacagcgaaagacacatgattttgtcttcaagggggttttgtcaaagaatcaggacggaaccctcaattacgacaggatcttcaggttgattgaggttgagttagcttttatgtatgatttcttcttcaccaagtatgctgttctttactatggatctaaaaaggtttcagcaatttggtccctggcatcagccagcttcatgtctgtgacaatctacaagctgatagaaagtgttctttctaaccagaatcggtctgaattcgtgggcacaacaacatctgatgttacaacaacatctgatgttgttgtaacaatactgatagtagcatgcattgttttgcttgagtttatccaagtattacttttttttagcaccatttggtgcagagtatcatttgtttgccattatgttcgagaacaagcaacgaacacaaggagaggcttctgcatgaaactgtttcaaaagttctgctgcatgagattcagggagattattcttaacatggctattggtatcaccaggtcaaggtcaagcgaatactactaccaaaataaacttgggcaatactccttgcttgaatcagtgattagttgcaagtacaagcagagtccacgtaaggtatggtttcacaggtttatgcatcgatattgtagtcttatagtggctccagactttgggtacctttgtaatacaaacaaagactttattcacgcacaacgtatccgcaagaaacatgtgaaacctgcagctatcaagataccagtagaagtaaaaaaggcagttgtccattccctccagcgtacacagggtgtcctagcgaatggagaatcgtcattagtgtacaatgaggtgcatgacctcttatgggcttgcaggcacaatatgctctcagacccaggcaccaactgttacctggacaaggagaatcagacacacatcattttgacttggcacattgcaacgtgttactgcgaggtgcaaacattgaaatgcctttatcctagagttgggggggcactcaagttacatcttgacatcgcaaccatactgtcaaagtactgtgcatacctggtggtctcagcaccgaagttgcttcctgggaactactatgattctagccttgtgtttgatgcagtagcagtggaagctgcacagtttctgcagaaagtggaagacaagtatgaagccttgagaagtttgcctgtatcaacagaaacctccatcttacagagggggatgaagttggcgaggcagctcgaggagatggaatgtgacaagtgttggaaggtgcttgcggatttctgggcagagatgttgctctatatcgcgccttcggaaaatgtgaatgagcatttcgaggcactggcaaatggaggggagtttataacacactggtgggcattgctcacccacgctggcattctagagagggctccaaggaatgtcaacaatgacatagaaaatcaatgggaaggatcatcatcatatggttgcccatctacaactcaggctgcagctgcagcctgtgccacaaatcaacagccaatggctggggaccgtactgtgcaactgattgaaatgaatgtcggagacatagaagatgctaagactgacaggcattatcctggagagatttcatatggtgctgctttaaggcttcgtcgtgcgaactcctacattagcaagtgtagagaagctgctaccttagccaccagcgccacgattaaaccagcaatacgtggaaactgtgagcaagtgaggatgatgattcggcaacaagcatatctaggtcaaaatgtggaactcgcaagtcccagcgcaagcactgctccaagtgagaacaaagagattgaaattgtaatagcatgtgagtaatgttgctatatatgtgtcaatgaatgaaatttgtacatatgcatggggcaacattcacaggttcagctggtcatttgtttgtggagccatgaactattatgaagttgtcctgttattctgaaagtaaaagagtgcagagatcatatgtaatgtgacagatatttagtatcaaaatagtgtacaattgtcttaagatgaaattcgtatatatggggcatcttcattcacaggtcctgctgtatgatgcttgctc

SEQ ID NO: 28088 - DNA, 3507 bp, Zea Mays
gactcagcccactagcccagccccggcaaagcctcacatccatccggagggcgcagcccgtcgctccttctcgccggtcgccgccgcccccctctcatcgtccaaggctgcctccatgcacgccgccgccgccatgccctcccgctgctggtccagactccaaagccctcactcctcccgagcgaacacccaactcacccctcgattgctgtctgtcctgtttctgtttggaatgccgcttctttggctgcttccattccatggcggaaaaatcgcagcctttctggatttgcatcggttatctctttgcctgtgcgggtggagctaagctgcccacgtcctgcacgctgtccccgtctccccgacggatacgcccagcccagtcgacgacaggggagcaacacaacagtgatgtagatggattcagattcagtgatgcaggaagcttctcctgaattactagacatgtagacatgatgacaattcgagtaatcaacttgagtgtcggtaatagtcgctggctccaaggttgtcgacttgtcgtggcctattgcatcgctttgaaggctaaggatcatcatgatctcagggatatgcatagcttatcagcttgtgcaaagtacctttggagcacttctagggcaacagtgatccgcaatgaggtacttgtcgtattgtctgccatcagcctgttgttcatgaccacctttgggcccttgcgccgccggagcagaaactcgtttgtacagaatggtttcatggttgcatacactttgtcctcgtccctgatatcatacacacttggttcaatgtactcatctgcagtaaagagcagcatgtatcccatttgggcctcatccctgtatctcctcttttgttctgcggactctattacatcttattgtctcaatggcaacaatcaacaaaaggaacagcttattttgtttcttcttttccaaatatatgtcagccaaataactaatggatctgattctaatggctctctagttttttcggtagctgcttttaaatttatggaacgattctgggcataccagctggccaccggatcatggaatttgaacaaaatggttgctgactacatgtatgaggaacaatccagaagtggctcatcttatgatccaaccagcatgaaaggttatcattacttagttgattggcccttggatgagtcaaaactggaagcaaggatgtcatatgcaaaggaattaacagtggatgatgcacagatcattgacatagagaggatatttatgtgcagtgaactaagctccgagctgaaggatgtatgcctttccttctctctttttcttctgctgagaaggcgcttctttgggtttgtctgcgttgaagcttcacagcgaaagacacatgattttgtcttcaagggggttttgtcaaagaatcaggacggaaccctcaattacgacaggatcttcaggttgattgaggttgagttagcttttatgtatgatttcttcttcaccaagtatgctgttctttactatggatctaaaaaggtttcagcaatttggtccctggcatcagccagcttcatgtctgtgacaatctacaagctgatagaaagtgttctttctaaccagaatcggtctgaattcgtgggcacaacaacatctgatgttacaacaacatctgatgttgttgtaacaatactgatagtagcatgcattgttttgcttgagtttatccaagtattacttttttttagcaccatttggtgcagagtatcatttgtttgccattatgttcgagaacaagcaacgaacacaaggagaggcttctgcatgaaactgtttcaaaagttctgctgcatgagattcagggagattattcttaacatggctattggtatcaccaggtcaaggtcaagcgaatactactaccaaaataaacttgggcaatactccttgcttgaatcagtgattagttgcaagtacaagcagagtccacgtaaggtatggtttcacaggtttatgcatcgatattgtagtcttatagtggctccagactttgggtacctttgtaatacaaacaaagactttattcacgcacaacgtatccgcaagaaacatgtgaaacctgcagctatcaagataccagtagaagtaaaaaaggcagttgtccattccctccagcgtacacagggtgtcctagcgaatggagaatcgtcattagtgtacaatgaggtgcatgacctcttatgggcttgcaggcacaatatgctctcagacccaggcaccaactgttacctggacaaggagaatcagacacacatcattttgacttggcacattgcaacgtgttactgcgaggtgcaaacattgaaatgcctttatcctagagttgggggggcactcaagttacatcttgacatcgcaaccatactgtcaaagtactgtgcatacctggtggtctcagcaccgaagttgcttcctgggaactactatgattctagccttgtgtttgatgcagtagcagtggaagctgcacagtttctgcagaaagtggaagacaagtatgaagccttgagaagtttgcctgtatcaacagaaacctccatcttacagagggggatgaagttggcgaggcagctcgaggagatggaatgtgacaagtgttggaaggtgcttgcggatttctgggcagagatgttgctctatatcgcgccttcggaaaatgtgaatgagcatttcgaggcactggcaaatggaggggagtttataacacactggtgggcattgctcacccacgctggcattctagagagggctccaaggaatgtcaacaatgacatagaaaatcaatgggaaggatcatcatcatatggttgcccatctacaactcaggctgcagctgcagcctgtgccacaaatcaacagccaatggctggggaccgtactgtgcaactgattgaaatgaatgtcggagacatagaagatgctaagactgacaggcattatcctggagagatttcatatggtgctgctttaaggcttcgtcgtgcgaactcctacattagcaagtgtagagaagctgctaccttagccaccagcgccacgattaaaccagcaatacgtggaaactgtgagcaagtgaggatgatgattcggcaacaagcatatctaggtcaaaatgtggaactcgcaagtcccagcgcaagcactgctccaagtgagaacaaagagattgaaattgtaatagcatgtgagtaatgttgctatatatgtgtcaatgaatgaaatttgtacatatgcatggggcaacattcacaggttcagctggtcatttgtttgtggagccatgaactattatgaagttgtcctgttattctgaaagtaaaagagtgcagagatcatatgtaatgtgacagatatttagtatcaaaatagtgtacaattgtcttaagatgaaattcgtatatatggggcatcttcattcacaggtcctgctgtatgatgcttgctc

SEQ ID NO: 28089 - DNA, 3397 bp, Zea Mays
gtacgtaactgggtcactgcattaggctagagcaggccatttgagtaagaaattcggccttttgtatgactcagcccactagcccagccccggcaaagcctcacatccatccggagggcgcagcccgtcgctccttctcgccggtcgccgccgcccccctctcatcgtccaaggctgcctccatgcacgccgccgccgccatgccctcccgctgctggtccagactccaaagccctcactcctcccgagcgaacacccaactcacccctcgattgctgtctgtcctgtttctgtttggaatgccgcttctttggctgcttccattccatggcggaaaaatcgcagcctttctggatttgcatcggttatctctttgcctgtgcgggtggagctaagctgcccacgtcctgcacgctgtccccgtctccccgacggatacgcccagcccagtcgacgacaggggagcaacacaacagtgatgtagatggattcagattcagtgatgcaggaagcttctcctgaattactagacatgtagacatgatgacaattcgagtaatcaacttgagtgtcggtaatagtcgctggctccaaggttgtcgacttgtcgtggtgaatggtacaaaggcacatccctatcgtcttggcatacccttggagcagctgacttgactttgtgtgtctgctgcactaggtgcttgtataaagtgtgtcctttacgaagccagagggcacatgtcatctgccttatctggagcacacttaggctttagggggagggaggaagggatatcagttcgtcgatccatccaggggatggctaactacacggcctattgcatcgctttgaaggctaaggatcatcatgatctcagggatatgcatagcttatcagcttgtgcaaagtacctttggagcacttctagggcaacagtgatccgcaatgagctggccaccggatcatggaatttgaacaaaatggttgctgactacatgtatgaggaacaatccagaagtggctcatcttatgatccaaccagcatgaaaggttatcattacttagttgattggcccttggatgagtcaaaactggaagcaaggatgtcatatgcaaaggaattaacagtggatgatgcacagatcattgacatagagaggatatttatgtgcagtgaactaagctccgagctgaaggatgtatgcctttccttctctctttttcttctgctgagaaggcgcttctttgggtttgtctgcgttgaagcttcacagcgaaagacacatgattttgtcttcaagggggttttgtcaaagaatcaggacggaaccctcaattacgacaggatcttcaggttgattgaggttgagttagcttttatgtatgatttcttcttcaccaagtatgctgttctttactatggatctaaaaaggtttcagcaatttggtccctggcatcagccagcttcatgtctgtgacaatctacaagctgatagaaagtgttctttctaaccagaatcggtctgaattcgtgggcacaacaacatctgatgttacaacaacatctgatgttgttgtaacaatactgatagtagcatgcattgttttgcttgagtttatccaagtattacttttttttagcaccatttggtgcagagtatcatttgtttgccattatgttcgagaacaagcaacgaacacaaggagaggcttctgcatgaaactgtttcaaaagttctgctgcatgagattcagggagattattcttaacatggctattggtatcaccaggtcaaggtcaagcgaatactactaccaaaataaacttgggcaatactccttgcttgaatcagtgattagttgcaagtacaagcagagtccacgtaaggtatggtttcacaggtttatgcatcgatattgtagtcttatagtggctccagactttgggtacctttgtaatacaaacaaagactttattcacgcacaacgtatccgcaagaaacatgtgaaacctgcagctatcaagataccagtagaagtaaaaaaggcagttgtccattccctccagcgtacacagggtgtcctagcgaatggagaatcgtcattagtgtacaatgaggtgcatgacctcttatgggcttgcaggcacaatatgctctcagacccaggcaccaactgttacctggacaaggagaatcagacacacatcattttgacttggcacattgcaacgtgttactgcgaggtgcaaacattgaaatgcctttatcctagagttgggggggcactcaagttacatcttgacatcgcaaccatactgtcaaagtactgtgcatacctggtggtctcagcaccgaagttgcttcctgggaactactatgattctagccttgtgtttgatgcagtagcagtggaagctgcacagtttctgcagaaagtggaagacaagtatgaagccttgagaagtttgcctgtatcaacagaaacctccatcttacagagggggatgaagttggcgaggcagctcgaggagatggaatgtgacaagtgttggaaggtgcttgcggatttctgggcagagatgttgctctatatcgcgccttcggaaaatgtgaatgagcatttcgaggcactggcaaatggaggggagtttataacacactggtgggcattgctcacccacgctggcattctagagagggctccaaggaatgtcaacaatgacatagaaaatcaatgggaaggatcatcatcatatggttgcccatctacaactcaggctgcagctgcagcctgtgccacaaatcaacagccaatggctggggaccgtactgtgcaactgattgaaatgaatgtcggagacatagaagatgctaagactgacaggcattatcctggagagatttcatatggtgctgctttaaggcttcgtcgtgcgaactcctacattagcaagtgtagagaagctgctaccttagccaccagcgccacgattaaaccagcaatacgtggaaactgtgagcaagtgaggatgatgattcggcaacaagcatatctaggtcaaaatgtggaactcgcaagtcccagcgcaagcactgctccaagtgagaacaaagagattgaaattgtaatagcatgtgagtaatgttgctatatatgtgtcaatgaatgaaatttgtacatatgcatggggcaacattcacaggttcagctggtcatttgtttgtggagccatgaactattatgaagttgtcctgttattctgaaagtaaaagagtgcagagatcatatgtaatgtgacagatatttagtatcaaaatagtgtacaattgtcttaagatgaaattcgtatatatggggcatcttcattcacaggtcctgctgtatgatgcttgctc

SEQ ID NO: 28090 - DNA, 898 bp, Zea Mays
gtgtgtctgattctccttgtccaggcaccaactgttacctggacaaggagaatcagacacacatcattttgacttggcacattgcaacgtgttactgcgaggtgcaaacattgaaatgcctttatcctagagttgggggggcactcaagttacatcttgacatcgcaaccatactgtcaaagtactgtgcatacctggtggtctcagcaccgaagttgcttcctgggaactactatgattctagccttgtgtttgatgcagtagcagtggaagctgcacagtttctgcagaaagtggaagacaagtatgaagccttgagaagtttgcctgtatcaacagaaacctccatcttacagagggggatgaagttggcgaggcagctcgaggagatggaatgtgacaagtgttggaaggtgcttgcggatttctgggcagagatgttgctctatatcgcgccttcggaaaatgtgaatgagcatttcgaggcactggcaaatggaggggagtttataacacactggtgggcattgctcacccacgctggcattctagagagggctccaaggaatgtcaacaatgacatagaaaatcaatgggaaggatcatcatcatatggttgcccatctacaactcaggctgcagctgcagcctgtgccacaaatcaacagccaatggctggggaccgtactgtgcaactgattgaaatgaatgtcggagacatagaagatgctaagactgacaggcattatcctggagagatttcatatggtgctgctttaaggcttcgtcgtgcgaactcctacattagcaagtgtagagaagctgctaccttagccaccagcgccacgattaaaccagcaatacgtggaaactgtgagcaaggtattcttttcaacag

SEQ ID NO: 28091 - DNA, 2823 bp, Zea Mays
actggactactggagccctataggctatagccaccaccgcactcgcctccctctctccctcccacactccaccacccgcgccgccgcctcctactccgccccggcccctctgatccggaccgagcgccggccatggcgctcgccttcgacgagttcgggcgccccttcattatcctgcgggagcaggagaagaagacgcgccttcgggggcttgacgcgcagaaggccaacatcgcctcggccaaggccgtcgcgcggatcctccgcacgtcgctgggacccaagggcatggacaagatgctccagtcccccgacggcgacgtcatcatcacaaatgatggagcgaccatcctggagcagatggatgttgacaaccagatagcaaagctgatggtggagctgtcccgtagtcaagactatgaaatcggggatggtaccaccggggtggtagtcatggcaggggctcttctcgagcaggctgagaagcttctggagcgtggtattcaccccattagggtggctgaaggctatgagatggcgtcaaaggtagcttttgaccacctagaacatatatccgaaaagtttgagttcagtgcagacaacattgaacccctggtccagacctgcatgacaactctatcctcaaagattgttaaccgttgcaagcgggcgttggcagagattgctgtcaaagcagtacttgcggttgcagatttggagaggaaggatgttaacttggatctaattaaagtagaaggcaaggttggtgggaagctggaggacactgaacttgtatatggaattattgttgacaaagatatgagccatccacaaatgccaaagagaattgaggatgctaagattgccatcttgacatgcccatttgagcctccgaagccaaagacaaagcataaggttgacattgacactgtcgagaaattccagacactgcgtgagcaagagcagaaatactttgatgaaatggttcagaagtgcaaggatgctggtgcaaccctggttatttgccagtggggttttgatgatgaagccaatcatttattgatgcatagaaatctgccagcagtgagatgggttggtggtgttgaattggaactgattgccattgctacaggagggcggattgttccgagattccaagagttgagtcctgaaaagcttggaaaggctggattagtcagagagaaatcattcggaacaacaaaggaccggatgctttacattgagaagtgtgccaattctagagctgtaaccattttcatccgtgggggaaacaaaatgatgattgaggagaccaagcgcagtcttcatgatgctctttgcgtagcaaggaatctgatccggaataactcgattgtgtacggtggcggctcagccgagatatcttgctcaattgctgttgaaactgctgcagatcggcacccgggagttgagcaggtcattcgctgatgcattagatgctgttccactagcgttggccgaaaacagtggtttgtcaccaattgataccttaactgcggtaaaagctcaacaagtcaaggagagcaacccccactgtggcatagactgcaacgacgttggcaccaccgacatgaaagaacagaacgtcttcgagaccctgattggcaagcagcaacagatcttgcttgccacccaggtggtgaagatgatcctgaagatcgacgatgtcatctcaccgtccgagtactgacggaaagaaggaacggatggctatgctggatatgcgtaggcggcattgctgatgtgttttgattggtgtacctccttgtccaggcttgctgcctaccactcactccctgtgtgacgttttgctgaaattggtttgtactgtgcacgataatatctggaaatagactctagacagtccttagttatctttttattatataaaaaaagtcagcgccttctcgttagggttgagatgtttgcagtattgatgcttttgtagtgtttttatagctcagcttaagctgtcatttttgtttgatgatttgcaatagttggacgccctcatgaacaaaatgcaatggttcatcttttggttcacatggacaaaatgttaaaatccgaaagcgttttctcaccgcacgacacagcatatttttttattatttcttttaaagtaaaatgtgttggaactgttaattcttttcaacagtttgttcacatggacattgcgatcctgatgttgtgatgacatactctatcttggtggaagcttatcgaaaggaagaatctatgctttgcatcaggagaacctaactttggttccaactgattttaccgtggtgattttgctcatccgaactctttagatgcattgaccaaacgatagattctgtttggttggatgcaaccgagattgcacccacagctgcaacacaagtcaaatctgttgccatccctactagcgggccaggctcgcacaagccatgccatgtttgctcatgaagcttggttgcattggttgagaatctccttgctatccttgatttagtgagatgtgcccacgtaccacagtacgtgtaactgagatataaggagttatatagggctctgcctctgaaagtgcccagtttgagctgccaaacagagggagtttactgaactggtgaatgggaacaaaattgcatgtgtatcctccactatggcactgttaatccttttcttgacaagacaggatcaggttttggaagaatgaaagaattcataatctgatggtaaaatttttctgtggccctactctgaaccagatcacctttaactccccgaaaatccttcaga

SEQ ID NO: 28092 - DNA, 2439 bp, Zea Mays
cgagaacagaagtaatactaaattgaaaatatcctacaaaacacatacgtaagagtagatatagcagtaaatttacaatatacaacagacataaggggctttagtgcaaatattccatggacgtgaaaactcgtccttgttggctgcgagattctatcactcctccctcgtctccagttttttccctcgtctgctataaatggagctcaccttccacgacctctggcagttcccatccgccgcccgcgcacttgttccttccggcacagcacacaggacaccgtagacagattcatcgcgacgatggggctggacgtcgtggagatcgggatgggcgccgatttgagcctggatctgaggcacttcgcctccaaggccgtgcggcagagcaaggactacgcgccggcgccggcgccggacatggacgcctgcatccgccgcctcgaggaggagcggggcaagatcgagatgttcaagcgggagctgccgctctgcgcgcgcctcctcgcagacgtgatcgatgtgatgaaggaggaagcggggaaggcggtggcggaggaggacggcgccgccggggacaagagcaagtggatgagcacggcgcagctctggacgggcgattgcggccgcgaggacgcggaaccagagaagcaagacaaggagaggagctcgcctgaggccaggtctcgcgccgccggcggcgctttcttgccgctcaaggctgccgtgggctccggcgcgccggcgttcgcgccgctcggcttgagaatggacgacaaggccgccgcgcgcgccgggatgcccgacctgtgcttgctgtcgccgccggcgaccaagagcgccgccgaggagagccgacgccaggtggtggggtttgcgcaggcggcgacgagggcggccgccgccacggcgccagctgccccttcgcttagcgttggcgtccagtccccgtcgcagcaggcgaggaaggctcggcgttgctggtccacggagctgcatcgccagttcgtcgccgccttgaaccagctcggtggcccccaagttgccaccccaaagcagatcagggagctgatgaaggtggacggcctcacaaacgacgaagtgaaaagccaccttcagaaataccggctgcacaaccggagggcgccagggtccggcgtggtgagccagcccatcgtgctggtgggagggctgtggattccgcaggagcaaagcagctcgcagtccgggtctccccacggcccgctccacttctccacctcaggcatcgcagtctcgtcggcggccaccgtcagctgcgaggaggaagacggacggtccgagagctatggctggaaatgatggagaggctgctgctgctgctgctgctgagaggggagctgcagcctcaggaacgggaatcatcaggagggaaactgagagtagtgtagctgtctgtacacatacatagttacattacattacatacagggagtgagggagatcgggccttgagcgctcgagaccaaactgatgcttcgggtttgtacatcccaaagagatgagatgatacagttttgcggctaatccatgtttcgggcttttttgtcaccatcttcagttcttcttttcgttgaataaaatgtgtgtcgaggaatgaacagtccatttaagattttgcatgtgcagcagtagtaataaaaaaaatgtttttgctgttggtcaccgaatgaacagtccagctgctgaaatgttgcagagttctagcattgaatagaaactttggatgctgtcctcggaacttggggccgggtggtccaggctgaaatcctgataacgattaaccaaccaacatgtcgttcattatcctgttccccatcatcaacagcacgtttctgtactgtactctgtagtctgtaccagtagcagcatgcaggcctccttcatctgctgaactgaactgacagcagaatgctaaagaagacacgggcacggcagcagcctttctgttcatctgctgcccccaaccgtccgcacagtcgcacgccaagaacctcaccgttgccgacggcgggcgttcttggcatgcagatgcaggcctccttcctctgcgactcccccgtgctgcaagcggcaagcctgcatgcagtgcacgctgccgggggtggcggcattaacaactccggcgtccctatcgctggctggcggtcagagtaatctttgtgtagtggcaactgggtcctgcctgcgtgctcttatccacagcggagccggaggaggatattctccaggcattcttctgtctccttcagcgtgcgcctactttgaacttgtctctgtctctgtgtgtctgtcactcaccctgaaagagagaagataagagagagaaagagtgaaaggcggctcggtccatgcattagcgtctcatcagtccttggacaacttatgttatgttgttag

SEQ ID NO: 28093 - DNA, 2633 bp, Zea Mays
tagtaaacatttgtgccgcgtatgctcgtatgtgtgtgtgtttgaagagttccctcacgacaagggcccccacaatccgaggggcaaaatggtccagtcaaaaaagccctacttccgagattagacaaaacaaaactcccccgacgtcggcttctccagcgccacgctctcctctccagtctccaccaacgtcctccccccaccgcaccgcaccgccctcccctcccctcccctccccgcgcgtgcgccgccgccgcgagatccggggcgcgatgtggcgcagctgcgtctcgcggggcctctccagggccaaggcctccgcctccaggctcctctccacggcatcgtcgtcttacacggtggtggaccacacctacgacgcggtcgtggtgggggccggcggcgcggggctccgggcggccatcggcctctccgagcacggcttcaacaccgcgtgcatcaccaagctcttccccacgcgctcgcacaccgtcgcggcacagggaggcataaatgccgcgcttggaaacatgagtgaagatgattggaggtggcacatgtatgacactgtgaagggaagcgattggctcggtgaccaggattctattcagtatatgtgcagagaagcaccaaaagctgttatagagcttgagaactatggattaccattttcaagaactgaagagggaaagatataccaacgtgcctttggaggacagagcttagattttggcaaaggtggacaagcctaccgttgtgcctgtgctgctgacagaacaggacatgctatgctacacacattatatggtcaagcaatgaagcacaatactcaattttttgtggaatactttgcattggaccttctcatggacaatgatggaaagtgtcaaggagtcattgccttaaacatggaagatggaactcttcaccgtttccgtgcttctaatacaattctagccacaggaggttatggcagggcatatttctcagcaacctcagcacacacttgtactggagatggcaatgctatggtcgcacgtgctggtttacctcttcaggatcttgagtttgtacaattccatcctacaggcatttatggtgctggatgcctgattactgaaggttctcgtggtgaaggtggtatccttagaaatagtgaaggtgaacggttcatggaacgatatgctcctactgcaaaagatcttgcttctcgtgatgttgtttcaagatcaatgacaatggaaattagagaaggacgtggtgtagggccattgaaggatcacatttatttgcatctgaaccatctgccgcctgaggttctcaaagaaaggctccctggcatttctgaaactgctgctatttttgctggtgttgacgtcaccaaggagcccattccagttttgcctactgtgcattacaatatgggtggtatcccaacgaactaccatggggaggtagtggatatcaagggtaataatccagatgctgttatccctggtctaatggctgctggtgaagcagcctgtgcatctgtccatggtgcaaataggctaggcgcaaattcacttcttgacatagttgtttttggcagagcttgtgcaaacagggtagcagatatttctaaaccaggtgagaagcagaaacctctggagaaagatgctggagagaagaccatagcctggttggacaagctgaggaatgcgaatgggtcattgccaacttccaagatccgtctcaacatgcaacgtgttatgcaaaataatgctgctgtgttccgtacacaagaaacacttgaagaaggttgtgaactgattagcaaaacatgggaaagtttccatgatgtgaagctcagtgaccgaagtctcatttgaggctcggaaggaaagcagaggagctcatgctcgtgaagatttcacgacaagagatgacgagaagtggatgaaacactccctgggatattgggagaacgagaaggttcgattggcatacaggccagtgcacatgaaaacattggacgatgaagtagagtcattcccgccaaaagcacgtgtctattgatcgattcaagcctaacacctcgggaattccgtgtaaggtgttaataaagcagatgggcgttcctggctgagaacatgacctggatttgtgtccctcattttctgtgtttctgtattctgcctagtttgctagaaataaaagggtaagatagaacacatgctaatccctggctgatgtttgtgtacatgaaattttgcatgggttgttacctgttaatgctctgcctggtatcattaacccatgattcatgaatgttttggtgattcatggcatggtgcgacgttgtcaaacaacgtagatttgtacgcctgttccttggatatagtataatatatatgtacacatgtgttggagcagaaaaaagccacttctccagtttagacagtagtagtataatgcagtcttatggagagctgctgctacgtactggcacaactacagctatagactagagtgtattttctggatgctaaataggagagccagagctgttttacccccgaagttttcttgttatatgaaccgtactgtatgagagcatcaaatgctagcagatcttaaagaaaaatgttgag

SEQ ID NO: 28094 - DNA, 2699 bp, Zea Mays
tagtaaacatttgtgccgcgtatgctcgtatgtgtgtgtgtttgaagagttccctcacgacaagggcccccacaatccgaggggcaaaatggtccagtcaaaaaagccctacttccgagattagacaaaacaaaactcccccgacgtcggcttctccagcgccacgctctcctctccagtctccaccaacgtcctccccccaccgcaccgcaccgccctcccctcccctcccctccccgcgcgtgcgccgccgccgcgagatccggggcgcgatgtggcgcagctgcgtctcgcggggcctctccagggccaaggcctccgcctccaggctcctctccacggcatcgtcgtcttacacggtggtggaccacacctacgacgcggtcgtggtgggggccggcggcgcggggctccgggcggccatcggcctctccgagcacggcttcaacaccgcgtgcatcaccaagctcttccccacgcgctcgcacaccgtcgcggcacagggaggcataaatgccgcgcttggaaacatgagtgaagatgattggaggtggcacatgtatgacactgtgaagggaagcgattggctcggattctattcagtatatgtgcagagaagcaccaaaagctgttatagagcttgagaactatggattaccattttcaagaactgaagagggaaagatataccaacgtgcctttggaggacagagcttagattttggcaaaggtggacaagcctaccgttgtgcctgtgctgctgacagaacaggacatgctatgctacacacattatatggtcaagcaatgaagcacaatactcaattttttgtggaatactttgcattggaccttctcatggacaatgatggaaagtgtcaaggagtcattgccttaaacatggaagatggaactcttcaccgtttccgtgcttctaatacaattctagccacaggaggttatggcagggcatatttctcagcaacctcagcacacacttgtactggagatggcaatgctatggtcgcacgtgctggtttacctcttcaggatcttgagtttgtacaattccatcctacaggcatttatggtgctggatgcctgattactgaaggttctcgtggtgaaggtggtatccttagaaatagtgaaggtgaacggttcatggaacgatatgctcctactgcaaaagatcttgcttctcgtgatgttgtttcaagatcaatgacaatggaaattagagaaggacgtggtgtagggccattgaaggatcacatttatttgcatctgaaccatctgccgcctgaggttctcaaagaaaggctccctggcatttctgaaactgctgctatttttgctggtgttgacgtcaccaaggagcccattccagttttgcctactgtgcattacaatatgggtggtatcccaacgaactaccatggggaggtagtggatatcaagggtaataatccagatgctgttatccctggtctaatggctgctggtgaagcagcctgtgcatctgtccatggtgcaaataggctaggcgcaaattcacttcttgacatagttgtttttggcagagcttgtgcaaacagggtagcagatatttctaaaccaggtgagaagcagaaacctctggagaaagatgctggagagaagaccatagcctggttggacaagctgaggaatgcgaatgggtcattgccaacttccaagatccgtctcaacatgcaacgtgttatgcaaaataatgctgctgtgttccgtacacaagaaacacttgaagaaggttgtgaactgattagcaaaacatgggaaagtttccatgatgtgaagctcagtgaccgaagtctcatttggaactctgacttgatagagaccctggaactggaaaatctgttgataaacgcatgcataactatgtattcggcagaggctcggaaggaaagcagaggagctcatgctcgtgaagatttcacgacaagagatgacgagaagtggatgaaacactccctgggatattgggagaacgagaaggttcgattggcatacaggccagtgcacatgaaaacattggacgatgaagtagagtcattcccgccaaaagcacgtgtctattgatcgattcaagcctaacacctcgggaattccgtgtaaggtgttaataaagcagatgggcgttcctggctgagaacatgacctggatttgtgtccctcattttctgtgtttctgtattctgcctagtttgctagaaataaaagggtaagatagaacacatgctaatccctggctgatgtttgtgtacatgaaattttgcatgggttgttacctgttaatgctctgcctggtatcattaacccatgattcatgaatgttttggtgattcatggcatggtgcgacgttgtcaaacaacgtagatttgtacgcctgttccttggatatagtataatatatatgtacacatgtgttggagcagaaaaaagccacttctccagtttagacagtagtagtataatgcagtcttatggagagctgctgctacgtactggcacaactacagctatagactagagtgtattttctggatgctaaataggagagccagagctgttttacccccgaagttttcttgttatatgaaccgtactgtatgagagcatcaaatgctagcagatcttaaagaaaaatgttgag

SEQ ID NO: 28095 - DNA, 2570 bp, Zea Mays
tagtaaacatttgtgccgcgtatgctcgtatgtgtgtgtgtttgaagagttccctcacgacaagggcccccacaatccgaggggcaaaatggtccagtcaaaaaagccctacttccgagattagacaaaacaaaactcccccgacgtcggcttctccagcgccacgctctcctctccagtctccaccaacgtcctccccccaccgcaccgcaccgccctcccctcccctcccctccccgcgcgtgcgccgccgccgcgagatccggggcgcgatgtggcgcagctgcgtctcgcggggcctctccagggccaaggcctccgcctccaggctcctctccacggcatcgtcgtcttacacggtggtggaccacacctacgacgcggtcgtggtgggggccggcggcgcggggctccgggcggccatcggcctctccgagcacggcttcaacaccgcgtgcatcaccaagctcttccccacgcgctcgcacaccgtcgcggcacagggaggcataaatgccgcgcttggaaacatgagtgaagatgattggaggtggcacatgtatgacactgtgaagggaagcgattggctcggtgaccaggattctattcagtatatgtgcagagaagcaccaaaagctgttatagagcttgagaactatggattaccattttcaagaactgaagagggaaagatataccaacgtgcctttggaggacagagcttagattttggcaaaggtggacaagcctaccgttgtgcctgtgctgctgacagaacaggacatgctatgctacacacattatatggtcaagcaatgaagcacaatactcaattttttgtggaatactttgcattggaccttctcatggacaatgatggaaagtgtcaaggagtcattgccttaaacatggaagatggaactcttcaccgtttccgtgcttctaatacaattctagccacaggaggttatggcagggcatatttctcagcaacctcagcacacacttgtactggagatggcaatgctatggtcgcacgtgctggtttacctcttcaggatcttgagtttgtacaattccatcctacaggcatttatggtgctggatgcctgattactgaaggttctcgtggtgaaggtggtatccttagaaatagtgaaggtgaacggttcatggaacgatatgctcctactgcaaaagatcttgcttctcgtgatgttgtttcaagatcaatgacaatggaaattagagaaggacgtggtgtagggccattgaaggatcacatttatttgcatctgaaccatctgccgcctgaggttctcaaagaaaggctccctggcatttctgaaactgctgctatttttgctggtgttgacgtcaccaaggagcccattccagttttgcctactgtgcattacaatatgggtggtatcccaacgaactaccatggggagagcttgtgcaaacagggtagcagatatttctaaaccaggtgagaagcagaaacctctggagaaagatgctggagagaagaccatagcctggttggacaagctgaggaatgcgaatgggtcattgccaacttccaagatccgtctcaacatgcaacgtgttatgcaaaataatgctgctgtgttccgtacacaagaaacacttgaagaaggttgtgaactgattagcaaaacatgggaaagtttccatgatgtgaagctcagtgaccgaagtctcatttggaactctgacttgatagagaccctggaactggaaaatctgttgataaacgcatgcataactatgtattcggcagaggctcggaaggaaagcagaggagctcatgctcgtgaagatttcacgacaagagatgacgagaagtggatgaaacactccctgggatattgggagaacgagaaggttcgattggcatacaggccagtgcacatgaaaacattggacgatgaagtagagtcattcccgccaaaagcacgtgtctattgatcgattcaagcctaacacctcgggaattccgtgtaaggtgttaataaagcagatgggcgttcctggctgagaacatgacctggatttgtgtccctcattttctgtgtttctgtattctgcctagtttgctagaaataaaagggtaagatagaacacatgctaatccctggctgatgtttgtgtacatgaaattttgcatgggttgttacctgttaatgctctgcctggtatcattaacccatgattcatgaatgttttggtgattcatggcatggtgcgacgttgtcaaacaacgtagatttgtacgcctgttccttggatatagtataatatatatgtacacatgtgttggagcagaaaaaagccacttctccagtttagacagtagtagtataatgcagtcttatggagagctgctgctacgtactggcacaactacagctatagactagagtgtattttctggatgctaaataggagagccagagctgttttacccccgaagttttcttgttatatgaaccgtactgtatgagagcatcaaatgctagcagatcttaaagaaaaatgttgag

SEQ ID NO: 28096 - DNA, 3095 bp, Zea Mays
gcctctttttctccccgccccgcgcggccgaacaaaaccctagtccccctccccactccctcagtccccattcccacaccgttggtggctcggaaccgccactgaccacttccctgaccccgcgctctctccctctcactacagtcggagggcggcggcggtggcgaaccgacggcgtataacagttggctgctcacaatggggacactttcaatgtccgacgccagccctatccctgccaagaactgggatgcttcccctgtcaagctcgaggctcaaggtggtgacgccatcctcggcatgaaggaggaagagcgactactggagctcgtgaaggatgagcaggctgatggaatcttggattcattaccaattgacctggaggccaagaatggcgatgcatcactcatcactgaagccatgaaaaaggaggaggagcagcttgaagacacccggatcaaggtgcaggaagaagaggaagccaggaagagggaagaggctgctagacttgcttttgatcctgagacacagtataacaagttagatgagctgctgacaaagacacaactcttttcggagtttctacttgagaacatggatcggattgccgatgaaagtgttgaaactcaagctgaacagccacaggtagaagagaagaagaaagggcgcggccggaagaggaaagcaaagccacagtacaatgataagaaggctaagacggcagtggctgccatgctcacaagatctcgcgaagaacgtcttgcggaagattctactctctcagaagaagaaaggtgggaaaaggagcaggctaatcttgtgccgttattgactggtggaaagttgaagtcatatcagataaagggtgtcaagtggcttatatcattgtggcagaatgggctgaatggaatactggctgatcaaatgggccttgggaaaaccatccagacaattggatttcttgctcatctgaaagggaaaggcatgcatggtccatacttaataatcgctcctctgtccactctctcaaactgggtgaatgaaatctcaaggtttactccatctctggttagtatcatataccatggaggtaaggctgcccgggcagagatccgaaggaaatttatgcccacaaatgttggccctgattttccgatagtagtgacttcatatgagatggccatgtttgatgctaaatttcttgctgcctataagtggaagtatgttgttgtggatgaggggcatcgtctgaaaaatgctaagtgtctattattgaagcagctgaagcgcataccaatggataataagctccttttgactggaacacccttgcagaataatcttgcagagctctggtcactattgaacttcattttgcctgatatattctcgtcacatcaagagtttgagtcatggtttgatttttctggtggaaatgaagaaactgatgagaagaaaaggctgcatgttgtttcaaagcttcacgctatcttgcgtccattccttctaaggcgtatgaaggaggatgtggaacagatgcttccacgaaagaaagagataatcatatatgccaacatgactgagcaacagaagcaaatccagcatcacttgatcgaaaaaacatttgacaactacttgcacgaggaatcagatattatattgaaaagacctggcattagggcaaggttgcataatctaatgattcagctgaggaagaattgcaaccatcctgatcttttggaatctccagttgattcaactggtttatatccacctgttgagaagcttctggaacagtgtggtaaattccaactttttgacaggttgctaaatttcctgatggcgcaaaagcacaaggttcttgtattctcgcagtggacaaaagtgctggacattattgaatactaccttgattcaaaaggccatgctgtttgccgaatcgatggtaatgtgaaactggaagaaaggaggaggcagcagaattcaatgacgtgaatagcagcatgcgtatcttcctcctgagcacaagggctggtgggcttggcatcaaccttactgccgctgacacctgtatcctctacgacagcgactggaaccctcagatggatttgcaggccatggaccgatgccaccggatcggccaaacacgcccagtgcatgtgtataggctggctacgtcacactccgttgaggggcggatgatgaagagagcctttgggaagctgaagctggagcacgtggtgatcggcaagggacagttcgagcaagacagagctaagccgagcgccttagatgaaggtgagctgctggcgcttctcaaggacgagcagaccgaggaggacaggatcgtccagaccgacatcagcgacgaggacctccagaggctgatggaccggagcgacctgatgggcccgccgcctggcgctggcggcgcaaacgcggcctcgcctcttgtaccgctgaaaggcccgggctgggaggtggtggtgccggccaagagtggcggcggcatgctgtcgtcgctcaccagctgagccgtcgtcgctgcggggatctgttgtgcttttggttggtcgcacgcactcagttttggtttgccccccccccccccccccccccccccactggtgctggtggttttggtggcagctgttgcgctgctcaggcgatggctgttgaactggggcgttgcccctgcagaagtagcttttagtttaggatcagcaacaaaacaagcaggactctaggccatgtgtggtcgactctccgtacggtacccaggtcgtttacagtacggaggtcgttgcgttagattacgtgggtgggtgatggcctcatgggggatgggacggttggttgaaccagacacatgccggttgctttgtaaagtttgtatcacgtcgtccgtgatacaatgcggtcctccgtctacaagcgtgctgatcctctcttgtttggctgtcttgtgatgtttgttgagaacgctgaacgaacgcccgtaccgtgacaaagatcggttcctggtcttgttactcttgtacagtctacaaaaggagaaggcgaacgctgcaacaaggttggttcctgtatactat

SEQ ID NO: 28097 - DNA, 3157 bp, Zea Mays
gcctctttttctccccgccccgcgcggccgaacaaaaccctagtccccctccccactccctcagtccccattcccacaccgttggtggctcggaaccgccactgaccacttccctgaccccgcgctctctccctctcactacagtcggagggcggcggcggtggcgaaccgacggcgtatgtaaggaatccaactgaacatttgacttgcttgttccgggagatctcttgcctaactgtgagcgagcgagttgtcacagaacagttggctgctcacaatggggacactttcaatgtccgacgccagccctatccctgccaagaactgggatgcttcccctgtcaagctcgaggctcaaggtggtgacgccatcctcggcatgaaggaggaagagcgactactggagctcgtgaaggatgagcaggctgatggaatcttggattcattaccaattgacctggaggccaagaatggcgatgcatcactcatcactgaagccatgaaaaaggaggaggagcagcttgaagacacccggatcaaggtgcaggaagaagaggaagccaggaagagggaagaggctgctagacttgcttttgatcctgagacacagtataacaagttagatgagctgctgacaaagacacaactcttttcggagtttctacttgagaacatggatcggattgccgatgaaagtgttgaaactcaagctgaacagccacaggtagaagagaagaagaaagggcgcggccggaagaggaaagcaaagccacagtacaatgataagaaggctaagacggcagtggctgccatgctcacaagatctcgcgaagaacgtcttgcggaagattctactctctcagaagaagaaaggtgggaaaaggagcaggctaatcttgtgccgttattgactggtggaaagttgaagtcatatcagataaagggtgtcaagtggcttatatcattgtggcagaatgggctgaatggaatactggctgatcaaatgggccttgggaaaaccatccagacaattggatttcttgctcatctgaaagggaaaggcatgcatggtccatacttaataatcgctcctctgtccactctctcaaactgggtgaatgaaatctcaaggtttactccatctctggttagtatcatataccatggaggtaaggctgcccgggcagagatccgaaggaaatttatgcccacaaatgttggccctgattttccgatagtagtgacttcatatgagatggccatgtttgatgctaaatttcttgctgcctataagtggaagtatgttgttgtggatgaggggcatcgtctgaaaaatgctaagtgtctattattgaagcagctgaagcgcataccaatggataataagctccttttgactggaacacccttgcagaataatcttgcagagctctggtcactattgaacttcattttgcctgatatattctcgtcacatcaagagtttgagtcatggtttgatttttctggtggaaatgaagaaactgatgagaagaaaaggctgcatgttgtttcaaagcttcacgctatcttgcgtccattccttctaaggcgtatgaaggaggatgtggaacagatgcttccacgaaagaaagagataatcatatatgccaacatgactgagcaacagaagcaaatccagcatcacttgatcgaaaaaacatttgacaactacttgcacgaggaatcagatattatattgaaaagacctggcattagggcaaggttgcataatctaatgattcagctgaggaagaattgcaaccatcctgatcttttggaatctccagttgattcaactggtttatatccacctgttgagaagcttctggaacagtgtggtaaattccaactttttgacaggttgctaaatttcctgatggcgcaaaagcacaaggttcttgtattctcgcagtggacaaaagtgctggacattattgaatactaccttgattcaaaaggccatgctgtttgccgaatcgatggtaatgtgaaactggaagaaaggaggaggcagatagcagaattcaatgacgtgaatagcagcatgcgtatcttcctcctgagcacaagggctggtgggcttggcatcaaccttactgccgctgacacctgtatcctctacgacagcgactgggccatggaccgatgccaccggatcggccaaacacgcccagtgcatgtgtataggctggctacgtcacactccgttgaggggcggatgatgaagagagcctttgggaagctgaagctggagcacgtggtgatcggcaagggacagttcgagcaagacagagctaagccgagcgccttagatgaaggtgagctgctggcgcttctcaaggacgagcagaccgaggaggacaggatcgtccagaccgacatcagcgacgaggacctccagaggctgatggaccggagcgacctgatgggcccgccgcctggcgctggcggcgcaaacgcggcctcgcctcttgtaccgctgaaaggcccgggctgggaggtggtggtgccggccaagagtggcggcggcatgctgtcgtcgctcaccagctgagccgtcgtcgctgcggggatctgttgtgcttttggttggtcgcacgcactcagttttggtttgccccccccccccccccccccccccccactggtgctggtggttttggtggcagctgttgcgctgctcaggcgatggctgttgaactggggcgttgcccctgcagaagtagcttttagtttaggatcagcaacaaaacaagcaggactctaggccatgtgtggtcgactctccgtacggtacccaggtcgtttacagtacggaggtcgttgcgttagattacgtgggtgggtgatggcctcatgggggatgggacggttggttgaaccagacacatgccggttgctttgtaaagtttgtatcacgtcgtccgtgatacaatgcggtcctccgtctacaagcgtgctgatcctctcttgtttggctgtcttgtgatgtttgttgagaacgctgaacgaacgcccgtaccgtgacaaagatcggttcctggtcttgttactcttgtacagtctacaaaaggagaaggcgaacgctgcaacaaggttggttcctgtatactat

SEQ ID NO: 28098 - DNA, 885 bp, Zea Mays
ttttttttttttcaaacaagtatattttaacagtatgattctgatgcattaaacgacgtaagaatttaacattggtacaagaggggaggggagccagtaacaacttgcagcatgcttttactagtttacaggcgggaggaataggaatcgtaggtaagctggaagaattctaatgatatacttgtcaaccaaagaatctaagtccaagtcgtcttcacagttgcgagttcccaaacaattgttgtactccagtgtcaccattgtagaagtattagtcctgcctcacagaagatggtaggttagtaatttttatgagtatcggaaacatccaaatctatactgaatgcatcaaagcaatatctagagaagcccttgaccaacagttactctaccaatgtataactttagggatacaaaattcatgccattagatttgtattcaaaagcacttatttgtgattgaaagtgtgatatcatagaagggcaaattaagagagtaacagttggccaagggctgttctaacaaaacaaaacatgccttactcacagatggagggagtactactatgcaccagcagttttgccttatctggagcaacctcaagcttaactatgcaccagcaaaaccggatcccaaacagaaaaagggtcctagctcaagttcaagcttcagcttctcatagccagttcagtcgcctcatgacaggatacaattttgcaagataaatcaccacagaatcgcctattaatctataagtttactccacagtcacatgttcggtgcaaggtgcatccatccaatatatacaaaataagttattttggttcagttacttcagtatgctgttatagtaagaaccgactttcatgccaaactatgattcc

SEQ ID NO: 28099 - DNA, 1948 bp, Zea Mays
cttggtccccaccatcgcgaaactgaaaacgcaccacaccaccagccagccagccagcctttcctctccctctctggccattgcctcgccatcgcgtcggacgggaccgaggaggaggcctgccgtgccgtgccgcgggcgatggacccgtgcccgttcgtgcgggtgctggtcggcaacctggcgctgaagatgccagcatcggcgtcgccggcgaccccgcgcgcgtccggctccggcgtgcacccgaccgcggcgcgctgccactgccgcatccgcctcaacaagatgccctaccagacggcgtccgcgccgctgctgccggccacggaggacggcccggcgtcgtgcacggccgccttcgccgccgccttccacgtctccaaggccgacctggaccgggccgccgccaggccggccgcggcgctgctcctcgccgcgcgccgccgccgcaccgcgcgcctcaaggtggccgtgtacgccggccgcggcgggggcgtgagcgcgtcctgcggcggcggcggcgccacgtcgggtaggctgctcggcaaggtcgtcctcccgctcgacctcagggctgccatggccaagcccgtcgtattccacagcggctgggtcgccgtcggcagccgccgcggcaaggcggcggcggcggcctcctcctccgcgcgcgcgcagctcagcatcaccgtccgcgccgagcctgaccccaggttcgtgttccagttcgacggcgagcccgagtgcagcccgcaggtgctccaggtgaagggcagcatgaagcagcccatgttcacgtgcaggttctcctgccgcagcagcagcgacctgcgctcgcgtctgatccgggcgcgcgcaactggctggcgaagctggggtcggagcgcgagcgcgcggggaaggagcgcaaggggtggtcggtgacggtgcacgacctgtcggggtcgccggtggcgctggcgtcgatggtgacgccgttcgtggcgtccccgggtacggaccacgtgagccggtccagcccgggcgcctggctcatcctgcgccccgcggacgggacctgggcgccgtggggccgcctcgagtgctggcgcgggcgcggcgacaccctcggctaccgcttcgagctggtgcccggccacgccacggggggcgccggcgtctgcgtcgccgaggccagcgtcccggcctcccgcggcgggcgcttcgccatcgacctcacggcggcggcgcagccgttctggtgcagcagcagcggcgacatgggccacggcatctggcccttcggcggcttcgtgatgtcggcggcggtccagggggaaggccgctgcagcaggcccaccgtggaggtgggcgtcgcgcacgtcgggtgcgccgaggacgccgcggccttcgtcgccctcgccgccgccgtcgacctcagcatggacgcgtgccgcctcttctcgtgcaagctgcgcagggagctgtcgacggcgtcccgcgccgagtttctccggtgaccgggcttctaggtgctttttagagtctagaagcggtggaactcgggtttctgtgcctactgcggaaggattctcaagcgttctctggactctggtggaggagaaagaaacaccgctgatgtgaaccatgtgatgtcttcgtgttctgctcttgttttgttccttttgcgtggagcgaaggcttctgccggagctagctgctatatggaacgaagaagaggccggcatcctaatgtccgtccaccgtccatttcccggcccagcgtctcgttctcgacgacgaagggggagggggagtcagaaaagggtatggagagacggggtggagacccacaaagacagatcaaaatttacaaaataaccctttattaattcattttttttctatttgtatggaccagcagtaagagtatatgaggggctgtaaaaggtgggctttgcatccggta

SEQ ID NO: 28100 - DNA, 1845 bp, Zea Mays
acgatttttggagcgacgtggatagtctcatagatgccgttttgaaccggctttgtaatatagaaatataagattttttttcttgccagttcatgtaaccaaatcaaggcacagtcgatcacggatttgagggaatgagctgtgttgcggtcgtgccggccaccggagttggagaagaagagagcagtggagaatgccgcagcggaggcgtggagccagagcagtggataccatattctagcggtccttggcagagcgaccaatattcttgatccagatttatattttgatgactagcggcctgaagaagtttccatgttatctgagttcgaggcttcgggccttcctggtccgagattgctaagaggataaaccctggccatcatggtagtatgtgctataggtaaaacttagtattttcttttctgctttagcatgctgccatcaacctaatatgttttcagagaagcttccttggcaatgtttatttcatcatgagctgtagcctgtagacgatggagaaaacttcataaacatcaagttcagaaagttagagaagccagacaaatgaagaaagctatttttcaaaccagttttgttgatagagaaaaagagcggcgttcaattcacccttgtgacctaatgtcacttttgccctccaaaggtgacggtcgtctgacagatgtgacgatattgcaaatttcttctagagtacttgtgtacttatctccataggttctcaagatcacccctcagctaatgatatatcaaagtcaatctacacgcaaatctgttagcaccgcactccatggatgcaaacagcgcaaacatgacaactggtttcactggtaatcaaggagttcgagcaaagatacacgatcttaggatggggagatcaagagcaaactaagtaggaagaggtagaggattaagagagggaaactctaaccctagaagtgaggaaccagcagctaccgaggaggaagacgatggcgttgggatgagaaatacgatgtggtagttgttctgttcgatttccctgttcgtgtggagtcctccttctcttgtagtaccggccagcccaacagcacaacctagtatacacaaaatctgtatcccaacgatcaagcatgagtttttcatacattacaaagcttgattttcgttcatcgtttccaacaccatcaaaggatgtctaagtcatcctttagagtattgcctgtccccgcgtcgtcctcctctaggcgtcactggcggctccccatcgaccccgtccaactccacccaccgccgccggtcttcacccccgccgtcgccggagcagctcaccggaagttcaacgagcagcgaggagggcagcggcgggactgctctctcactcatttccctcccttcttccacccactccactcctccctcttcctggaggtggtcggcgacctgatccgcccttgggaaggccggatcggcgggctgactggccggatctaggggttggtcgccgcccgccgctcctccctgctggcatgggcgggtggccttgcggccacggccgtggtggctcgcgcggctagcccgcggcggtggtgcccgcgcgctcgcgtggccgtggctggccagcggcgttggcgcccacgcacgcggtcggcccgctgcgacggcggcgtggcttgcttgtgcttgtagctggtgcctgggtcgggggcgttggccgtcggtggatctgtggctgtcagcggtgccttctgcaggtggtgggtcatggtcgtggggctgggggcggatcttgagcctctccgggtagattcatctctccgcctctcgtttcggcctgtggtgtggtgt

SEQ ID NO: 28101 - DNA, 504 bp, Zea Mays
atgatgcttatgaagtatgtgaaggacaactgggagcagactgttttcatgatagaacttcacagaaaggatgatattcggagaacatgttattcagggacgaagacggcgtgcagcaaggaggcgaggttggagatatctcgtgcacctgtgcaagaggggggttgggggctaaggcacgactcggcgcgtgccgaggcaaagccaggcgtggcggtagccgataggagccaggcgcggagcgccgcctatgtcgttgtgcgggttcacctgtgcctatgcagctatgctagtggaggagcgaggccgcgggcacgaccgacgcgtgccaaggcgaagccgcggagcatcgggagcaaagttggtggcggtgggcacgaggtacgaggcgtagtgtcggaggtgaggatgggatgggagcctggaaatctgggtgaagtagagatcctcctggaagcatcgcgtgacgaggagaccggtcaaaggcgaggaagaagagtctag

SEQ ID NO: 28102 - DNA, 2796 bp, Zea Mays
ctttcttcatccctgtcttgctggttgatttctattctggcacacgcccgacgcagcggcaagcagaggtagcaaagaggaggatcagatcttgatagctgacgagtggcgaccatgcatctggtggctggggctatcggcaacctggcccccaagctcctccggcttctgcgagacgagtacagcctgcagaagggtgtgaggaagcaagtccagttcctttcagaggagctggagagcatccacgccgccctccgcaaggtggctgctgtgccgccggaccagttggacgagcaggtcaagatctgggcgcgccaggtcagggatgcgtcctacgacatggaggacgccctcgacaccttcctggttcgcgtggagggccgccccgagcccaattgcggccatggcaggctcaagggcgccgcgaagaggatgggcaggctgttcaaaaaggctaatgcccaccgccacgtcgcaagcgtcattgccggcatcaagatgcagctgcaagaggtggccgagcggcgcgcacggtacagagtggacgaggtcgtggcgaccaggcctgctgcagcttcggcgatcgatcctcgtcttgaggccatgtacaaacaggcgacacagcttgttggcgtcgacggggccatgggtgacctggtgctattgctgtccctggaggcagaggaggcctccaactgcaagttgaaggcagtttcgattcttggagttggaggattgggcaagactactcttgccaaagcggtgtacgataacctgaaatcacagtttgattgcggggcttttgtttcggttggtcgaaatcctgacctgaagaaggtctttagggacaagaactccaaaaggttattttacacaagaatatttggtagagacggcaaattccctggcaatcaagttgatgaggtgtctgatagaattgtacagaaatgtggtggtataccattatctatcatcacaatggctagtttattggtggacaagccaagggcagaatggtctgagttatgcagctccactggctttcgcgataaagatattgaacaggtagatagaactatgtggatactgtctcttagctactatgatctgccctgccatctaaggacctgcttactgtatctaagcacttttccagaagattatattattgataagtattctttgatatggaagtggatagctgaagatttcgttcataagaagccaggaacttggttatttgaggttggggaggggtacttcaatgaccttgtcaacagaagcatgatccaagcagtggtgtcaaaacgtgacggcatcatagatggttgtcgtatccatgacatggaaaactttgtcactgtactagacagcgagagtgatgaaggcacatcatcgatgagcagggctcgaagattggcccaccaaaggagctcgatggacgctcattgggacaatcgtcacaagggtatgcagaagatcagatcattcattgcctataggtgccacgatggtaaggagctcccgtttctgagctttaaactcttgcgcgtgctagatttagaggctgtatacatggaaagctggcacaatgctaagcatcttgggaacttacttcatttaaggtacctcaggttaaaaggcacaaatatgcccgagctcccaaaggaaataggagctctgaggtttctgcagacactagacttggtggagaatttcttcaaggaagaactgccatcgaccataggcatgctaacacagctggtatgcctacgtgtttgtgggtggactcaatgggggacgagcgtgccgagtggagtgatcgagaagctaacgtccctagaggagctgcagctgctggtacaatgcgacgtggacgagcttgacgacagcctgtttgatatgaatgaactgggcagcttgagtgaactcagggcgctcacgatcagggccattgagataaaccagagcatgttgtcagatcttctacagtccgtagcgaagctccacaaggtccagagcctaaaactcgagaaccagagccatctttggaacggcctgtacgacgcaacgttcgacgcagcggcgctaccgcgacatctcgagcacctgctcgtgtccgagaactgtttccgtttctctgagctcccctcgtgcatcgacccctcgcgccttatcagactgtcccacttggaactgtacgtgatcgacatggacgagcagggcatgcggacccttggccggttgccagagctccgtcaccttgtgctggcaacggagtccacggtaacagtgactaacattgccaccgatggctgcttccagaagttgaggtcatgcaggttcatgcactcgatggtcctgctcgcgctcaatgccgacgactgcagcgtttccttcaccctatggaacggaagggatgacgtaccgtttggctctagaggggaggaggacgagcgcagaagagcgccgccgccgcccgtcatgccgaccctcgaagagatctcgttccaggtccacgcggagtggtgcctgacgaaacgcgaagacggcagctacggcagcctcggcttggagcacatcgcttcgcttcagagagtcgttgtgaccatcgtctgtgaggggtatgtctttgagctggacctgacggagacggaggcggagctgattcacgcaatcaatgttcatcccaacaaccctactctcacttggacggttcttaacgaaggcatcattagaagctatacgaagatggagtttgaggaggttatattgggtctaggaatcacaaactaa

SEQ ID NO: 28103 - DNA, 2904 bp, Zea Mays
gaaacggctgcttggattccagacccccataggctgccaatgctcatccgtaggttcatctccactttctccgggcaatttgtagctttcttcatccctgtcttgctggttgatttctattctggcacacgcccgacgcagcggcaagcagaggtagcaaagaggaggatcagatcttgatagctgacgagtggcgaccatgcatctggtggctggggctatcggcaacctggcccccaagctcctccggcttctgcgagacgagtacagcctgcagaagggtgtgaggaagcaagtccagttcctttcagaggagctggagagcatccacgccgccctccgcaaggtggctgctgtgccgccggaccagttggacgagcaggtcaagatctgggcgcgccaggtcagggatgcgtcctacgacatggaggacgccctcgacaccttcctggttcgcgtggagggccgccccgagcccaattgcggccatggcaggctcaagggcgccgcgaagaggatgggcaggctgttcaaaaaggctaatgcccaccgccacgtcgcaagcgtcattgccggcatcaagatgcagctgcaagaggtggccgagcggcgcgcacggtacagagtggacgaggtcgtggcgaccaggcctgctgcagcttcggcgatcgatcctcgtcttgaggccatgtacaaacaggcgacacagcttgttggcgtcgacggggccatgggtgacctggtgctattgctgtccctggaggcagaggaggcctccaactgcaagttgaaggcagtttcgattcttggagttggaggattgggcaagactactcttgccaaagcggtgtacgataacctgaaatcacagtttgattgcggggcttttgtttcggttggtcgaaatcctgacctgaagaaggtctttagggacatccttatagatcttgacaagcacaaatacacggccgaggtaaacctgtcgatattcggcgaaacacaactcatcgacgaaatccgagagctcctggagagcaagagatatttcattgttatcgatgacgtatgggaaaaacaaccctgggaaataatacaactggctttggttgagaataatagaggaagtagaataatgtcaactactcgtaactctgaggtcaccagtggtgaggtttacaggccacgaccactttcagacaagaactccaaaaggttattttacacaagaatatttggtagagacggcaaattccctggcaatcaagttgatgaggtgtctgatagaattgtacagaaatgtggtggtataccattatctatcatcacaatggctagtttattggtggacaagccaagggcagaatggtctgagttatgcagctccactggctttcgcgataaagatattgaacagtggatagctgaagatttcgttcataagaagccaggaacttggttatttgaggttggggaggggtacttcaatgaccttgtcaacagaagcatgatccaagcagtggtgtcaaaacgtgacggcatcatagatggttgtcgtatccatgacatggaaaactttgtcactgtactagacagcgagagtgatgaaggcacatcatcgatgagcagggctcgaagattggcccaccaaaggagctcgatggacgctcattgggacaatcgtcacaagggtatgcagaagatcagatcattcattgcctataggtgccacgatggtacctcaggttaaaaggcacaaatatgcccgagctcccaaaggaaataggagctctgaggtttctgcagacactagacttggtggagaatttcttcaaggaagaactgccatcgaccataggcatgctaacacagctggtatgcctacgtgtttgtgggtggactcaatgggggacgagcgtgccgagtggagtgatcgagaagctaacgtccctagaggagctgcagctgctggtacaatgcgacgtggacgagcttgacgacagcctgtttgatatgaatgaactgggcagcttgagtgaactcagggcgctcacgatcagggccattgagataaaccagagcatgttgtcagatcttctacagtccgtagcgaagctccacaaggtccagagcctaaaactcgagaaccagagccatctttggaacggcctgtacgacgcaacgttcgacgcagcggcgctaccgcgacatctcgagcacctgctcgtgtccgagaactgtttccgtttctctgagctcccctcgtgcatcgacccctcgcgccttatcagactgtcccacttggaactgtacgtgatcgacatggacgagcagggcatgcggacccttggccggttgccagagctccgtcaccttgtgctggcaacggagtccacggtaacagtgactaacattgccaccgatggctgcttccagaagttgaggtcatgcaggttcatgcactcgatggtcctgctcgcgctcaatgccgacgactgcagcgtttccttcaccctatggaacggaagggatgacgtaccgtttggctctagaggggaggaggacgagcgcagaagagcgccgccgccgcccgtcatgccgaccctcgaagagatctcgttccaggtccacgcggagtggtgcctgacgaaacgcgaagacggcagctacggcagcctcggcttggagcacatcgcttcgcttcagagagtcgttgtgaccatcgtctgtgaggggtatgtctttgagctggacctgacggagacggaggcggagctgattcacgcaatcaatgttcatcccaacaaccctactctcacttggacggttcttaacgaaggcatcattagaagctatacgaagatggagtttgaggaggttatattgggtctaggaatcacaaactaa

SEQ ID NO: 28104 - DNA, 3679 bp, Zea Mays
gagcctccctgtgcgagcacgaccgctcgattttgttttttgggcccaaatgtgtatttcgggccaattttgtatttcgggcctttactattttcgggccgcccgtttaaagcccggcacgtttagctgaatatgggccgggccgtgggccgaggggtcggcccgtgggccggcacggcacggtccgaatttaatattgggccgggccggcccgaaattaaacgggccaggccttttcgggcttgggccaggccgggccgggtggcccgaatgtacacctatactccggagacgagacgtgtttgttgggccaaaggactgagccatggggttgtccgttgacgttgactcttcgtcattttgtagaccaaacgcatgggagactacgcgtgattgcattttcagaaacggctgcttggattccagacccccataggctgccaatgctcatcccggcaagcagaggtagcaaagaggaggatcagatcttgatagctgacgagtggcgaccatgcatctggtggctggggctatcggcaacctggcccccaagctcctccggcttctgcgagacgagtacagcctgcagaagggtgtgaggaagcaagtccagttcctttcagaggagctggagagcatccacgccgccctccgcaaggtggctgctgtgccgccggaccagttggacgagcaggtcaagatctgggcgcgccaggtcagggatgcgtcctacgacatggaggacgccctcgacaccttcctggttcgcgtggagggccgccccgagcccaattgcggccatggcaggctcaagggcgccgcgaagaggatgggcaggctgttcaaaaaggctaatgcccaccgccacgtcgcaagcgtcattgccggcatcaagatgcagctgcaagaggtggccgagcggcgcgcacggtacagagtggacgaggtcgtggcgaccaggcctgctgcagcttcggcgatcgatcctcgtcttgaggccatgtacaaacaggcgacacagcttgttggcgtcgacggggccatgggtgacctggtgctattgctgtccctggaggcagaggaggcctccaactgcaagttgaaggcagtttcgattcttggagttggaggattgggcaagactactcttgccaaagcggtgtacgataacctgaaatcacagtttgattgcggggcttttgtttcggttggtcgaaatcctgacctgaagaaggtctttagggacatccttatagatcttgacaagcacaaatacacggccgaggtaaacctgtcgatattcggcgaaacacaactcatcgacgaaatccgagagctcctggagagcaagagatatttcattgttatcgatgacgtatgggaaaaacaaccctgggaaataatacaactggctttggttgagaataatagaggaagtagaataatgtcaactactcgtaactctgaggtcaccagtggtgaggtttacaggccacgaccactttcagacaagaactccaaaaggttattttacacaagaatatttggtagagacggcaaattccctggcaatcaagttgatgaggtgtctgatagaattgtacagaaatgtggtggtataccattatctatcatcacaatggctagtttattggtggacaagccaagggcagaatggtctgagttatgcagctccactggctttcgcgataaagatattgaacagtggatagctgaagatttcgttcataagaagccaggaacttggttatttgaggttggggaggggtacttcaatgaccttgtcaacagaagcatgatccaagcagtggtgtcaaaacgtgacggcatcatagatggttgtcgtatccatgacatggaaaactttgtcactgtactagacagcgagagtgatgaaggcacatcatcgatgagcagggctcgaagattggcccaccaaaggagctcgatggacgctcattgggacaatcgtcacaagggtatgcagaagatcagatcattcattgcctataggtgccacgatggtaaggagctcccgtttctgagctttaaactcttgcgcgtgctagatttagaggctgtatacatggaaagctggcacaatgctaagcatcttgggaacttacttcatttaaggtacctcaggttaaaaggcacaaatatgcccgagctcccaaaggaaataggagctctgaggtttctgcagacactagacttggtggagaatttcttcaaggaagaactgccatcgaccataggcatgctaacacagctggtatgcctacgtgtttgtgggtggactcaatgggggacgagcgtgccgagtggagtgatcgagaagctaacgtccctagaggagctgcagctgctggtacaatgcgacgtggacgagcttgacgacagcctgtttgatatgaatgaactgggcagcttgagtgaactcagggcgctcacgatcagggccattgagataaaccagagcatgttgtcagatcttctacagtccgtagcgaagctccacaaggtccagagcctaaaactcgagaaccagagccatctttggaacggcctgtacgacgcaacgttcgacgcagcggcgctaccgcgacatctcgagcacctgctcgtgtccgagaactgtttccgtttctctgagctcccctcgtgcatcgacccctcgcgccttatcagactgtcccacttggaactgtacgtgatcgacatggacgagcagggcatgcggacccttggccggttgccagagctccgtcaccttgtgctggcaacggagtccacggtaacagtgactaacattgccaccgatggctgcttccagaagttgaggtcatgcaggttcatgcactcgatggtcctgctcgcgctcaatgccgacgactgcagcgtttccttcaccctatggaacggaagggatgacgtaccgtttggctctagaggggaggaggacgagcgcagaagagcgccgccgccgcccgtcatgccgaccctcgaagagatctcgttccaggtccacgcggagtggtgcctgacgaaacgcgaagacggcagctacggcagcctcggcttggagcacatcgcttcgcttcagagagtcgttgtgaccatcgtctgtgaggggtatgtctttgagctggacctgacggagacggaggcggagctgattcacgcaatcaatgttcatcccaacaaccctactctcacttggacggttcttaacgaaggcatcattagaagctatacgttgggcgatactgatgatgatttagccatagaagagcaagaaagcaaggcccctttctccagtccatgatgatatatatgtcaccacgtcaagaagcttttgtgcaagatacccagacagacacccagagctagctagcgactgaatgcgcacagtgctgtcttttcacactcttctgcattttttttattattttttggtgttacagaagtgtatttttctgctcccaattcttccgttggctcggcactctgttcacatgcctgactataagcccttgggcgcgcttgacctagtttgcaagtgtttttgataatagtagatgtgtttattgtaataaattgtattattaacttgcactcaaaataatagaaacgtcatttgtctttgaattattta

SEQ ID NO: 28105 - DNA, 2784 bp, Zea Mays
ccacactgctggcgctgcccgcctcccccctccagtccactctccactcccacactccgttaccaagctgcccgccacgcccccctcccctactcctccgccgccgcctcacagccgcagcagctagggttagggttcgttccgccgcggctgccgtcttccccagggcaggctactcccgccgggcccctcccctcccattgcattccccagttcccctgcaacccccccattaccctttctcccacccattccttccttccgcccctctccaggccgcccggactggtcgcgttgcaagggcatatcaatatgatcacatcaactactttgcaagtccttaacctgtcctcgaatgccctttttggggatcttccattgcttgctgggagctgcactgtgttagatctttcaaacaacaagttcagaggaaatctatcagttattgccaaatgggccagcgatttggaatatgttgaccttagtcagaacaacctaaccggtccagttcctgatgcgagctcacagttccttcgcctaaactacctaaacctttcccgcaactctctatccgagaccatccctgaagctattgctcagtaccccaaacttaccgtgcttgatctgagctccaatcagttacgtggtcctatgcctgctaatttgctaacttcgtccatgctgcaagaactctacatccgagataacatgctttttggtggcctatcctttcctggttcctcatccaaaaatttgagtctccaggtgcttgatatctctgggaatcgcttcaatggaagcctccctgatgatattgcctccttatctggcctccgagttctcgacatctcaacaaacaatttctctggcccactacctgctgctgtgagtaagcttggagctctcactgatattgatatatcaacgaatcagttcacggggccattgcctgaggatcttccggataacctccaatccttcaatgcatcctataacgacctttccggtgtcgtgccagagaacctgaggaagtttccagaatcttctttccatcctgggaactcaaagttagaatatcctgctagctcgtctggatctggcagttccccatctgggtcagcaggtggaaaatcactcagtacaggtgctaaagcagcaatcgtagcagctagcattgttcttcttgtcatcctcatacttattgccattgtatgccactacaagaggatctcacggcagttttctagctctgaaaaggtttcagacaagagcctccacaggaccactaaagacagtgctgtcatgcaaggaaaggacaacaaaggtggtttggtgtcagcagatgagcttgccactcctcgaaaagggtctacatctgaagcactcagccaggaagagaagtcagccgcggggggcttctcgccgtccaagggcagccggttctcgtggtcaccggactctggagaggcatatgggcaggaagggctggcgcggctggacgtgaggtcgcctgacaggctagcgggggagctgcatttcctggacgagacgatcacgctgacgccagaggagctttcgagggcgccggctgaagtcctaggcaggagcagccacgggacttcgtaccgggcgacactggagaatggcgtgttcctgaccgtgaagtggctgagggaaggcgtcgcgaggcccaagaaggagttcgcgaaggaggccaagaagttcgcaaacatccggcatccgaacgtggttggcttgcgtgggtactactggggcccgaccccgcatgagaagctcatcttgtcggattacgtcgctccggggagtcttgcaagcttcttatacggtaatgccatcatcatcttcttcttctactactactgctgattagttgtttctgcagatgccttgatgtcactagcggttctgattgtgcagatcgaccaggaagaagaggtcctccactgacctgggcgcagcggctgaagatcgcggtggacgtggcgcgcggcctcaactacctccacttcgaccgcgcgatgccccacgggaacctcaaggccaccaacgtcctgctggacgggctggacctgaacgcccgcgtggccgactactgcctgcaccgcctgatgacgcagtcgggcgtggcggagcagatcctggacctaggcgtgctgggctaccgcgccccggagctggccgcgtccaagaagccggcgccctcgttcaaggccgacgtgtacgccttcggcgtcgcgctgctggagctcctgacgggccggtgcgccggggacgtcgtctcggggcccgagggcgccgcaggcgtcgacctcaccgactgggtccggctgcgcgtggcggaagggcgggggtccgactgcttcgacgccgccatggcctcggactctgagagcaacccgcaggctgtgaagggcatgaaggaggccctgggcattgcgctgcggtgcatcaggccggtctccgagaggccggggatcaaatctgtgtacgaggatctttcgtcgatctagctagtcggtagcgctagcctcgtcgcgtaggcgtagcttttagattaacactgcgtgttaaaattgtgtgcgtgttcgtcttgaactcgtagaactgcgtagcgaatccaagtgttattatggcctcaccttgatgccagcaatttgaaatgaagaatgtgttgcattgttctttttgtttttttggtaattaaggccggcatccacaagtgaacgagagtataacacactcaatagcgtatgatgatgatcc

SEQ ID NO: 28106 - DNA, 4275 bp, Zea Mays
gttatacacttctactgtaggtgcagtacactgtactgtactctagctctactgtacaaaaaactacacaccacgccacgctctgtatccgtattttctccactcgcgaaattacaacttctccggaggaccacgtcgcaaaaaatgggaaaccaaaaagccaacggagggcgacagagaaaagacacgcccatcccatcccatcccatccatccccacactgctggcgctgcccgcctcccccctccagtccactctccactcccacactccgttaccaagctgcccgccacgcccccctcccctactcctccgccgccgcctcacagccgcagcagctagggttagggttcgttccgccgcggctgccgtcttccccagggcaggctactcccgccgggcccctcccctcccattgcattccccagttcccctgcaacccccccattaccctttctcccacccattccttccttccgcccctctccaggccgcccggactggtcgcgttgcaaggtttgtttgaaggaatctggacgggtttatgtcgatactaggtgctgctgctgctgctgcagagatcaggtgaaagggacaagtgttgtggctgcgcaattagtacccagagtgtgcacagccataccacctcgctgatagctactacccgcctgtgcgcacgctgcctccaatctcctccaagaaatgcgtcctcgtccttgaatcctactaaccatcaaactcccagctcccctcccagaccagtccgtggaggaaagtgagcgatggggcttcgcgcgggtttcctcctcctgccgccgccgccgctcctcctcctcctcctcctcctcctgctgctcatttcccctgcgcgtgggcagctgccctcgcaggacatcctggcgctgctggccttcaagaagggcatcacgcacgacccggcgggctacgtcaccgactcctggaacgaggagtccatcgacttcaacgggtgcccggcgtcctggaacggcgtcgtgtgcaacggcgccagcgtggccggggtcgtgctggacggccacggcatctcgggcgtcgccgacctctccgtgttcgccaacctcaccatgctcgtcaagctctctctggccggcaacaacctctcgggcggcctccccggcaacgtggccagcctcaagagcctcaagttcatggacgtctcccgcaaccgcttctcggggccggtgccggacggcatcggcaacctccggagcctgcagaacctgtcgctcgccgggaacaacttctcgggcccgctgccggagtccgtcggcgggctcatgtcgctccagtcgctcgacgtgagcggcaattctctgtctggcccgctgcctgcagggctgaaggggatgaagagcttggtcgcgctgaacgcgtcctacaatgccttcacgaagggcatcccttctgggcttgggctcctcgtgaacctgcagtccttggatctgagctggaaccagttggatggtggtgttgattggaagttcttgatcgagtccgctgtcgctcatgttgacttcagcgggaacctgctcaccagtaccacgcccaaagagctcaagtttctggccgacatttcagagacggttctgtatctcaacctgagcaacaataagctgactgggtcattgatagacggtgtcgagctctctactttcgggaggctcaaggtgcttgatctcagcaataatcagctatctggtgacctcccagggttcaattatgtttacgatcttgaagttttgcgactcgcaaacaatgcattcactggatttgtgcctagtgggcttctcaagggtgattctctggtcctaagcgagctggacctaagcgctaataacctgacagggcatatcaatatgatcacatcaactactttgcaagtccttaacctgtcctcgaatgccctttttggggatcttccattgcttgctgggagctgcactgtgttagatctttcaaacaacaagttcagaggaaatctatcagttattgccaaatgggccagcgatttggaatatgttgaccttagtcagaacaacctaaccggtccagttcctgatgcgagctcacagttccttcgcctaaactacctaaacctttcccgcaactctctatccgagaccatccctgaagctattgctcagtaccccaaacttaccgtgcttgatctgagctccaatcagttacgtggtcctatgcctgctaatttgctaacttcgtccatgctgcaagaactctacatccgagataacatgctttttggtggcctatcctttcctggttcctcatccaaaaatttgagtctccaggtgcttgatatctctgggaatcgcttcaatggaagcctccctgatgatattgcctccttatctggcctccgagttctcgacatctcaacaaacaatttctctggcccactacctgctgctgtgagtaagcttggagctctcactgatattgatatatcaacgaatcagttcacggggccattgcctgaggatcttccggataacctccaatccttcaatgcatcctataacgacctttccggtgtcgtgccagagaacctgaggaagtttccagaatcttctttccatcctgggaactcaaagttagaatatcctgctagctcgtctggatctggcagttccccatctgggtcagcaggtggaaaatcactcagtacaggtgctaaagcagcaatcgtagcagctagcattgttcttcttgtcatcctcatacttattgccattgtatgccactacaagaggatctcacggcagttttctagctctgaaaaggtttcagacaagagcctccacaggaccactaaagacagtgctgtcatgcaaggaaaggacaacaaaggtggtttggtgtcagcagatgagcttgccactcctcgaaaagggtctacatctgaagcactcagccaggaagagaagtcagccgcggggggcttctcgccgtccaagggcagccggttctcgtggtcaccggactctggagaggcatatgggcaggaagggctggcgcggctggacgtgaggtcgcctgacaggctagcgggggagctgcatttcctggacgagacgatcacgctgacgccagaggagctttcgagggcgccggctgaagtcctaggcaggagcagccacgggacttcgtaccgggcgacactggagaatggcgtgttcctgaccgtgaagtggctgagggaaggcgtcgcgaggcccaagaaggagttcgcgaaggaggccaagaagttcgcaaacatccggcatccgaacgtggttggcttgcgtgggtactactggggcccgaccccgcatgagaagctcatcttgtcggattacgtcgctccggggagtcttgcaagcttcttatacgatcgaccaggaagaagaggtcctccactgacctgggcgcagcggctgaagatcgcggtggacgtggcgcgcggcctcaactacctccacttcgaccgcgcgatgccccacgggaacctcaaggccaccaacgtcctgctggacgggctggacctgaacgcccgcgtggccgactactgcctgcaccgcctgatgacgcagtcgggcgtggcggagcagatcctggacctaggcgtgctgggctaccgcgccccggagctggccgcgtccaagaagccggcgccctcgttcaaggccgacgtgtacgccttcggcgtcgcgctgctggagctcctgacgggccggtgcgccggggacgtcgtctcggggcccgagggcgccgcaggcgtcgacctcaccgactgggtccggctgcgcgtggcggaagggcgggggtccgactgcttcgacgccgccatggcctcggactctgagagcaacccgcaggctgtgaagggcatgaaggaggccctgggcattgcgctgcggtgcatcaggccggtctccgagaggccggggatcaaatctgtgtacgaggatctttcgtcgatctagctagtcggtagcgctagcctcgtcgcgtaggcgtagcttttagattaacactgcgtgttaaaattgtgtgcgtgttcgtcttgaactcgtagaactgcgtagcgaatccaagtgttattatggcctcaccttgatgccagcaatttgaaatgaagaatgtgttgcattgttctttttgtttttttggtaattaaggccggcatccacaagtgaacgagagtataacacactcaatagcgtatgatgatgatcc

SEQ ID NO: 28107 - DNA, 442 bp, Zea Mays
actccttttgcagggccttattcttagcaacgccctcagggcgcaaaaaagcgctgaagacgagggatgtaccatgaccttgaataaccttcgttccgaagtaattgagctaaggaacgaaggtcttgaaaaagacaaaatattaaactcattgataaacaagataaaagaagacgaggctacttcaaaaacccaagccgaagcccagaaatgcgaaattgaagatcttcggagacagctgacagaagcaaaattaaaatgtgcaattgccgaagctgaccgagacgccggtgattactggaaaaatcattgggagaaaacaactgcagaacttcggtcttcaaaagaaagatgttatgaaaaatccatagaatgtgtgggaaaaattaagactagtttcgccagcgtcggcgcatattcgaatgaggacaactttgtacta

SEQ ID NO: 28108 - DNA, 544 bp, Zea Mays
ctcctctcgtgcagccaacccacccttgaaggcgccagaatcctccctgctcgtttctccttcccctgctccggtgggtaggtccaaggcccggagatggtgtgactctagccccacgcctgtattcagtgctagtgcaaccagagcgtactcctaacgtgaagcactctcttcctcataggctactggcaacggcgatggctggcaggtgtacgagagccgccggtcccgccgccagagtttctgtccctcaacatggcctcaccatctagtccccatcgatcccaagtggaggtggttcaactgcatgtcagcatctaaccgtgctactagctaccgcccctgcacccgctatttccgttgccgggcccctggccactgcatagcaaactgcccaagtaaagttgttccagggcacagattggtgttgaaagggaaatgtgcccttgggccatttctaagtattttggtgattgagtgccaactcaagtgcttaaatgtgaatttatgcaatggatgaataaagtgcaaatctagagcaaag

SEQ ID NO: 28109 - DNA, 529 bp, Zea Mays
ctgctacatatggatctcttcggacccgtcgcctatctaagcatagggggaagtaagtatggtttagttattgttgatgacttttcccgcttcacttggatgttcttcttgcaggataagtctgaaacccaagggaccctcaagcgcttcctcaggagagctcaaaatgagtttgagctcaaggtaaagaagataaggagcgacaatgggtccgagttcaagaaccttcaagtagaagagttccttgaagaagaagggatcaagcacgagttctccgctccctacacaccacagcaaaatggtgtggtagagaggaagaacaggacgctcatcgatatggcgaggacgatgctaggagagttcaagacccccgagtgcttttggacggaagccgtgaacacggcttgccacgccatcaacagggtctaccttcatcgactactaaagaagacgtcgtatgagctactaaccggtaacaaacccaatgtatcttactttcgtgtatttgggagcaagtgctacattctag

SEQ ID NO: 28110 - DNA, 679 bp, Zea Mays
cgagagagtgattacaagtaagcgtgaacagtacagtgctattgtttatctatttataggcacgggacacagcccgagtaaaattacatttatgtcccttacattcatctataatcataacacgaatcattaaggattgagtagtctttgtccctttttggtcatcatcatacttggtcttcgtcatcacatcaagtcgaagctcttcggctatagcttcgtcgtcaattcttatcaccttcgggctacatcttcaccctgttatgagagaagtccttcatcccgaagccgaaacccctgtaataatccatatcatactaaaaacatatgatcagtcacgtttttgaggaccttcggaagaggaaggccccaacaagggtgttacagtataagatatgcatatgtatatgtaacaagttaacgggttgatctttaagtcatgggcaaagtcgacggacatttaccttcgcaggcaaccacatcacttactatgtgtttggttcggtgtcaacgagggatggaacgggatcaacctctggcctgaccccgtcccttaatttttgagggatgatctaatccaccaattttgaagaatattctttgaccctactctggaccttcaaaccaaacacgggtcaagttagaatgatctcatctcatccctcctcatccttcctcg

SEQ ID NO: 28111 - DNA, 373 bp, Zea Mays
ctccttttcactagaaatcttttcaaattatcactgctacatacaatatgggctaacaatacttgtaatagtagatgcccttcgggcaccctataatgacttgaaggcaaaaacttttgtcctcgctagatagtcatagcctcataggtataaatattaactactaatactaagatttaaccaaaaacattagttcttaaagccattgtcatcaacctaaatcaaacaaaagttaatagatttaacaaaaaattggtatggaagcttgctacgatgtatcttcaatgttatttttgaactataaaagtgagacatgtaatgtatttgaaccatgaaaccgtgtcatgtgatgcatttgaaccactaattaaat

SEQ ID NO: 28112 - DNA, 621 bp, Zea Mays
tatggcacactggagttgtgcaccatgtacgacacaacaactacgacaaggcttgagtagttggacttctgctgggtgggacccactgtctagggttgcaactctctcatcctttgtgctataaagggaaagtgtagagcaacatagaaacgggtcacgtggttggggtcggtcactaggatgactgaagttgcaagggttcttgatactgctcccaccagcagtgggctgcatcgcgcaactatggttgctagggctgtgtcaagctgctgccacctgcattcagatcctggcacctgagttcctagtctctaggttctagttccactcgctaggtcagtcattatttgactatataagctccgtccacacttgtatgtaaacatacaccaaggatgtagtgtattacgcttaggcggtccgatcctctctacattgtgcatactatcgtgttaaagctctattgaggtctcaggcctatgccccccaatgatttctccggtacccttagtaccgtggtgtcacattccgtcgacaatgagtgagaattacattttttttgttgtacaagaataatgtggatactgcatatgcagaaataatgtgaagtttggaatttgg

SEQ ID NO: 28113 - DNA, 787 bp, Zea Mays
atttttttgagcgggtcagatcgggttggtctgagtcaggtagtccatgattaggtctaatcgcggggatcgcggggcttgtatgcggagaaagatgaaatgatctgtacgatttaaattttaggaagtgatagatttcccgtcgcaatgactagacatattcaacattcatgttgatttgaattattttcgcataagcgattctcatttgcggcctgcagctaaaacaaaccctttaaaccccatggcatcgccaagaaagatgccacggtgatgactgatgaatccgtttatgaatccgtttaaggccatgttcgtctgatcttaaaactatagggactgagggggattggagatgattttgacttgtagggaatttaatcccccttcaatctctatggatgagtatggatgagcacaaaatgaacagggcctaaagcttgctcaaagttgcatatggctgtcagtgggatcgagaaaaattcactcgtctgacataatatccatgtctacatgtagtttgatgtacatagcaggctctttatggaataggtgtgttttggagaagatgcttatgcagtttttcgattgaggaagaaactgtatgtcctaaccatggcggtgcacttcactacttagactatggctgttggaaaacgttgtcagtgtagtctgatgtttaacttcactacttcactacttagactatggcatcttctcatggtaatgtttttatcccttgctgttacgttttcatggaaaatgtttcaatttagctgttaaaaat

SEQ ID NO: 28114 - DNA, 147 bp, Zea Mays
aagcgtttgtccacggaggagcaggccgaacggcgccgtcttgggctttgctacaattgcgaccagccgtacacacgaggccacaactgggtctgccgccagatcttctacatcgacgacattgagatagctgaggaggtggcgact

SEQ ID NO: 28115 - DNA, 483 bp, Zea Mays
gacaatgctccgccatgatcaagcaaggtatcgtagggcacagtgactccgcgttctcctctccggtcctcctcgtcaggaagcaggatggatcgtggcgcttctgcgttgcctaccgcgccctcaacacgctcacgatcaaggacacttttccaatcctagttgtcaacgagctgttggatgagctccatggcgccaaattcttcaccaagctcaatttgcgcttggggtaccatcaggtgcgcatgaggcaggcagacatccacaaggcgacattccgtacccacaacggcctatatgagttcctagtgatgtcgttcgggctgtgcaacgcctcggccacgttttaggcactcatgaaagatgtaatgcacccctttcttcgccgctttgtacttgtcttcttcgacgatatcttgatctacaacaagtcttgggcagatcatctttgtcatctctgcgccatactcagcatgcttcaac

SEQ ID NO: 28116 - DNA, 1035 bp, Zea Mays
caccaatccacaaatttgagagagtgatttggggatctggagcctcccatcacttgtcggttcccacctcttgtattcttcatcttcataatggagttcttgctcgtcttcgtccgtaggttttctctcggcatggagtttaccacgtaaatctctatttcttcacttgcttgggtattttgcttgtcgtatgtgctgattgttcaacatattgcttgttgttggagatatccccaagtttattggtaaatggacatattgacataagaggcgtatttgtgttctttggtacattggtgaactattgatggggttgaaattgtggtgagctgattgttgtgcataaagtgttgttgtaccactggacatcacgtggttgcttgatttgaagcttaggtgtttcttttggttcacgcccacaaggtgttcagtgatttgcttgtgacagcttagcttgctgctttagggcccgcttccgctgcgtgccgaccctcacagtggtgctatcaccaaggagacaaagatcagcggcaagccagatgattcggtcctcgaaatcttttgtgttagcacaacaagatgcaaactcgtggtggacgtgatgcgtgttagcctagcggatttgctggaccgaaacatggatctgcttaatcaccacccacgtcgttgtcgccattcttctctcccgaagatcggctagcatgtcagcgcgtgaagcgtaggatcacggtgagcagcaagcgatcatggtgacagatgttctcaacgtgtttcacaggcttgatgatgtatcaccatcctttcgcctctatgttcacctacattaacatcgcttgctcctggtagttggtatgcatgagcttgttgtgtcgtctgcgcgatgctagcgagggcgaggcatgatggccttgtcgcctccataactaccgcttagcagagcatagtgacgcatctaataacatgtcagccccaacttcgctgatcgcctcctacttcacttgaggttcttgtgtgtttgcctttaggctggctaat

SEQ ID NO: 28117 - DNA, 128 bp, Zea Mays
tttggccggtggtgactggcgagcacgccattttgaattggccgcaaagctaaggggatggagcggattttaaaggacgaaaggacagccgactcagatgtcacgtttcacccaatgacgtgtttgca

SEQ ID NO: 28118 - DNA, 272 bp, Zea Mays
ccacaagcttgtaaaaggtaaatgttactatagcagtgatcgacataccacgaatgcccaacaacaatttgttgaatgactcgaccatgttactacactggaacccatatctccatccacctaagtcgtgagttctcgtctacttctccaaatccgacataaatccagtcaaccaatctctgccttcggcatttattgcgactttgagcttttctaacttttctctaaagaacttgtcttccagctggcgacatgtctcctggaaaagctca

SEQ ID NO: 28119 - DNA, 277 bp, Zea Mays
ccattccgcgcgaagaaaaaggccttggcctgaaacgcgatttccgcactcagttctcgctggtctcacactgcaccgcacgcccgcactccattccgtccggctccggcccaaacgcctgcgtttcaggtccactccactctcagttattaataagcagcaacgcaggcagcatgatatttgtttacgatacaaaaggcaacccaagaatccagcctataccgcggctgcatcgcagtagcacgctgcgctagtcctagctgctagccaaaaaaaa

SEQ ID NO: 28120 - DNA, 400 bp, Zea Mays
aaaaaatttaggggtaacggttgcggatagcctcaggtcttggagagttgaagtccagagtccagacccctgatgccaacaccccttgctgcccatctcttctacgaccattcattcaactggcgtacccaactgctgcggtgtcgcacaacaacataaaaagcttggacaaccactagctcttgccgaaaatcaagccggtgccagtctactctcgccttcttgtcttggaaaagaggctctttggaggctagcggaggcatcacgagcctgcaacgcaaggtggactttgagcgttgagcccccgctcctgcctctcatctcattcgtccccgtgccagattcatgcaccaaccttccgagagccagccactcggagaaaaaaaataacatatcggcg

SEQ ID NO: 28121 - DNA, 377 bp, Zea Mays
cttttggtggggtttcattctgcgtgcgtgttcactgcgacggaagcccacagggggtctcatatgggcataacgtagaaagattggtccagcccacagggggggatgtcggacgacgatggcagcatggtggatgccgaccggtttttttttttttttttgtgctggccccagtctagattcagggagttttgtgtgcggacactcgacgacagatcaataaatttttacagcggaaactgttacagatatttaaattgcttgggggtaatatctcgttattcaattatcccgtacaaataactatgacaataatcaggggtgctttctcattacagataacaacggatatgatagagacacttataaaagctctt

SEQ ID NO: 28122 - DNA, 272 bp, Zea Mays
gtgttatatgcaaagggagcattgctcaatccaggcccaaagaaatgtaggaaggtctgattttatttttagataacaataaacctataatttcagatgatatgcgattatattttataataaatctatcttatgtctccttttttagatgaattagatcctttattctttatttttctttttattaggctttggtaacgagagtcatatactcatatcgatgcctttatcgattgatccacagatacacaaaagatggaaataagaaaaat

SEQ ID NO: 28123 - DNA, 501 bp, Zea Mays
caaaggttagagggagtaatttgaaattttctcctaaaaggaaatgcctctaaaaagagatccaagtggaagatataactatggccaaagtgatgtcctaattaatgttgcaaatgtgccacacaggaagcgacttgatgggcggcaaaactgattgtattaagaaggcagtgcaaaaaaaaaacaaaaacaaaaaaaaaactgtagaaagttaccaacggcttgttcgaatcccctccccctctaaacttatagagctctaactctctaaagttagatctaaactttagcccacctcacattatagctttaaagcttaaaactgagttaaagtgctctaaaacttttagagctctaaagtttagaggagcagatccaaacaaacttttagtatcatgtgcaaattatatataaggttcaaaactgtatgcaggcgtgatttctagaatagctaaaagcgtgtatcagcaagttttttgtgcgccttgtgatcgagttttc

SEQ ID NO: 28124 - DNA, 556 bp, Zea Mays
gtgacttggggctgtgcctgttcggtccggctgcccccgatcaccaccacaccaacccttcaaagcacgcgcgccgcacgacagtaaccgccggtcctcgagttctacacggcagtcagactcatgtaggaggagtactagtccagtcaatgatttcatttctacgggttttttttttttttttttggtttggaatccaagcctatcatgcgtcatgcgtgagggcacggttgtagattcggcggtgactgatctatatccgagttcggatatttagtgtttgatctatatccgagtacttaaaatttaataaataagatgtcgataactatttaaatcctttctgatacgtttgaataatatctatattcgatccgaatttaaataaaaataataaaaataaatatggtatcaacgatatatatccatattcgaccaattgcatcgtagttcgacgcagcagaaagatggcaaatgaactagctaggcgcctttcttttcaaatccatcgttcacacagtccaaacgtgaacagtcaattcccaatcatgtgcaa

SEQ ID NO: 28125 - DNA, 3093 bp, Zea Mays
gcataggctagataatttttagagaaaataggcaaatggtgaaatttgcattttggtttacactaggggatttcatgagtgatttgagttttgaatactccccctaagtgcagtacctcatgcatatttcaagaaccaacaattgcatgaaaataagaatttaagtgcttaaaagcttaaaaactaaaacttgtcaagtttgacccgagttaagatttttcactcgctttattggcggttatctcaactaggttagacaagccctagatgcaatacaaggaatttaaatatgcaatgcaagcttgacaacaccatttgacatttcacataaaatttctgagatcaagaatatttagttcattcctcaacatgcaaaagcgggtcttatcaagtggcttagtgaaaatatccgctaattgatcttccgacctcactctttctaaaatgatatctcctttagcaacatgatctctaaggaagtgatgacggatatcaatgtgcttggtgcgagagtgttgtacaggattattagcaattttaacagcactctcattatcacacaacaaaggtactttttctaggactacgccatagtctagaagagtttgtttcatatataaaatctgtgtgcaacaagcacctgcgcaatgtattccgcttcggcagttgacaaggcaacactattttgctttttggatgtccatgaaactagtgatctaccaagcagatggcatcccccagaagtacttttcctatcaatcttgcaaccggcataatccgaatcggaatagccaattagatcaaaagtagctcctttgggataccacagaccaacgcttgtggtgtgcttgagatacctaagaattctcttaacagcgcgaagatgagctttcttaggattagattgaaatctagcacacatgcagacactaaacataatatcgtgcctagatgcggtaaggtataataaactaacaatcatagaacggtagagagtttgattaaccgggttacctctctcatctaagtcgagatgtccatttgtaggcatgggggtcttgattggtttgcacttctccatgttgaatcttttcaacaagtctttggtatacttctcttgtgagagaaagttaccatctttcatttgcttgacttgaaagccgaggaagtatgttagctcaccaatcattgacatctcgaactccttcgacatcaactcaccaaattccttgcaatgacagtcatttgtcgagccaaagattatatcatcaacatatacttgacaaatgaaaatatcaccgttatgtttctttgtgaagagagttgtgtcgacggtcccgattttgaagcccttttcgatgaggaagtcgcgaagacgctcgtaccaagcccttggagcttgctttagcccataaagcgccttggacaacctgtaagcatggttaggatatctagggtcttcaaatccaggcggttgctcaaatatacaagttcatttatgaagccatttaaaaatgcactttttacatccatttgataaagttttatatcataacatgatgcatatgcaagtaggatacggatggcttccagtcgagcaaccggtgcaaaggtctctccaaaatctaagccttcaacttgagagaatccctttgcgacaagtcttgccttgtttcttacaatcacaccttgatcatcttgtttgtttctgaacacccactttgttccaatgattcttgcatcttgtgggggcttctccagggtccaaacttcgttacgggtgaagttgttaagttcttcatacatggcattcacccagtccggatcctgtagcgcctcatctatacaagtaggctcaacacaagaaacaaaagagtgatgttcaataaaattagcatgtctatgtgatcgagtaataaccccttgtgaaggactcccgatgatttggttttgaggatgagcttgaagtagtgatgagtttctcctgtcaaccacttgggaagaagatcctggagcatcaacatctccggcttgtacccttgcttgttcatgagagacaaatgtatcttcatttgcatgcctctcatctttttcatcttgtggtacatttgatgaagaaggcctgtcaatgacttgcacctcttctttatcttcttttggtttgatagctccaataggcatgttcttcattgcttccctaagtggctcatcacctacatcatcaagattttcaagtgctccttgggagccattagtctcatcaaattccacatcatatgtttcttctaccatgccagtggcatggttgaatactcgatatgctttggactttaatgaataacccaaaagaaaaccaatatcacaacgtctttgaaacttccctagatgatggcgttttttgtagatgtagcatttgcacccaaacacccggaagaaagagacgtctggctttttcccatttagcagttcataaggagtcttcgcaagtagccggtgaggaaatagcctgtttgatgcatagcaagcagtgttgacagcttcagcccaaaacctctccggtgtgttatactcatcaatcattgttcttgcaagagtgatcaaggtcctatttttcctttcaacaactccattttgttgaggtgtatatgtggcagatacttcatgcttgatcccaatttcatcacagtactcatgaatgttggtgttgtcaaattctttgccattgtcacttctgatcttcttaatcttgcaatcaaattcattttgtgctttcttggcaaacttcttgaatatagatgcaacttcagatttgtcatggagaaagaacacccaagtgtatcttgagaagtcatcaacaatcactagacagtagaggttgccaccggcactgacataatttgtaggtccaaataaatccatatgaagtagttccagtggccttaatgttgacatgaaagctttagtgggatgtgtattagcaacttgctttccagcttgacatgcactgcatggcttgtttttttcaaacaccacatcctttaatcctctaaccatatctttctttaataccttcttgagtgtgctcattccaac

SEQ ID NO: 28126 - DNA, 1263 bp, Zea Mays
tgctacatcaagcttaacaacagggttaatagcctcatgtgttttgcaagataaaagttcattttcaacaagaaaattgtcatgatcaaatttaatttgagtatagtcttccttgatcttaactagtctattttgcaactccctattagcttcatttaatttgtcatatttttccttagcatcttttagggagtttgtgagctcatttacagttgatgacatagttttattttcttcttttatttcatcactagcctttataactatgtcatacttggtatttaaagattcattttcatttttcaacctatcacatttagcttttgactttctaatgatttgagtatattctttaagtaagtcagctaactcatcatatgaaggtgaagcaaattcttcatcactatcactatcactagcatcatcaatattaatatcattttgtacctttcgttcacccctagccataaggcacaggtgagaagtggatgatggcgatggtggtggtgaagagaagtccccggcgatggccgcaactttttcatcatcctcttcttcacttgaagaagatccacttgatgattcgacgtcggtgagccagtcgccaacaatataagcctttccattcttctttttgtggaacctcttttgcttcccatcccttcttttgaagaatttcttttctttcttttcatcatcgttgtcatcttctttcttgcccttaaacttgttcttcttgggcttgttgcattgatgagcaagatgaccaagctcaccacagttgtagcagtccatctcagaaatgggctttcttttgttggaaaagaacttcttctttcttgaatcaaatttgatgccttctctatttagcttcttcaacatcttggtggtcttccttaccatcaaggcaatgtttgcatcaaggtcatcatcatttgaggattcttcctcaacttgtatttttgcttttccttttctttcaagatttgctttgagagccaaatcctttcttttggaagatgattcttctttgttgatgtgcatgtacatttcatgggcattgatctttcccaaaatttgtgtaggtgtggtaactgaaagatccatttgatgtagcacagtgacaatgtgtccatatttgtctattgggaggacactgagaatcttcctcacaacatccggttgtgagatttgagtaagccccaatccattgacttcctctgcaagaatattaagtcgtgagtacatagcgtttgcattttc

SEQ ID NO: 28127 - DNA, 1483 bp, Zea Mays
gccatatctctctgtgtatgtatttattcacatttcatatgcttatgactatgtgactaataagtgctcacctcttctgtcatttcagtgaccttgtgtgaccgtgtggcgtctcccgtcctgcctggatcgtcacctctcgtgtgacctttccagactttagttcaggatgccgcgcacgaagaatccgtcggcatcagggggtggcgatgacgaggaccctcgtcgccccttcaggcaggtgaaggggaagactgtctttttggagcagcaggaaggccgcaagaagcggcgttcggacagagaggctcgtgcagcagcagcagctgcagcagccgctgcacaggcatcacttggagatcagccggatgttccttcagatcagattgctttccgtgctcgtcgtctcgcctcccggtctcgctcctccactcacacctccgcttccactccgccacccactctgcctgccccagtccctcctattgctccatccacctccactgccataccccctaccagcactacgccagcttccactgcttcccctgcccccgctcccgcttcagctcctcctgttcctcctccgcgcttccgggagcgtgatgagactgaggtccgtcctctggcttcggatcctcgtctttttgatcttcagcgtgctactgcagcccgggtacgtcggttcaggtacgtacccgtggagtcttggctgccagctcagagagacccagcagcaggagttcttttcagcactcggattcaggagtcattcttcagggctcagatgtctgctcagattgcgctacgagttcaccgcctattggatcttccagccttcttgcttgcagccggtgatgagtctgaggcgcatctcacctatttgccaggccttctgtcctttctgactatcagcggcagatatgttgaggagtgggtccgcgtcttctatgcctctgtttggattgacccggatcatcattggatgaggttccgctttgagcgcgaggatgtcacgatcactgccagtcagatcagacagctttttggattccctgagtcgactactcgcctccacagtgtctgctacggcacttcagatcctccacgtcgccctcacggcggtgtggctccagggacagctcacgtcgcggctctgttccgcccgcctttttcagatgggtcgcgacgttctccagcagacttcactacggcagcgaagtacttgtatgagctcgtcagacggacactcctgcctaggatgggatacagggaggccaccactcatattcagctttggctccttggtgccctggtatcccactctgagtttgatgttgttgactttctgatctgtgagattgaggacactgttctggatgggattcgtgctcgacgacagctgccgtatgctcactacttatgccacatctttgcgcagctgatccagccacctcgttttcagagcacccttgaggctcac

SEQ ID NO: 28128 - DNA, 937 bp, Zea Mays
ggaccctgctctagcttcgattctccagactctcactcagcagcaggctcacctggcagccgagcaggcccgtatatccgagaggatgctctcaatgtttcagaacatgcaggacaggcaggatgccttcagcagcagcttattcaggatagggcagagaatagggcattcatggccctcatgcttcagcattctggtatctcagtacctccagttcagtctgctccgccttcttcgcttcacgctccagtggtgcattcgatcttgtctgcaccccctgctgtcacctctccgctccggcccggtcaccttggcgttcacttctccggttctcagctctatctgcccgcagccgccagtgccaccagcatctgctgttaccactaccgctgtggcagtttctgtgaccgcttctgttccggtagctcctgcagcgctgcctgcgtccgagtcagtaccagctccagcttctaccgcagatcctggatccgagactgactctgaccctccgtcggcgttcgctctgctacctcgacctcgaccggatgcgcccccgccgcctcctcctgcatcagatgtttaggtcccttttggtgtttgacgccaaagggggagagatatgagttgtgagagctagggggagttagagagttagtagagagtcagtgtccttttgatgtaatatttgtgcctgctactctctgtactagctttatgtttttggctcacaaactcgtcatatactctcgtcgcgtatgtttgactgtgtgtactatgttttcaccttatatcatatcaccagtcttctagctcttgtttcattaatttactttctcttttatatgatgtgtatgcgctcactcttattattatggtacacattctttctgtcaaagattactgagtataactaaccattctttctattgacagaatc

SEQ ID NO: 28129 - DNA, 133 bp, Zea Mays
cgccctcgtacctgagacgacggtgcaaccagtccccgacgcgactatgccgctcctcatcgaccaaaaggtactgactgatttccatcttacgtcatttcgactcggcctcaacccgcctagcgaccttgcc

SEQ ID NO: 28130 - DNA, 1320 bp, Zea Mays
ccgaccaccccgaccacgtgccgagcccgggaaagtacccgctcgtcgtcgaccccgtcatcggcgacgtcaggctcaccaaggtcctgatggacgggggcagctgcctcaacatcatctacgccgagactctcaggctcctgcgcgtcgatctgtcctccgtccgagcaggcgctgcgcccttccacgggatcatccctgggaagcgcgtccagcccctcggacgactcgaccttcccgtctgcttcggaacaccctccaacttccgaagggagaccttgacgttcgaggtggtcgggttccgaggaacctaccacgccgtactggggaggccatgctacgcgaagttcatggccatccccaactacacctacctgaagctcaagatgccgggccccaacggggtcatcactgtcggccccacgtacaaacacgcgttcgaatgcgacgtggagtgcgtggagtacgccgcggccctcgccgagtccgaggccctcatcgccgacctggagaacctctccaaagaggtgccagacgtgaagcgtcatgccggcaacttcgagccagcggagacggctaaggccgtccctctcgaccccagtggcgacgcctccaagcaggtccggatcggttccgggctcgaccccaaataggaagcggtgctcgccgactttctccgcgcaaacgccgacgtctttgcgtggagtccctcggacatgcccggcataccaagggatgtcgccgaacacttgctgaatattcgggccggagcccgacccgtcaggcagcctctgcgcctcagtcgtcaaggaagggtcggcctcgcctcggcagagcccgaccctccctcgggggctaaaaagggggaacccctctgcgtcgagattgggtgtacttctccgcatcaaaaatcttcgatcaaaaaggggcttctgcgttctcccggctatgtcagaagcagggtcccgaggaagcgaacgtgggtgcatgtaagtggcgaggccgactgagccgaggaactcctatgcctccgggttagggacacctcactcatcacctgccacgaaaaatgacccaactcgggaagccaccctattattgacaagctgggccggacacgcgaattgaaagaaaagagagtacgacttcatgcaagaaaaacaaagtgttcaggcctcagcggccgcggtaagacgcacattcaacagaaaccgttccaacaaagagttaggcgccgccttgggaaggagccgctccttcagttccgtccccgccgtcggtaaggtccatctcggcttccggcgacggcgcagggggaag

SEQ ID NO: 28131 - DNA, 102 bp, Zea Mays
ccggacatcaaggcgggcccagaagtcagaagctccaacggttggaattcaacggaactggtgacgtggctggggcaccggactgtccggtgtgcaccggac

SEQ ID NO: 28132 - DNA, 400 bp, Zea Mays
caatccgagcaacctctcgcaacggagacactgctcgctgcttgctttctcctctcgcgcgcctgccgcctagccctactacagtcagccgccgcaagcccgcaaccggaaccgccacctcctagcactagccacgcgaccggcgctggcgcgccctcgctgccggctgcgtcccgccaccgccgccggacggtccctggcggcctcgccctcgacgatcgggcctcgcctgctcgaccacgcgtgacgccgccgccgcggatcaccacccaccgtccgccgggctcgcgccccgccttccagaagtccgagcgccgcctctcgcccgtgtccaactccaaagtctgaagttcgatccacatccactgacccgcagaggcgcagactaccggtagtttcg

SEQ ID NO: 28133 - DNA, 304 bp, Zea Mays
ctcggactcagcctgggtataataccatacctcccctcgccccttcgatccgctccatgccagcacctaggaacttgggccggagcttggcgttccgctgttcgcagccgcgaaggagagcttgaagacaccgccgcacccgtatttggtctgtggtgccgttcggctcccctgctatgggcagagcgcatcatttgcgagtgaggaacctggacagggcgactccgggggcggtgaaccggtgagtctcagtgaattgctcgccggcgacacatcgccaccgcgggtatgcgctacaaagtgg

SEQ ID NO: 28134 - DNA, 372 bp, Zea Mays
gactccttgaggagggaatacccttatcttttctcaaatccagtctaaatctcgagggcgagattcctttaagtggggtaggtttgtaacatcccaaaatcccatctaaggtttgaaaccctaacctcctaatcccccttattttacttttctcccttaaccctacccttagaaccccttatcatgtgcatacacttgaaataattagagcacctcacatagactatatttctcactcaagatcacttagaaaatatttttggtctccaaagaaaaaaagaaacaaaaagaaacaaaaatagaaaaaggaaaagaaaggaattagaattagaaaaagaaaaactccccctccctcggctaggtcgaatccgg

SEQ ID NO: 28135 - DNA, 587 bp, Zea Mays
tgaactcactgtgaaaccggaaacctaagccgcaggccacagccgccgcccgccagccgccgcccggagtctcgagtctcgcccagcccagtcgccctctactcctgacgctgccggagtgacggacgagtggacgacgccacgccacgccggcggctggtccctctcgcggtcgcgggtcgtggctcggcgactgtctcagcgccgtcagcgggctcaagttgcaagcagaagcaggccgcgggtcctggctggctggcttgcaagttgcaagcagctttctccacgcgggtcgcgggtgccggctagctcctcgctcctgcggctacggtgcagactgcagacgaccgcgcgggctccagctttgtctccgtccgaccgtcttagttacaatttgcctcctgctatctaatctgcattgtgtgactttcatttgttagaatctaaggatattccttcacttgtcactgatctgaccaatttagaggactttgcaacatatgtaaagcttgcgaatgaagaggtatacatggttcactgcacaaaattacatgacattcagtttattgtttgtttttgttagttac

SEQ ID NO: 28136 - DNA, 574 bp, Zea Mays
gtaaggttaagaaagagcgcactggcactcagtctatacttaagtacaattcagatggttctctgttgcgttgggagtactctagtgaagttgcacgcactgaacttgtccgattaattgctagagaggatcttccattgtcgtttggtgagtctgatgcttttcaggagtacatagctcgtgcccataaccctagatttgttaaatcttctaggcaaacaactgctagagactttgtgaaacactataatgggcgtgtagagaagttaattgaggtctttaaaactggggtatcctctgttgcccttacctctgacatttggtctggaaaggctaaagaggattacatttctgttgttgctcactttgtgaaccctaattgggagttagagaaaaggttgcttggtttaaggccaattgaagacggccatactggtaagaacattgctgaacgtgtttccttggtggtagatgagtatggcttaactgataagatctttgcaattactcttgacaatgcttcatctaacaaaactgccatgtcatatcttatacctttgttctctagttacct

SEQ ID NO: 28137 - DNA, 164 bp, Zea Mays
agcaaaatagtcaatggcttaacgaggtgaacctactcaacggcaactcgtgttttacaaaactcaaggacccactaaggtgaccagatatcaagtcaagttgcgaccaataaacaaataaagatacatgatggtggcatgacgaaggatgatggagaatttac

SEQ ID NO: 28138 - DNA, 420 bp, Zea Mays
tgtggtcgggccaggcggagctggcgccccgcttccgcgcgaaggagaacgcgacggcgaggtcagcgccgcgaacgccgccgacgacggcaggaggttgccgtttggcacagcgagcatcgtcagcgacggcgtgaggttaagtagctaaatccttcttcgcagtggctaataactaaatcaattccatatcagcgtttgtccatcgcctgcgcctccaaaatgtcgaagcccacgcctacgcctctatttcgtcgaaaccaattctgccgtgtttcataatctcaataatctccctagagagagtatcggatatggacacttccgccacattgtactggtgttgcttgagggtgtttcgtttatagggacggaggatctgtttggttcctttagtctagggactaaagtttagttagg

SEQ ID NO: 28139 - DNA, 153 bp, Zea Mays
gggcagcgtgccgggccggagcccggcggcacgggtgactcgttcgcggtctgttttgtttaagggtcacggcaatgatccttccgcaggttcacctacggaaacccttgttacgacttctccttcctctaaatgataaggttcaatggactt

SEQ ID NO: 28140 - DNA, 333 bp, Zea Mays
attcgagctgcgcgattcgttggatcgaggcccaaagtgcttcctcgtaaccgagcccactatgaggcccagtagagtggacaggcggtttcagccaagcccatcggaaacgcggttgcctcgtctcgacgccgcttttattgcagacgagacgaggcgagggaggacgtggctggaggattataaatgctggctgccactgccacgaagacgaaggcagctactaccatcctgtgtgttacaaaacaatgtaatatgatcaagacccatccaaccgtccactctacagttatttgatccaaaggtcagatgctctttgtacacatgtatata

SEQ ID NO: 28141 - DNA, 326 bp, Zea Mays
gtgattttatagacggatacgcacgattcaacaatggggagaagagctatcatggggggattttggattcatggcgaattctagcattttgattcggtctttctgcgtccagcacgaggcttctacgaatttaatgtagtaggattaataattgttgtgaagggagttatcttgttgcaattctacaagccagaaatttggtttgagtctgggatgtctcagcttatctgagaactatcatgattagatactgacccgtgaccaacaagctgggagcaagggacagcatgctatagtcatcctcagttggggttagctgcagtaga

SEQ ID NO: 28142 - DNA, 190 bp, Zea Mays
accaaccccgtgcaacatcagcgcacgaagcatgtggagatcgacctgcacttcgtccgcgagcgtgtcgctgccggtgacgtccgcgttctcagcgtccccaccacgctttagttcgccgatatcttcaccaaggggttaccgtcgagtgtctttttagacttccgatccagtctcaacatctgtacag

SEQ ID NO: 28143 - DNA, 950 bp, Zea Mays
aatcattacgtcttaaaaccaatatctcggtatacaagaaggaggatgttcctcctaaatttgtgaatgggaggccgttcttaacaacggtgcaactttctaagttgtcgactccggagattagaatgcatgagtggtacatggtggctagctgtaacactccaggttccacaaacaacccggtatgctactgtactacacttccgacgtccatatataaaatttcggcagcatcccctttgcaagattgcataaaagagggagcaacggagtataaacatatatcatgactaaaacatactaagtattattactcggctagcaaggaaagataaacatacgacctgaactgaattaaccagtgcgcacgaccatataaaaaaaataaacaaacttccattgacaataagtttctaattaaatcatggttgcgcctgggcagcgttattgtgagagtgaaagtggacgtgctgctactcccctcattcccaacatgtatcaagtacctgcattgagtaatgcaagagtgagatgacacatctcagcaagtaaaataatatcaaacagtttaaccacataagaacattgttttaccaccacttaattccacaaccttcttattacgaaggtgcagcacgtatacaacgtacaacgcacctagttaccacacctcgcaggtagaaaccacaatagtaacatagtaatgtcacacttcatatattcctcatgagtgcaaatgtctgcaaatgcaaggatgacttctgccttcatacctctaaggatatgaagccgcatcgtacccctcctcgggcaacgtacgatgctaaaaatgtaccggtacggtcggaccataagatcacgacataacttcaaaatgcaagatggatgatgcgatgtgcatgtcatgcctacaacacttcatataacatgattcaaaaagacacttcaac

SEQ ID NO: 28144 - DNA, 399 bp, Zea Mays
ccatctcatgaagcattatattcatcatatgcatacacaatgattgctagtagcacttcacatagattatttcattttggacacctaagaaatttagatgaatatttgtttaaaggaaaaagagattaaggaaaaaagagaaaagaaaaaaagaaaaaagaaaacccttccctctcggctaggccgaatccggcccaagcttccccccctctcccgcgcgcccacgctcctccctccctcgcggtccatccccctcgcgccgctctctcccctaacagctcggccccacccgtcagccgcacccgtcctttctccctcgcgaccgccctctctctggcaggcggcccccactcgtcagcctctttctccctcgcccgtgatcggccatcgacgcgttcg

SEQ ID NO: 28145 - DNA, 287 bp, Zea Mays
gtgacacacaggcagcgagtggcccggtggcggcctggcggggcggtaatttttggagttgtttaatgaagcagccggtcacgtttgattcgcgcgcttttttttgtttttttttttttttttgctatgacgtttgaccccagcacgccggccgccgcctagctgctggccgggggtggtcggaggaaagttacagctgccgggcgtttgaccctccggcgttctcttctctggactggacctattgattgttttttttttgtgcgtggcgggggcgtggcggtgag

SEQ ID NO: 28146 - DNA, 408 bp, Zea Mays
ctctgtcatcacagctgctggtttttcttctagtgaacatgatcttgcatttttgttcatgtctccaaaaggccgtactttactactgttatatgtggatgatatgctgattacaggtgacaactcagaacatatttctcatgtcaagcaacatcttagtaaagaatttcagatgtctgatttgggaccgcttagctatttcttaggcattgaagttcagcagactcaaaaaggcttttatctgtctcagtccaaatatatacaagatcttcttgatcgctctggacttactgatacatgcattgttgcaacaccgatggatattcatttaaaacttcgtccgaaggatgggaccccactagcagatccaactcggtatcgtcatattgtgggtagtcttgtttatct

SEQ ID NO: 28147 - DNA, 494 bp, Zea Mays
ttttcccgagagcgacgagttcaccgccgggccagcctgggcaccggacactgtccggtgcgccacaggctggtgctgctttggctaaacttagtcaattcttctccaagtcaatttctttgacttggcaagattcctggcacttagataaatatattagtacccaaaaacaatttactaaggccggatagataccttgttctttgatttgcatctttgcacttatgaaccaacatattttgtgttgggcatctaatcaccaaacatttatagaaatggcctaagggcacatttccctttcagtaacaacgtcaagcccctctacacgctctggccttcttccaccggcgcgtctccacctcccgtcctggtctccaccacttggcatcgtcatcttggccaccctcgtctaccaccgccacgggagcgcccctccctcagcacccatgaatctgggcccgtcgacagagcgcggcccgcttcgcggaccctgc

SEQ ID NO: 28148 - DNA, 772 bp, Zea Mays
ccaccggacgcctccccggtcccctcctccgttcgcatcgccctcggtgacccacacttgcgtcgggctatggaggaggagcacgcagccctcctggccaaccacacctgggacctggtgctgtgtcctccaggcactaacgtggtcaccgacaagtggctctttcgccacaagctaacatcggacggctcacctagcgtcctggagtggactatgacgagaccttcagccctgtcgtcaagttcgccactgttcacaccgtcctctccctcgccctctcccggaactaggcgatccatcagctcgatgtcaagaatgccttcctccatggcaccctgacggagacggtctactgcagccagcccaccggtttcgtcgacgcctctcacccggatctagtctgctggctgaaccgcttcttctacggcctcaagcaggcgccgcgggcctggtacaaccgttctgcctcctacttagcctccataggcttcgttgaggccaagtcggatacgtcactcttcatctatcggcgtggcgaggacatcgtctacctcctcctctacatcgacgacattgtgctcacggcatccgccgccgatcttttacagcgcacgatcatcgccctccagtgggagtttgcgatgaaggacctgaggcccctccaccacttcctcagtattaccgccgaacgccgaccctagggtctcttccttcaccagcgccagtacgctatcgacatcctagagcgagctggcatgttcgactgcaagcc

SEQ ID NO: 28149 - DNA, 1721 bp, Zea Mays
tgtcgacgggcgcaccggacagtccggtgcgccaccggacactgtcccgtgcgccagccacatcacccaaccgttagtgttcgaccgttggagcttctcacagctgggccaccggacagtccggtggtgcgccggacaggtcctgttctctgtctggtgcgccttctggcgcctgctctgactctgcgcgcgcagtccgcactgttcactgttaacttttgcagtcgatcgttggcgctgtagtcgttactcccgctggcacaccggacagtccggtgaattatagcggagagcattttccagaaacccgaaagtggcaagttcggagttgatctccctggtgcaccggacactgttcggtggtgcaccggacactgtccggtggcacaccggacagtccggtgcgccagaccagagcagccttcggttttctttgctcctttcttttgaaccctttctttgaactttgtattggtttgttgtgaacctttggcacttgtagaacatatattatagagcaaactagttagtccaattatttgtgttgggcaattcaaccaccaaaattatttaggaaaaggtttgaccctttcaatctccctctttttggtgattgatgccaacacaaaccaaagcaaatacaaaagtgcagaattaaactagtttgcataaggtaagtgcaaaggttgcttggaatgaaaccaatataattatttctactagatatgcatggattgttttcttcttatttaaaattttggaccacgcttgcaccacaagttttgtttttgcaaattctttggaaagttcttttcaaaaaccttttgcaaatagtcaaaggtatatgaataagattgaaagaagcattttcatgatttgaaattttctccccctgtttcaaatgcttttcttttgacttaaacaaaactccccctcaatgaaattctccccttagtgttcaagagggttttagatactaatttttgaaaggggttataccaatttgaaatatatcaaaaatacgatactaattgaaaaacttttgaaattggtggtggtgcgatcctttttctttgggctaatactctctccccctttggcattaattgccaaaaacggagtccttagagccctttttaaattctctcaccttttggcaaacaatatatgagtgaaagattataccaatgtggagagatggcggaatactgacaaagagtaaataataccgatggagttgagtggaggcgtcgtctttgtcgaatactccatttctttttcaattgtatgactaagcatgagaatacacttgaaaacacattagtcatagacataaaaagagatatgatcaaaggtatatataaatgagctatgtgtgcaaagtatcaatcaaagttccgagaatcgagaatgtttagctcattcctaggtttggtaaaggttttctcatctagtggtttggtaaagatatcggctagttgttctttggtgttaatataggctatctcgatatcccccctttgttggtgatctctcaaatagtgataccgaatggctatgtgcttagtacggctgtgttcaacgggattatctgccatgcggattgcactctcattatcacataggagagggactttgctaaatttgtagccatagtccctgagggtttgcctcattcaaagcaattgcacgcaacaatggcctgcagcaatatactcggc

SEQ ID NO: 28150 - DNA, 1415 bp, Zea Mays
atcctaataaatcaaaagaggatcccttgggtaccaaaggcaaaacttaggagtgtgaactaaatatctcaagattcttttcacgaccctaaggtgaacttccttaggatcggtttggaaccttgcacacatgcatacgaaaagcattatatccggtcgagatgcacataaatagagtagagattctatcatcgaccggtataccttttgatctacggatttacctcccgcgtcgaggtcaagatgcccattggttcccatgggtgtctttatgggcttgacatccttcattccaaacttggtaagtatgtcttgaatgtattttgtttggctgatgaaggtgccctcttggagttgcttgacttgaaatcctagaaaatacttcaactcccctatcatagacatctcgaatttctataccatgatcctactaaactcttcacaagtagatttgttagtagacccaaatatgatatcatcaacataaatttggcatacaaacaaatcttttagcaatagttttattaaagagagtaggatcgacttttctgactttgaagccattagtgataagaaaatctcttaggcattcataacatgatcttggggcttgcttgagcccataaagcgcctttgagagtttgtaaacatgattaaggtactcactatctttaaagccgggaggttgctcaacatagacctcttccttgattggtccattgaggaaggcacttttcacgtgcatttggtaaagcttaaagccatggtaagtagcataggcaagtaatatcgaattgacttaagcatgtaatatggcattttcatttctaagattggaaataacatcattgcaaacatttaaatccttagccttagcaattaatttttcattctcgatcttaaggctagaaagtgattcattcaacttgtcaattttagaaattaaactaccattatcatttttgaggttgacaagagaatcatcacaaacatttaacttctcaaccttagcaattaatttaacattctcatttctaaggttggagattgtgtcatggcaagtgctaagctcactagttaatttttcacatttttcttctttctgagcataagcatttttaaccttaacatgttttttgttttccttgataaggaagtcctcttggctatccaagagttaatctttctcatgaatagcacctatcaattcatttaattttttcttttgttgcatgtttaggttggcaaaaagagcaaacaaattatcttcatcatcactagagttgtcctcatcactagatgtcgcatatttagtagaggctctagattttaccttctttttgccgtcccttgccatgagacacttgtggccgacgttggggaagaaaagacccttcttgacggcgatgttggcg

SEQ ID NO: 28151 - DNA, 707 bp, Zea Mays
tatagtagtggcttgggagttgaagtgccggatttgagcaacctcgtccgaatcataatcttcatcccctacggatggtacctgtgctccaaactaaacaacatcccaaatgctagtgtggagtgaggttagatggtgcctcattttatcactccacatacaataatcttcaccatcaaaaacgggtggtttgcctaatggtacggaaagtaaaggagtgcgtttggaaatgcgaagatagtgtagggggatcttactaaacttcttgcgctcatggcgcttagaagtgacggacggcgcgtcggagccggaggtggagggcgacgaagaatcggtctcgtagtagaccaccttcttcattttcttctttttgtcgccactccggtgcgacttgacgcggggaggtgattctccttttcctttggagccggactcccttgatggagccttctcgtggcttgtggcgggtttctcgccggtcacgacctcattcttggtgtgatctcccgacatcacttcgagcggttaggctctaatgaagtaccgcgctttgataccaattgaaagtcgcctagaggggggtgaataggcggaatctgaaaattataaacttaagcacacactacaagccggggttagcgttaaaattaaaatcgagtccgaaagagaggccgaaaacaaatcacaagcaaatgaagagtgtgaca

SEQ ID NO: 28152 - DNA, 31 bp, Zea Mays
gtcctgcccgccgatccgatgattcatgaat

SEQ ID NO: 28153 - DNA, 187 bp, Zea Mays
tatgcctccaatgacgcggcaagttcgtgccatggaaaggtgaaggtgaagggaccagttgggataaccattctgataaagatgcacacggcgtccagtcctacattcaaccccactgagcaactgaacagagaaaggtcttcaacagtggtagcacctcttgaaaccagaaatccatggagcatcc

SEQ ID NO: 28154 - DNA, 503 bp, Zea Mays
ctactgtttgatgtgttcacagatattcctccgacactgatactggacaaggagacctctgcagtgccaaggttagtggaactacgaagtatccaaaggtgtaatcatgcaatacaaggagccactctgggtaactaaaatggccaatcaccgtacgttgcataaatttgggccagtcgtacatagaacatgcacaatggagtcgcccccccgaatggacagtcatctagatccttgagcccaactgatagacagatgagtgtttatttggatatgctggatacagggcaatcacctctgcactgaacagagaggtcttcgtagttctgttccaatccgatgatctagtgtaatcactttttgcagtcttgtggtttctaacaaaagaaacctatttatcttccccgcatgttaggctcgaatagttagccctcaaacaacacattcagttgcatttcttggtcgccagagaggcttcaggttcttagcaaaaggagagatgc

SEQ ID NO: 28155 - DNA, 140 bp, Zea Mays
cttagtttgggtactctaggaatgagacggattgaagtggattgagatgtattggtggagtttttgatctattggggatttaaacactcttcaatccctccaaaccacttcaatccaagagtatccaaactaggcctcca

SEQ ID NO: 28156 - DNA, 334 bp, Zea Mays
cgcacgaggacgctgctgctcctgacgcacgaggacattgctgctctgttcggctctagtctccactgtttgatgagtaccggagagcgctctgcggcatcgtgagcgggttagctttgcattgcaactcaattttaggttcagccatagattggtttagctcgatcgatcggtatctgacggtggtggctgagtttgcagctgcgttcccggctgggcgtacaaggactataatttctggttctgaagtctgaaccacctattgtatttttttctttggttattagtttattacataaagaatgctactcgattgttctatgttctgaaaatc

SEQ ID NO: 28157 - DNA, 677 bp, Zea Mays
ctgtgttgagccctttaccatttcacattgttgatggatgaggtcacaaatgacatacaaggcgatatcccttggtgtatgtttttttacagcaatgtagtgttaactaatgaaagtcgagcaggagtaaatggaaaattagaagtgtgtttcgtttgaggaatgaggtagtccatcatcttttcactcgtcactttcttgtttggtttgtggaatgaaatgagttgatccatcacaatttcatttctcataagctaataattagtaataatatgagaaatgagttcattccaccaaatttgtggaatggactcatgatgcaccacctcatctagaatagattgattcttcaaaccaaacaccccctagagttgtggcgggagattccagagtccaaaggttttcaactcaactaaaattgaatatataatatatgactttggcactactacacatgaggaagaagatgctagtttgaaaggttaagtagtgcccaatgcccataaaggataactttcagtatttatgatcaatcctacagagagacgatgatattgatgatattaaccatagaatcaaagcatagtggataaagtggcgtcaaacaactgccattctatttgacaagagggtaacatagaagctaaaaggcaagttttataggacggcgattagat

SEQ ID NO: 28158 - DNA, 365 bp, Zea Mays
ctggtatcttatggtattaaaagaaattttacaagactattcaccttcctttaggcatctaatcctatagcatgccaattgccatgctcgagatgagggatgcttcgctagctaaactccttccacggcaacagccggtagtctcttcatgtaatccggccttcgttagcacgactccgttccgctccgcaacgctaagccgaagtttatgcaagagcttatcgacgtccatcttgcttctcccttgaccgatatgattcatccgccatggctgtacagtcgaagaccaggatcctctacttccaaagccggaaaagtgcgtagagacagtcgcgtccctgagtccgcccgaactgaaaagagac

SEQ ID NO: 28159 - DNA, 460 bp, Zea Mays
ctcaaacccaagagactttaaagggattcttgagacgagctcaaaatgagttcggcttaaggatcaagaaaataagaagcgacaatgggacgaagttcaagaactctcaaattgaaggcttccttgaggaagagggcatcaagcatgagttctcttctccctacacacctcaacaaaatggtgtagtggagaggaagaatcgaactctattggacatggcaagaaccatgcttgatgagtacaagacaccggaccggttttgggtcgaagcagtcaacaccgcctgctacgccatcaaccggttatatcttcaccgaatcctcaagaagacatcctacgaactcctaaccggtaaaaagcccaacatttcatattttagagttttcggtagcaaatgctttattcttgttaaaagaggtagaaaatctaaatttgctcctaaaactgtagaaggtttttt

SEQ ID NO: 28160 - DNA, 441 bp, Zea Mays
aaactaacggctctcaagtagagcaagttgatcttgatgagataggtaatgaagaggctccatgcatcgcgctaaggaacatgtccattggggatgtgtgtcctaaggaatccgaagagcctccaaatgcacaagatcagccatcctcctccatgcaagcatctccaccaactcaaaatgaggaagaggctcaagttgatgaagggcaaaatcaggaagatgagccacctcaagatgatagcaatgatcaagggggagatgcaattgatcaagaaaaggaagatgaggacgaaccaaggccgccacacccaagagtccaccaagcaatccaacgagatcaccccgtcgacaccatcctcggcgatattcataagggggtaactactcgatctcgggttgctcatttttgtgaacattactcttttgtttcctctattgagc

SEQ ID NO: 28161 - DNA, 1518 bp, Zea Mays
ctttccggcgtagggggatggggatggggcagccagggcgctggactcccaagataaagaacaaaaaggtctcttttgcagatcctgtcatcactgctatctggcctacagatgtttctaaagggcacatctctgctgaaaattccatttcactgggaggtatggatcttggcactcaagctatggaggaataccaatgttctgcacatcccaaggtatctgtcccaattgcatcatattctgttaatgctctaatccattcatggtcgactagggggacagattctgctccagtccctattattagtggtagtcatcttgcaaatgaaacaatacaaggagatttatgtatccagaatgtgcaagtcgagtccaatttttccaattctgaaccaaacagtcaaaggaatgtcgttgctaatgaagatcgacaatgcattttacctactaatgaggttccacctattggacacgaatcatcaacacattccacccctcggccactagaaaatcagctgaactcaaatgataggttgcagattttcattgaatcaatcacaaacacaccagaaccgcccctcatcctgtcccctccgaacagcaacacacttgccacatcaccagtactaggggggtcagataatctagatgctaatgtaactataaatgctggcacacctggtaaacgctcgagtagcagactcgcagcaaaacaaagattaaacgtggggggtagccgtgacgccatttccaaagcacaggaaattctcattgctaagttaaataattctgcagccatacaatatcaaggttcaagtgcgtcgatctccaataaccatgtaaattcttttgaacagattgaaggccttttctcaagacctctcaacaaggatcagatggaggtaattatggagctggcaaatcaagggaaggggaagaaagggagcaagctcaggggctgcaaagtggcgccacttaaggctcccataatcaaggctgcttcgggaatatgagatgctcatcgtgttggagttatcagtggtttccagtttttatattatgtgtctgaagttgttcctaccttcctcttgtctaggggtagagcatggtgtgttgcagcctcttttgccagacttttggctgctgcttgatatttggtggtcctgttggtggttttcgaaccattcgatctcgacccccactcatctgtatcgtactattttatggctggaactaatttgtgtgttgtgggtcatgtgtttctgttcttcaatattggtggtgatcatggctgctagtcggcatcagatgttaattatgttatcgcctttatgtggcaatgtctgttcaagtggagaaatggttactatccaatgaatacaaattgctgtattttttcttggaatgtgagaggtctgaatgatcccgctaagcgagaaagtgtgaggcaaacaattctttctacgcacgcaactttagtttgtcttcaagagacaaaaattatgaactggactaacg

SEQ ID NO: 28162 - DNA, 720 bp, Zea Mays
ctggagtttgcctaatatttttaatattagagagcaattttttaaccttccctaaaatcaagattggaagtgagttttggaaccttttgaaggtgctcttatgtaccttgagatgtgttgctgatgaaaagcaagcatattcttgcatgcagtctagtttctagagcacccttggcacgcagtataatttctggagcacccttgattcatttcgattggttgaacctacgatctcccttgacccttggtgtccacacgggcctaccccgtgtctgtccgaccaatggccatgcagatccactctaaccatgcagcgataagcccgatcatcggttctagaaagacagagacagaggaggaggagctagcttgccggccaccgccagcgccgtggctccatcgcttgtcgcgttcgttcatctcctcgatggagaaggtgggagtccctcggcgccagcattttcgtcggcttcatcggcgacccgtcccccacggaccaagcgaccagctcgtggtggccctgccttcatagagaggcaaagtctggcttgcccgctggaaagcgtgaggacgcaggataggtcaggtggagccctcccccccgcgccgcacgcggggactgatgagttgggggaggctccgctgcttgcgaaatatatctagcgagaagttgtctgggagacagcgagatgcgtggcggcgggttgcggctgcgtaggc

SEQ ID NO: 28163 - DNA, 464 bp, Zea Mays
atggatgagtagttgaaatttggggtgatcggatgatcgatgaatagtaacggtgaatactaacggtaaatagtaacggtaaaaagtaacggtaaatagtaacggtaaaaagtaacagtaaacagtaacggtaaatagtaacggtaaaaagtaacggtaaatagtaacggtaaaaagtaacggtaagtagtagcggtaaatagtagcggtaaaaagtaacggtaaatagtaacggtaaatagtaacggtaaaaagtaacggtaaaaagtaacggtgaaaagtaaaggtaaaaagtaacggtaaatagtaacggtaaatagtaacgataaatagtgatggtgaatagttcgtatgaacgaacgatgaacgatggatatgaactatgaacgaacgatgaacgatcaaatgatcgaacgaacgaacgatcggaatttcggcagcataacggcaggaaaaagattatt

SEQ ID NO: 28164 - DNA, 573 bp, Zea Mays
atcactgctcagcatcgtagataacaagtataacaaaagttttggttataagcaatctagtgtaggccaagtgaatgatctagattaggaaaatctagagacaggttagtagattcaggtaataacctaacttgtgaaataaaacttggcttaaggatccattattagtaaacttttatgcaaaaaaggagtcattgataattgacgagcttttcccctgattccccaaaagctagcatgcccttgagagtcttttccttagtcgggtaagtcttgatgagtaattgcctacttagggttttattccctatgttgttgtaggaaaggtttttgatgtcttggctttattagttgctccttatggaggtcttgaagcttagattacttatgtgaatcttttctggaaaggcttcacctttccaagtattgtagttaagttatgcactctaaagactatcaggacttgtaaaaatttcattcccttttatgttgtatgacttgagttctggaatgtaaagtgtattttgtcaaagtcttccgctctatctccaatgtgtgtatcaaatgtgatta

SEQ ID NO: 28165 - DNA, 408 bp, Zea Mays
ttagaagatgcttccgctatgagatcgacatgaagactatgaatgaagaacagagaaacaaactgatatctgagacacttcaaggcattcctaaagttgctgatgaggtgtcttttggtcattctttggcccaaaacttatttaccatcttatagttcacctctcacttatacgtttccacttttcagagtatttgtgacaagttcttaaaagatttagcagcgcaaacgtcaggtttcatgcccagggacatacttgcattggtcgcagatgctggtgtgtcttttgcgcataaaattgcagcagggaatgatagcaaagcaatcagtaagcatacggaggtccttccagaaagctcttctgccactcaaaatgaggaacaccatttcagcaaagaagatattatgt

SEQ ID NO: 28166 - DNA, 137 bp, Zea Mays
gcgacgccagaggcttttgttggggtcagctgacccctataaaatttggaaaatactatacaaatatattgttatctagtgcatttagatgatgattaaagaaactgaccccaataactttattgtctggcttcgcc

SEQ ID NO: 28167 - DNA, 269 bp, Zea Mays
ccaagtctcacacatatgatgcatagtggcacaggatcgaatgtcacatctttactactccctccgtttctttttatttgtcgctggatagtgcaattttacactatccaacgacaaataaaaagaaacggagggagtatataacaggagttctatacaaaataattaaataattacatcatatgaggaaacgatccagcaacccaaagttgactggaagacgatggcctagacctctcacgaacacatcgcatcatcctccaagcgcc

SEQ ID NO: 28168 - DNA, 471 bp, Zea Mays
attaattaaccaatgacacctgaaacaatgtgtgcatcatgctgggttttattgtgtgtgcattttgtgacaatataaaagtaaggtaaaaaatatattaacatcctaatttggagatgtaatcctaacttgcaaattagggttagagaaggaaaaaatgttataccaaaaaaaataaataaataaaggaaatatacataaatataattaaaccttccatattattgggtacaatttgtacatttaaatgaatcaggaattcaattaaaattgaattcaaattggaatgctagaaaaaaatggaaaagaaaaaaagaaaaaaaaagataaaagataaaaaccttacctgggcctcggatacttattttagcccatcaggagacaccctccagcctagtgtccgcgcaggcacggtctcgtttcccagtcactgctctgtgggcccacacccgggcgagtcttcttctttcc

SEQ ID NO: 28169 - DNA, 97 bp, Zea Mays
aagacgttcgtttggtccacgtagcgcgcagcatgaatgacagccaccagtaaacaaacttttcacgccacacagcacgaagcaggaggaaaagatc

SEQ ID NO: 28170 - DNA, 115 bp, Zea Mays
ctctttcaaccctttctctctctcaaatggtcacttagaccgagtgagcttctcttctcaatcaaacagaacacagagttcccgcaaggaccaccacacaattggtgtctcttgc

SEQ ID NO: 28171 - DNA, 480 bp, Zea Mays
attggtgttaccataaccagggacatagttgagatatgtgtgggtacaaggggtaggtagattgaacagagtttttttttctttttttttacttgtaagataaatgggttgggaaacctataatataggctaggtcgtggtttcacggacgagttggtctaagacactagtttaggttaaaacatgttttataagggtaggatccaatcttattttacccgtattatctaacatgtttgtccattagattagatctgatctgattagatgggatctgaattaaattggtgtaatcagattagactggataagatctacttaatttatttttggaatagatcatgtttgttacactattatgagataagcaaagtggttgggataagtatgcttgttcgttcaagatgagtttctaagattatggtagcatctttttgagattagttagattgattaggataagatgaaaatcctttcaag

SEQ ID NO: 28172 - DNA, 580 bp, Zea Mays
tagacatcactcgaatcaattctcactctccctcttgtgtgtatctctctagtttgtgtagaaggcacaactataagcctttagagagttgagaagtgctgctaagagctagagcaaggtcttgagcggatcgttactctgccggggtgctgccaagaagtttgtaagcagccgcgattttgttgtaacccaactcaacatagtgaaaggctctatctgtcatactgacagatctgagcaaacggaggaaggagttgaaatagactccaagtcaggtgtggctaactccaacgaggactaggcaagcatttcaggcttggccgaacctcgggataaatccttgtgtctgtgtgctctgttctgtattgtatcctgactctctgtcttactcgcctttatatctgcacttcaacacttatctgtggtataagctttatttgaagtgcaggacattttgagacaggatcttctattccactgcaacctactcgaaggatcttctcactccactgtgtactaagtcttcgagtagagtaagaatttaagttttaaagtgataagttttattcgcctattcacc

SEQ ID NO: 28173 - DNA, 197 bp, Zea Mays
cttattttaccttttccctttaaccccacccttagaacctcttctcatgtgcatacaattgaaataattagaacacctcacatagactatgtttctcactcaagatcacttagaaaatatttctggtctccaaagaaaaagaataaaaaagaaacaaaaatagaaaaaggaaaagaaagggattagaattgaaaaag

SEQ ID NO: 28174 - DNA, 242 bp, Zea Mays
caaagtcattccaaacatcagatgtggaagctctatttcttacccgagaactagtaggtgtgtctgcctcaacatcggccacaacagtgtcaggatctatgttgatgggctctgccgccgttgaaggaacagcagcctcactgccaccagtttgggcaggcacgctgtcgtcgtcggccatcaagcacagatcacagagcacaggccaccagattaagaacttaccaaagccggagcaccag

SEQ ID NO: 28175 - DNA, 831 bp, Zea Mays
cacagatcacaaacatagatcacaagaacagatcacaagagtagcttaccaaagccggagcaccagatcggtccctcacgggtacaatcacagagcaagaaggcagtagagtagattagggttcggggttcaagcacagatcacaagcacagatcacaagaacaagcactagattaggaagtctcaacctcgtcggaccgtaccggagtcggaccgtgaggtggagcggcggagtcggacggtgaggaggcggcggagtcaaatcgcccccaaatcgccaggagacggagagaccgagggcgagaccgcgagagacaacggtgaggactgaggaggagcggtggagcaccgtaccggagtcggaccgtgaggtgtgaggtggagcggcggagtcggacggtgaggcggcggcggagtctgaatcgcccccaaatcgccaggagacggagagaccgagggcgagatcgcgagagacaacgggcgatgcgagagagtgagagtgtctgacgaggcgggcccagaggagggggggggggacgggatatttgtgctttctagtagccgtgcctaaccgtgcctgggacttaatcgtgccgtgcccgtgccggcccagcgtgcctggcgctcggcccaggcacggcactacctgtcgggccgtgccggcacgggcccggtaccaaccgtgccgtgccgtgcccaggcactacgggccgtgccgtgtccagggccggcccgattagcccggcacggctggccatctataccgactgaccaatagggctgtgggcgcgaccgagatatatataatatagccgagacttggaaatggag

SEQ ID NO: 28176 - DNA, 465 bp, Zea Mays
ggggcttccattccaactataagcagcacatagcaaacgctaataataatacattgtcacgaatttcatgaaaatggtattctgttgattctaatttaactcagacctcaaatatatgaaccggttatatccatagttgctaaggcggtaaggcgaggtaaagaggtcgaccccctttttaccttttaagcggtaaggaataaggcgaggcgatgccttactaatatataaatattgaaatatatgggaatatagtcttaaatgagtagggatgatagtattaaataggagtgcaagttcaacataagacaacataatagacttaaaatacaacataattaataggtagcagtagaagattaggaaaaaataaatatataactaatagtctcaatgatagaagtaaaagataagaaaaaaataaaggggaataaagacatatgggccaccagcctgctgtttcct

SEQ ID NO: 28177 - DNA, 274 bp, Zea Mays
acgacacaggtaccactagtagctttctgccaggggcatcgggcggtgcgctgatgttccaacgaccgctacaaaggctgccgataggacaaggagtccaggacgcagtgcagactagcggtgtgggtatgattggaggcacgatattagatccatatgagttttttacttattgcttctatatggccttaactacactatgtaatccatgtgtcaattggtttgttttggttttttgagttgaattccctatccctcactattttgattcagt

SEQ ID NO: 28178 - DNA, 166 bp, Zea Mays
aaagctacgactaaagtattgttcttcacaatcaatgctcatcaaccattaatgctgtcacttgatatttgacaacttcaatgatattatcaaagagcacaagaaatctttttttactatttttagtacatatttctttgctttagggccaatatttctagaatta

SEQ ID NO: 28179 - DNA, 273 bp, Zea Mays
gttttctttttttttcccgccagacaaccattcagcatcggtgctcttcgacagcaacttcgtatcagaaatctcgtgtttgcctcaggagcaacgcctacgcaaggtaaacaaccaaaatggctaaagcgcatcagatgcgcgtacattcttctgacagcaagaagagggtgcgttgttgtcgacaccgatcgtctcttgttgctgcattggatgccattcagctgtggttccaagtaaatagtatccactgatgttgacccaaaaaaggat

SEQ ID NO: 28180 - DNA, 2522 bp, Zea Mays
cttctttggcgcacatataagacgcacccgactttatcccttaaatccgggtgtgacatgccattagtatctatgttttatagactgatgcataatgctacttatgttgtatgcctatattttatccactatgctactatctattcgtagcctacactatttagtatctgtccatatgcaattattgtggactatgacatcaggatttttagtttctcatctttttggcaggttggtgcttgggagaataatagagagcacaaatcatcatcaactcaacaaggataatgtattcttgatctatatttactcagttttttttctcgaacactcaggagagctgcgcatcattatattaagaggataagaatggtctaaggtagaccaaaatacaaactgccctagaaagcagtaaaagaggggaggggacagaaaaaagaaaaaaagaaactaaaaactaaaaagaagaggaaaagaggaggggcagcaaccccacactaaccctacaccttctaaattaaggccacaactgtctaatatcatttgctcctgctattccccaaagcttaatattggagggaaaaccctaaccctaggatagggtggggctgtatattaatagccatgagttgggcctatcccattacagaggggcaagggagtaaatgtacccaaaccctaatacagttccaacaccccccccccccgcagtcacaactctatcctgtatagatgttgagactagagcgaaagtcaaaatacactcgacggtaaccccttggtgaagatatcggggaactgcagcgtaatggggacgctgagaacccgaacgtcaccggcggcgacacgctcgtggacgaagtgcaggtcgatctccacgtgcttcgtgcgctgatgctgcatgggattggtggagagctagactgcgctgacgttgtcacagtagacgagggtggcgcgctggaggggactgtggagctcgtggaggagctgtcatagctaggaggcgtctaccacgccgttggccacgacgcggtactcggcctcagcactagagcaagagatgacgggctgccgcttggcagcccatgagacaaggttggtgcccaggaacacggcgtaaccggaggtggatcgacgcgtgtctggacagccagcccagtcggcgtcggtgtagaccatgagttccgacgtcggggatggtcagagaagaaggtcgtagtcgagggagccgcggaggtagcgtaggatccgcttgagagtggtgagatgaagctcccacgaggtgtgcatatgtaggcacacctgctggacggcgtaggcgatgttaggcctggagaaggtgaggtactggagcgcgccggtcaggctccagtaggacgtcgcatcggcgacagggggcccgtcgtcctctgagagcttcgcctgagtgtcgacaggcgtggagcagggcttgcagtcagacatgctagcccgctccaatatgtctatggcgtactggcgctgatgaaggaagagaccatggggtcggcgctcggcgatgatgccgaggaagtgatggaggggccccaggtccttcatcgcgaactctcgctgcagggcgacgatcgtgcgctgtaggaggtcggcggtggatgtcgtgagcataatatcatcgacgtagagcagaaggaagacggtgccatcgccgcgacggtagatgaagagggacgtgtctgacttggcctcgatgaagccgatggaggccaagtaggaagcgaagtgactgtaccaggcccgcggtgcctgcttgaggccgtagagggagcggttcaggtgggttggctgcagtagacagtctccgtcagagtaccatggaggaaggcattattgacgtcgagctgatggatcgcctagtcccaagagagggcgagggagaggacggtgcgaacagtggcgaacttgacgacagggctgaaggtctcgtcatagtccacttcgaggcattgggtgaagccccgaaggacccaacgagccttgtagcggtcgagggaggtcgagggagccgtccgaggtaagcttgtggcgaaatagccacttgccagtgaccacgttggtgcctggtggacacgacactaggtcccaggtgtggttggccaggagggcagcgtactcctcctccatagcgcgtcgctagtgtgggtcggcgagggcagtgcgaacgaaggaggggaccggggaggcatcatgtggagtggtagtcgtatcagctgccaagatcagccggtcgacaggtcgaagaacaccggcggcgctgggtcaccatcgggtggacgtgcccggggtcacggtggatggcgaccgggtggtacaccggtggctcagggtggtctaccaggacgtcgagggccgcgggcgtggccgactcgcggcgatgatagacgacggcggggtcggcgaaccgcaccgggctcgtcgacgggcccgggtcagcaggagccgaggtagtgacgtggcagcggcggtgataaacgagcgtgggg

SEQ ID NO: 28181 - DNA, 762 bp, Zea Mays
cgaaaacggggccgcatgcgcgtggtgattagcggggggagggcggagccacaggggtgtggacgccctccttagcatcttaaggaatagtaaagattgcatattagtcgtcgcggacgctctattcatattgactcctagacaaaagcaccctaacagcgtccgccaatcgccaaacggaggaacgagtgtctgccttcctcgacacctcgacggccaccgcagcaggttagcatctctcctcgccgttgtatcatgatcttggttgctctacatctttgtactaggcgctggtcagcgacatggacgccaccatcgccccaagctttgcgtcgtgcagctgcgccgagtcacgcacctcttcgtgctctacccgctcgcctgagccgtccacagcaactcaaggacacaccaagacgtggctgctctaccggtctacccatgcacctgaggcgctctacccgccaggttactgatgaaatggttcaccaagacgtggtggctgctcagacacaatatggacatgctcaggattgttgatggttactagaatgattgaatgaagacgattataaactgtccccactactgtatgattgccaagtaaaagtgtgacgaaggttgtcgtcaatgtaaaattgtccttcatattaggatatctggtgaccacatttttgtagtagtccttctagacaacttcatccaccagtccgctaataagaacactaaatttaaacatcattttttgcattatgatagttt

SEQ ID NO: 28182 - DNA, 827 bp, Zea Mays
ctaactttatgccagaccccttggataaagaaatacataactgggtagtcatacccatcagcttcttcatcaactttctttatcctgagagtggcatagaactgagccgctacttcgtcattccaggggtactccatagtcattatgtttttcaacccctttctctctaagttatggagagttgacgtcatgtcagcatctcccatattctcacatccctctcagtcaataaaacgatgtctaacgactgggtgcttcttagtcatgatgacagaattataaaaatcagcctgaaaaaggttctagaaccgagggtcctggacatcaggatgtctgggtgtgagtgtgggattagtgaaccttaagcgttgaagggagtccaccgccttcaaagagaagtcgaccgaaggttcatttggtcgccgagacatggtcgccggatgcatgtggagtctggtgacgaggggagtgtcggacgacggaggttcgacctcatcgtcaaaagctccatcctcctcctagcaaggagcgtatcctgcggaggagatgcttcggcgaggacaagtggcgccaaccttttgacgccctcgcacgtaggttgcgagggcatcgagggtccctccccttctaatcggccagagcctcgtcctctcttggagagagaacgacgaggcagaggagaaggaacatgcgattcctcctagatttcgtcggagtcactgctgaacttcaccaccaaaggattgcggcgatgcaccatcttgatgagaagctccgagaagatgagttccaagaggaacgagtgaaatgcgagtgattttagggag

SEQ ID NO: 28183 - DNA, 162 bp, Zea Mays
tacgcttcgcaaccgcccttcgtcgtcgtcgcccggtgctaggacccggcacatctcctgcgtccgcggcgtgcggcgaagcctccgccgcagccacatccaaggccgcaaagtagtccaaatcctcctccgacgactcctcagtccactcaaccgagctcc

SEQ ID NO: 28184 - DNA, 129 bp, Zea Mays
catgtgatgttctacccaggttaattaaggattggatgcgtatgtaggcctatatgatcaaggactatcttaactgaccacatgccctggatatgggacagggtaagcttgaacccggctattccatac

SEQ ID NO: 28185 - DNA, 64 bp, Zea Mays
ggtattgagctctcggttggcggggacccattctggtcttgagaaacccggtggcgagttgaca

SEQ ID NO: 28186 - DNA, 86 bp, Zea Mays
ttcagcgtagataacaagtgaaactaaaactgctaaaataaagttagtgtgggacaagtgaatgctctagattagacaaatctaga

SEQ ID NO: 28187 - DNA, 1476 bp, Zea Mays
aaccccaaagagctgtcacattcggggatggaaatcaaggtttggtcaaaggcttgggcaaaattgctatatctccttaccattctatttccaatgtttttcttgtagattctttagactacaatttgctttatgtttctcaattatgcaaaatgggctacaactgtctatttacagatataggtgtcactgtttttagaagaagtgatgattcaatagcatttaagggagtgttagagggttagctatatttagttgattttaatgagaacaaagctgaacttaacacttgcttaattgctaagactaatatgggctggctctggcatcatcgactcgcccatgttggaatgaagaatcttcacaagcttagaacacattttaggactaatcaatgttcattttgagaaagacagggtttgtagcgcatgccaatcaggaaagcaagttggattccaccatccacacaaaaacataatgacgacggacaggccactcgagctactccacatggatctattcggcctaatcgctcacataagcatcggcgggagtaagtactgtctagttattgtggatgattattctcacttcacttgggtgttctttttgcaggaaaaatcacaaacccaagagaccttaaaaggattcttaagacaggctcaaaacgagttcgaattaaggatcaagaagataagaagcgataatgggacggagttcaagaattctcaaattgaaggatttcttgaggaagagggcatcaagcatgagttctcttctccctatacacctcaacaaaatggtgtagtggagaggaagaatacaacactactggatatggcaagaaccatgcttgatgagtacaagacaccagaccggttttggaccaaggcgattaacaccgcctgctactccatcacccggttatatcttcaccgaatcctagaagacatcatacgaactcctcaccggtaaaaagcccaatgtttcatattttagagtctttgggagtaaatgctttattcttgttaaaagaggaagaaaatctaaatttgcccataaagctttagaaggttttttacttggttatgactcaaacacaagggcatatagagtcttcaacaaatccactagattggttgaggtttcttgtgacattgtgtttgatgagactaatggctcccaagtgggtgcaagtttatcttgatgaattagatgatgaagaggctccatgcgtcacgctaaggaacatgtccattagggatgtgtgtcctaaggaatccgaagagcccacacaagcacaagatcagtcgtcatcttccaaccaagcatctccacctaccaaagatgaggaacaggctcaagatgatgaggatgaaaatcaagaagatgagccacctcatgaggaggacaatgatcaaggggagatgaagttaatgaagacaaggaagatgatcaagaaaatcagggtcaaag

SEQ ID NO: 28188 - DNA, 628 bp, Zea Mays
attgggtggtggctatgcaagaggagctcaacaacttcataaggaatgaggtattgcatttagttccacgtcctaatcaaaatgttgtaggtaccaagtgggtattctgcaacaagcaagatgagcttggtgtggtgacaagaaacaaagcccgacttgtggccaaaggttattcacaagtcgatggtttggacttcgatgaaacttatgcacccgtagctaggcttgagtcaattcgaatattacttgcctatgctacttaccatggctttaagctctatcaaatggacgtgaaaagtgccttcctcaatggacctatcaaggaagaggtctatgttgagcaacctcccggctttgaagatagtgagtaccctaaccatgtgtataaactctcaaaggcgctttatgggctcaagcaagccccaagagcatggtatgaatgcctgtgagattttctaatcactaatggattcaaagtcggaaaagccgatcctactctctttactaaaattgttgcaaaaacttgtttgcatgccaaatttatgttgatgatattatatttgggtctactaacaagtcaacttgtgaagggtttagtaggatcatgatatagaaatttgagatgtct

SEQ ID NO: 28189 - DNA, 467 bp, Zea Mays
caacattccaagtcatctagttgacatattcaagccctcccaaccacctctattcattgatccatcctatacacaagatttagaccactacaaccaacacaagtgccacaaaagagagagcaagcaagagagagctactcatttgagtttagcactagtgccttgtgagattcattaagagatagtgtgtgctacatctttgtgttcatttgcgcgtggagttttgactcccattgaacttcctcaaaagttttggagtgttgtaaagctagcaagagacactaaagagtgtggtgatccttgcggggtcttaagtgatccttgagaagaagagctcgccggtcttgtgtgatcggtggagagagagaaagggttgaaaaagacccgtccttagtggactcctcaacggggactaggccttcgagggccgaacctcggtaaaacaaatcacccatatctcatatgct

SEQ ID NO: 28190 - DNA, 87 bp, Zea Mays
aggcaagctatcgtcgggcgatcgtacaaggaattacttttattactgtgcaccagtcgatttggattctttactggatgatgctcc

SEQ ID NO: 28191 - DNA, 1036 bp, Zea Mays
gggaagcccagttgtgtgtctgaaccccatggatggtggcttcaagtactaagacacctgccacaaggcggtggagtatgcaggctcatggtaggggaccaggctgagcggctacatggcttccggacccaccaggggacaagtgactgttcttcaaagccggacctccaggttgttggacgcataggactatagttttaaatactaggacacccgtcatggagtggtggagtgtgcaagattttgggtacggaaccaggataaccggccacacaggctccagaccaccctatggaacaggcatccgttctttagaactgtcccccaggccttcccctgtttttgtaaagtaatagatattatctattaagcagtatttaacacttatctgtgtgatgctcgatcttgttgctgactttccttggtaccttgccccccgcctggggtgcaggctcgatgtgtcgaggctggacaccagcgtgtataaaagagtcgtcaacagccttcgggaggcagcctcaccgagacctggatctgtatacagctttagctaaagagcgttagtgatacacccgtagaccccgtcatctggcatttttcatcctttgatacgtgctcgggatttgcagtgttttggctagggggagcaagttttgtgtccagacccactggatggtggttctagatactaggacgcttgtcacagagtggtggaacatgcaggcccacggtacgggaccaggctgagcgctacatggttccggaccacccaggagacaagtgtctcttctctagttccggaccccaagttgtcggacccacaggacttatagctctaagtactagggcgctcgccacgtagtggtggagtgtgcagggttctgggtacgaaaccaggccaaccggccgcacaggctccggaccacctcatggaacgagcactcgttcctcggagccggcccctaggctgttgggtccccctgctttcgcatagaggtcctaaactgcaaccctggctgttcaatccagatgttat

SEQ ID NO: 28192 - DNA, 397 bp, Zea Mays
tgccgacttcccttgcctacattgttccattggccagaggctgttcaccttggagacctgatgcggttatgagtacgaccgggcgtggacggaattcggtcctccggattttcaggggccgccgggggcgcaccggacaccgcgcgatgtgcggtgctcttccggccgctggaccctacctccggctgaaccgattccagggttgggcgggccgttaagcagaaaagataactcttcccgaggcccccgccggcgtctccggacttcctaacgtcgccgtctgccgccacgtcccggctcgggaaatcttaacccgattccctttcgggtgacgcgcgtgatcgcgctatctgccgggtttcccccgtcccttaggatcggcttacccatgtgcaag

SEQ ID NO: 28193 - DNA, 442 bp, Zea Mays
tgcattttgtgacaacataaaataaccagaaatatattaaaaagctcaaaatggaatttaaactctaaaaaggaattccaaaatctagaaaaagagagcaaacaaatattatgtgatataaaaatataaataataacatataaatatatccccaaattagaacttgtcataatatgaggataaattggtcacaagtttgaatttaaactagaatttaaatttgaatttgaaagtcaaaaaagaaaaagaaaaaaaacaaaataggaaaataaaaaggaaaaagaaagagggaagggcgagatgggcctaattccctaccgccggcccacttacccctttgctccctcgcgcacagtcggcccaggtccctccccaccgcgcgcgccaccttggcaggaaggacccacctggtcagccactcttttcttgcgctggctcattc

SEQ ID NO: 28194 - DNA, 431 bp, Zea Mays
ggacgatgggccacgcggggtgggggcagaacgtggtctgttgggccggctggcaatttggcccaaaccgaggtagttttcgtttttcttttgtttttttttctattttcttttcttgtttttttttattcttaactattttgaattcaaatttgaattttgaatacgaatttcaacattgtgtcaagtgtacaaattcaagcttctagtggaggaacgatatatttttatttactcatttttatccacaaaattcttattttcttctcttttctaaattctacaattccttttggattttaaattccacttttgactttaatatttttcttgtcacatttattattttattttgtcaccatgtgcacacaaaagaaaatcccagcatgatgcaaaattttaatggcatatattctttttattaattattt

SEQ ID NO: 28195 - DNA, 528 bp, Zea Mays
atcctcttctcaccgtgaaatcgcgtctctctgtcgacgtcgtgcagagtactccctccctcgccacagccgccgcccaggccttgccaccatccaggacgcgccgccgccagagcccatccagaccacgccggcccacttcgtgctgccgcacaaggcggcggaggaaatggagatcggcgggtacctgatcccgaaggccacaacggtgaacttcatggtgggcgagatggtccgggacgagcaggagtgggactgtgggagaacctgatgcctaggaggtctcacttgaacgaaaactactataccatcttctattattctatggtttcctcgttttgtcatggatataaacatctcatagctgtccaaaattacggcagaaattgtaatgttcattgggtagtttcgtcttcgtgtcgatcgtggatggcttgtgaacacggaaaatcattagcaaaactatgccgattataaacaacagggctgctcttctcaaaacttaaactgttgatgcacctatattcg

SEQ ID NO: 28196 - DNA, 188 bp, Zea Mays
gtcaagttattgggtagggtcgagttgatctaagatctcaaacttgtttataggagcagggtctaatgtatttccttagcattagctaatcatgtttgagtgactcacattaggtttgatcataatagattagataggattgggtatgactagattaggttagatagatctactaggatatgatatat

SEQ ID NO: 28197 - DNA, 612 bp, Zea Mays
gcgactctgaaaggtttggttatccttcctctatggtttgcatgctctagtgctctacgcctctactgatgcgtgtaccaggtcattcacttttgaccattactagagatggtctacacttaagtgaacttaaatttgagatgaagtcggtatgaaaaacaagtactccccgtcccaaaatagttgttgttttagagaattagttgttgttttgtatatgcgtctggattcatcctcattcatttgaataaatcggatattgaactgccagttcacaagtacgtggtcaattgcacagacccatgtagctgactgccgtgcgcatgcatggtaactgcaaaagaccactccagtcttcctaaaagcgacattgccggatagaagggagcgagcggcgtccgccgtccggcgagggaagccgagcggttgcggcctaggcatcaggcaagcagggcacgacacaacacgttttggttacaagcgcgacaccatccacaggaatggtcgcacgccaaggtcgccacatgacatgttcgagagagagaggagatcgaggaggagcagaggttggagatagatgggaggtccagccagcaggtgcatttatggcgg

SEQ ID NO: 28198 - DNA, 327 bp, Zea Mays
ctaagaccttctcgtgatgagcaataccttgagttctgctctatgaggtggatggcgacggtccatgacaggtcaccgggccacatgacggtgctcccttgcggtggcacggactgttcacgaccctactgtgggagtggatcttccctgtgtcgctctgaatggtctgtgctctggaccggatggtccgcaatgacgcagggtcgtcttgttcctcatagaaacctaggtctcgccccctaggggagagaccttaggttgctctagctcgataggtcacctagggcgtcccggactacatggagtcacctagggattgagatatca

SEQ ID NO: 28199 - DNA, 800 bp, Zea Mays
ccgggtcagtccgaaatatttggtattttttcatgtgaaatgttgtctccttagtatgattaccattgtgtatatgaactgtgggtccatctaggtctagaaatgttggtccaatggccattttgcgaacgtgtttttgttgtaatggcaaataacagattccctcgcatgtcaccatagcaaagtcggccaaactgtaacctaggctgatcggactgtagtagctgtttttgacatcctgatcctaggattaatagaattgatataatactcctactagtaaggtgcactttcttttttggaacaaaaatgcgttcatttgccttagacacggctcatttaagatttaatcaaatgattaatcaacaagtaagcattgctttagtttcttctcataaaaatagaggcagccaaacaaaagaggaatttgtcgttcgtggatcaatcggataaacgcagcaacacgtgtatgtaacatattcaatagtagctgatcctcatagtttcacgggcgtgtgtggtgtagggattcagacatattgtgcataatgcatatggatcggagtggtcatatgacatggcatatgacgacactagacacacgaacgtggccaagagtggaagctcctagcttggggttggctaatgaggattatagtctttaagggggtgcattgtgacatcttggcttaatgtttcatgggattgatagaatactcataccaataaggtgatacacctttttggaagcctatctcaaaagaatgtttgggttaagcatgtttggttctatgatccta

SEQ ID NO: 28200 - DNA, 427 bp, Zea Mays
  misc_feature (1)..(1): n is a, c, g, or t
nacaaccaacaataatcatgtttttatcactcttattaaaggtacccaacaaatctccaaacattttatcaatgttttttggcatgtcaaacgaatttaatgccaatattgatcacgcaccaagtgaaaacagccacctgacactcaaaaaagatatgatctgttcattctgtatggccacaccagggacagccagtaccccccccccgcccatttctgaccttcaagttcacctttggacaggaccctatttttcataataaggcacaaaaagactttgatcctctgagggatcttatccttcgaaatcatcctgtaggggctttttccaggttacatctgcatatattgtaaacagatctaacagccaaacctttttttgtttaacatccaaaccgctttgtctttcgaagcagaaagacaaaat

SEQ ID NO: 28201 - DNA, 415 bp, Zea Mays
gtgcgcgtgatctggtgagactggaggcggggcccacgggtcagccgtggaattcgcgcaggagggaagggaatcacgggccgcgcgtaggtgattgctagatgggccgaattggtagccgccagcccagttaggttagttccctttttcttttttttctttttcctattttgttttcttctttttttttattcataattatttgaatccagatttgaatttgaatataaatttcagctttgggttaaattatacaaattcaaaatctagtcttggaataatatatttttaattacttattttatccacacaatacttatgttcttttcccttctaaattctagaatttctttcaaatcttaaattcccatttgggtattactatatttctttttcacattattgtatgttgtca

SEQ ID NO: 28202 - DNA, 754 bp, Zea Mays
atcaagtctcacacatattatcactcatggtacagaaatcaatatcacatctttattatataataaaggttctgtataaaacaactaaatatcatatgacgacaacgatcctccgcaaccatagttgactaggagacaatggcatatatctttcacgaactcatcgtggcatccttcatgtcgtacatgttcttgacctacgaactcatcgcaggtagccctttatcttagtcgtgtgatcttgactggatgacctagattagatcatcaatcccctctactcggctactcccaagatgcggatctcaaaatcgacggcaccctatacacgctctcgggaccgtcagatctcagattggtgacaaagatccaaccgtctaaaccggtaccacacttctaatctccaccctccattcctcgatcaatagctagtgctacctcctctcatcaccgtcacgccttctcgtcgatctgcacttaacgagagagcaaggcaaaacccacgcaggggtcttaccggcgttggagacgatggcaacgttgaccacgacgtgggcggatccgcgaagcattcttgagctctagaaagaaattctccatcctccgtgcgaccttgcgcccagccacccaatctccccactccaccagttctagaaaatttccccggcccttcgctggtccccaaacgacggttgtcgatgatggcggctacttctccctctcctcccctgacttctgtttaacggtgaggctc

SEQ ID NO: 28203 - DNA, 223 bp, Zea Mays
cttgatttggttgatggtgtgacttggcctccatccctgccaccaggatagacggtcgagtggtttactgcttccgcaggagaggaccaggaggagtagcgtggccaggcttcgccatgttacttggttttctccgttagttatttctgctgcattaaaatttatgattattatttctaaaactccgacaatgtaatcactaatgatacctattaaatttgtg

SEQ ID NO: 28204 - DNA, 1444 bp, Zea Mays
gagaagactcagcctgtgacggttgggggcgcaagcagggagagttgcctttaaaaggagggtgacccctttcggaaggcgaccatgtcttctcgctcccttatgcatcgcgtctttccatcttccaagcccccggatgggggatccccgccgtcttttcgcctcatcgttggagagacgcaactccgtgggagttggtacctttcagccatcgttcggcttcaaggattttcatcacatagcccggttgctcccctccgctggtggtcacccaagacggtgacctccagctcctggatggggagaggcaatccgggctgtgatcccgatcccgccctcagcatcgagggtgttcgtcatcctcgctagggcggggagcgaggcgagccggggctctgcctcctgcacgggtcggcgggccacctcttcctccagcttctggtggtggcaatcgccctccagccctgcggcggagacgtcctctagccatgccggggaaggcgaactgttgctacccagctaggatgcaacattccgccctatccctgcattcgcggctgtgacaccccaggtgtctatttcgggttatgtcggaagaattatcccaatcttggatgctcagtgaaaatttctatttctcactcgcgtatgtctctgattatccagactatccattcacaattcactgagttcggagttattcgatcgcgagaaacagccaattttggagcctgttaaaacttttatttctcggaactaatgcaaactcaaaaatcattcttgatttataaatctcatccgaagctcatttaatcaaactctcaacggctgttatttgatctgagcccgagtttaattcctcgaacattgatctatgtctgactattttaatctgagtccgcactctcacacggaatactcaatttgtcgtcctctaatcaattttatccgactcggccaaatgtattatgttcgaaccaaactcaaaaccccgtatcgacaacgactttaaaatatcacgattcgccttctccgactaaaaatccaaagccgatcaaaagtttgagagaaacattgtttctaaaatagtgcgcgagaaaatttcaaagtgaaatctccaatgcgttgtccttaaataaattcttattcgacttggcttaatccctctccatccgatccaatttcaaaaatcaacatcggcgatgatttttaaatgtcgtgatttgtctctattaatcatagatccgaaagctagtcagtctccagtcattttgatttcctaatcgcacgtggacaaattttccgagcgacactgaaaaattaaattcttggactaactattttttttcttctcattcctcggactctcgtttgccagacgtcgattctccctattctccacaccggcaaatcccacgggagatttttctccctttgaacaatt

SEQ ID NO: 28205 - DNA, 635 bp, Zea Mays
ttatttccgctgcattaaaatttatggttattatttctgaaactccgataatgtaatcactaatgatacttattaaatttgtggtattatgtttttattgtatttctctgtgcctcaccttcatgtgagctagtggtattcgatcctggtaagtggctttatcggactagatccaagggactgacgggttattcctgtttaagtgtgttgctgcctttatgggtgcgacttgggcacttaagctggaataattcgggcggttccgccacagcggcgaggacggcagcgaggacctgccggtgcgcttgggagcggcccgctctttggctttaatagctggttcgcgtcccttgagcggtaccgcgaacgggagccctccggcggccgcgtccacccgggaccatgactgctgctgcagaggtcactggcaggtcccccgatgttagttgccccgcaggctcgaggtcgctcatacccgcgggggacggaaccagagttccgtttgtgatggcactttgaatgccagtgtttttgttcattatggctgtcgaggcctgaacatgtatgtaattttggcacggagccgtgtttttttcctcattttcgagcactaagactcgcctgttgattatctg

SEQ ID NO: 28206 - DNA, 350 bp, Zea Mays
cgccccccacacttctctcccccttggccgccaccccctgcccatctcttcctctctccattcttgcagccaccaaaccctagccccccccctcaatcccctcctcccaaggtgccaatccttgccgctcggatcatcgtcgtcgtggtgcgagtcttaaatcgttttggtggagggaagaagggaggaaggaaagggggagaatccaaggtgatttttgtgttcatcccttgttcatttgcgctgcaattaaattgattagaggttgcgtttgcgattgggtagagggggctgtccagaattttaggtggtgggtgaacagcagtagtctagcagtttctgtgtttttt

SEQ ID NO: 28207 - DNA, 552 bp, Zea Mays
caaaggaagtttgtttatttttttatatggtcgtgcacactggttaattcagttcaggtcgtatgtttatctttccttgctggccgagtaataatacttagtatgttttagtcatgatatatgtttatactctgttgctccctcttttatgcaatcttgcaaaggggatgctgccgaaattttatatatggatgtcggaagtgtagtgcagtagcattccgggttgtttgtggaaccatggagtgttacagtaaaaaaacacagaaactgctagactactgttgttcacccaccacctaaaattctggacagccccctctacccaatcgcaaacgcaacctctaatcaatttaattgcagcgcaaatgaacaagggatgaacacaaaaatcaccttggattctccccctttccttcctcccttcttccctccaccaaaacgatttaagactcgcaccacgacgacgatgatccgagcggcaaggattggcaccttgggaggaggggattgaggggggggctagggtttggtggctgcaagaatggagagagg

SEQ ID NO: 28208 - DNA, 287 bp, Zea Mays
aaatttcaagccaaggtttggaaccctaatctcctaacccccccccttatttttatctctccctaaactccaccccttaggtcatctcatcatatgcatacactttgattgttagaagcacctcacatagattatttttagcacctaagattatttagctaattgttgttcaaaagaaaagaagataactagaaataaaaaatagaaaatagaaatagaaaatagaaaaagaaaaaaaaggaaaaactctcccccttcggctgggccgtttccggcccaagccactt

SEQ ID NO: 28209 - DNA, 351 bp, Zea Mays
cttcaatatactgatagagcctagaagacggttcaagcaagccacacgaaaagttgaagccggagaaaataccaagaaaccaagtagagaaaaaagctttggttcctgtaggcgtattatttctgaaacacaaaacttgatctgagtgactgatcgtgagctaatgtaacagtatgaattatatggcttgaacatggtaggtgtaaaatgttttgttcatcggtagagtattccagatgtgatcggcttaacagtatgaaatatatagaactatgtgagccaatgtaacagtatgaattatataagttatcaagatattatatgccctcgttgcaacgcacgggcactgac

SEQ ID NO: 28210 - DNA, 977 bp, Zea Mays
agtcaatcaagtgcacggagacggagtgtggaagatttagaatgctcaaagtatgcttgggtgactcctccatgcgcttgggtgactcctccatgcaccaccggacagccactgtagcatgtccggtgcggatctccttccattcctggcacagccgaccgttggatcttcgggctggttggcgcaccggacactgtccggtgcacaccggacagtccggtgcccccagccgaccgttggctggggccacgcgtcgcgcgcggattgcgtggtcgaccgttgcactggcggccgttggctcaccggacagtccggtgaattatagtcgtatgtcgctgaagatttcctgagagtggctagttcgccggagctggcctggcgcaccggacagtccggtgtgccagaccgagctgagtcttggctgcttccagccaagtccttttttctttctcttttctctgattctaacacttagacaaatatattagtacacaaaaccaatgtactaagtctagaatcataccttcttgttgatttgcacttcatccatcatttggcatataattactcactcaatatgtgttgggcacttaatcaccaaaatatactagaaatgatccaacgacacatttccctttcacttagtgtcccatttgattgaagagaaaaactcactcggtctaagtgaccgtttgagagagggaaagggttgaaagagacccggtctttgtgaccacctcaacggggagtaggtttgcaagaaccgaacctcggtaaaacaaatcactgtgccatccgctcttattcgcttgtgatttgttttcgccctctctttcggactcgtttatattctaacgctaacaccggcgtgtagtgtgtgcttaagtttataaatttcagatttgcctattcacccccccccctctaggcgactttcagacctcatgaccctgagcctacacataccctaaggcgcc

SEQ ID NO: 28211 - DNA, 494 bp, Zea Mays
ctccggtccagacctttttattgacgaccgaaaggagagtttggtgaagtcatggaagatgtagagtcgaaggaactgcagttcctttcgaccattttagtatctgtgctggttactgataatgcgaaaaacgtttttggttatgcacaacttattacaataatcgggtttgaggcttctttgctaaaaagaggttgaaatctgtgctgttctaaaaacgagcataaaaaaaaactgttgttcactttgcttcaatgtaaacgctgacttagtgatcagtcagtagtgccgccatctgaaccaaggaaaggatcaacccaaaaaaacaaaaaacaaatcagcaaaaaaaaaaatcctacgttctccgatccatcgcgaaatattgccacaaaaacaactaaaaatataaaataaagcagtgcgcagcaagctagaaaccaactcggcaggttcatccttcaaaacgagcgaaggatttgcgcgatcaacgtcac

SEQ ID NO: 28212 - DNA, 256 bp, Zea Mays
gggaaataggcctgagagcaggtgtctctccttttttttcttttttttaatttatgttttctttctcttttctattttggtattcaaatttcaaatctggattcaaggttcaagttcatatgcacaatcataataaaactctagcatacaaatgcaaattttattttacatatattaattattcatttaagcaaatgctcaaaatacacaacacatacattatttgcttttatagttcatttaaactttaatattc

SEQ ID NO: 28213 - DNA, 142 bp, Zea Mays
gtcgtgctccggactttaactggaactgagcttcttgagtcaacaatagaggtagaataaatatttttgatattagttgatacatagcagggcaccaattcattgatggtataaaggaaaacgtatttaaatcatagatggc

SEQ ID NO: 28214 - DNA, 496 bp, Zea Mays
tttatccatcccagagatcctcctgctggtcctcctggcgctcgggtgctacctgctcggcaggaaaaggggccgcgccgaggcggccgcggcgccgcagcagttcgcgccgccggcacctcctccagggctctcgcccaagtagcagagcgggtggtcttcgttgtacatgttcgttctccagtctccacttgatacccacactactctgttactgttagctcattgtatttgtgcgcgctttttttttatctctccctctctctctctccttgcttgtagtactctgctgttctgttgcatgatgttcatgcgaataattaggtttgctgtccgactgattagaattttctatggatgagattgtatttgtggcaataagttcgattttcattgaattttggccatgttcatggatgtatctgtaattatggtactaaatttctctggctactgtcaaacttgcaaccagaaactttatacggaccaccttgtc

SEQ ID NO: 28215 - DNA, 1530 bp, Zea Mays
aacataatagcactaggaaatctattaactagccgatagaaatactaaatctatctttcgcactactaactccatcgtactccacatatatttaaccaaatatattttatacactataccatcacatcggtcactagataagaaaatcgtcgatcatatcctaccccaacattatcgatcacaaacatagatgatactaactactagagcaggacatcgacttcatcttacacgcactgaacacaattaccatcgatagatttatcgacaatcgtataaaatactgaatttaacctaggcgtcaccgaaatactacactctgtaaaatagaactagttcgaatatactcggcaactaaactcctcgaagcacaactcgcatcgctggcatctcttaaactttataagcaaactaagcgtcttatttcacgatcataaagttaatagtaaaaacagtaaatcggatcactgttccaatagctgactcgaatccacgagatcaataatgattctccaatttaggcaatttgtcgagcgcttggcagatactatccgaacttcacacaccccaccatccaacatttggacatcttctcttagggattcttttgtcagcgtgattccaactcggaggcatcacgtaggaaccaacatggagacagggtgacgacgacggtaaggcaaaggttggagacgatcggatatcaacgacaaacactagaattttacgacaggctgttgtaatgggacgtcgatatactatccatggcaataaggagatcgacgtaggtgaaaccgatagtcgaacaggaactgcgcacaccgacgacgcactggatcaacacatacacagtggagcagggcgcaggaacgctcggccggacgcggcaagcagagaaaaaacgggaggaaggaggagcgcgacgctgggcaggacccggacgggcgagcgcgccagggagttccagggagcagctggggaagagaaattggagaacgcgcaggacgaactcggccatggggagcaagggagcaccacggcacagggaatgggagaaacgccggcgagctcggcgagctgcgcgcgacgcgagcagagagagaagacgagagagggaggagagaggagcagggatggtcggccttggggctggggagcggacgggacgcagctccacggcgcggacgccaaaccaagctgaggggggcgcggccgacgagtagagcgaggagactagctgagagagagagagagatgggggaagtccggcgctggagaggagtaaggaagatgggcgcgcagaggagcttcgacggtggccatggagtgagcagggcagcgcgcggggagctccactactgggaagatgagcaccgcggtcaggagataaggccgatggcccctgcggtgaagaaatatcaaagggagagagagagctaggcggtggagatttttgcttagagcagagcggcggcaaagcatatcggacccaggggcggcggcagattttttgctacgcgagaggatgac

SEQ ID NO: 28216 - DNA, 669 bp, Zea Mays
ctcatatatatattctagatcttttactgcacgaacctaattgtctccaaagtagtacagcctaaaagcacttgcatacaaataaagtacgttccaaataagtgtggctttttccaggttacaaaggagctaatatatcctcctacaatgtacttcactgataagcacacccatatattcagttgaaaaatattgaactaatagttactttacctcaacaaacaacataatcttcaatccgatattaaaaaagaaacaacaagaatataattcttcctcctttttgcaagtcatattcataaatttattgactatataagtacataacagaaaacaactcaattttctcctcctggactacataatgaccaccagtcaggtcaaaggaaaaactcgctacaacccaacttgatcttctctaaaaaggttaggctcctaaatatatataccttctttttgcacctacttggatattacctactgcacgcagaacaattaccttccaaattataatgctcctgaactccaataaactgttctaaacaatgctctgtccatttattttaccattatgtactgttttacccaatatatatgcaaactgacaaaggaacattctacataggaagagatggacacgagatgcataaagagtagacatgcttctct

SEQ ID NO: 28217 - DNA, 199 bp, Zea Mays
gaccaaccaaaccgtctagctcccccaatcccatgatgcatgcgtcaatgcgtgtgacctcacccatactgtacatggcaccacctactgctcccctatcccctgcctgctgtgttcactaacccacctccgccccccgttccgggtccccctccccgtcagaaggttccccagatttatagcccggagtagcggcggc

SEQ ID NO: 28218 - DNA, 278 bp, Zea Mays
ctcaaattctatgagttaagaacaaggcaacacaaaatgttaatggttaaagtccttcgtccttcgaagcattatttcacatagaatataatgatcttcaaacgaaggtcatgaaggacgtaccttcatcatcgcagtatatattaatgaaagaagaagcatatgaaacatgagaaataacatgaataatcatatgaccccttaatatatctttttatatcatcataaatgaacatgaacaatattaaattacatttgtacctttggtttgacagaag

SEQ ID NO: 28219 - DNA, 485 bp, Zea Mays
gtgaaatcgtgtgcgaggatataattcaatttattctttggcacactgtttggcgacgaaatcgtgtatgcatttgcggatctggtttcggctaattttggtcgaatcacgcagagcagattaaaataccgaagccgaactcgtttcaatctggtccgtttacatcgtggccggaatagtcacgaaaattatccaaacgagattcggacagaaccgtctaagctgttattcctctgactttctgtttcatgattcgaaaaataaaatgtatagccgtgtagcgcttcgacctattacccattgctaaaaatcgggattcaaaaatatctacgaaattctttaaaaaaataaaaaaagaaaatatcctctaatccttatcctcccaatgccgctcgtggaaaaaaaaaatcccagccattctcctatcttcttcacgagctggacctctggaacactcacgcaaccccgctcccacatcatccctt

SEQ ID NO: 28220 - DNA, 327 bp, Zea Mays
agcaaatgtgcaaaacatgagtaatctttaaccaaaccttaagtaaccttataaccagcaattaggggaaggaaatattgcaaaaagacccctggagaaaccctaattcaaatctccaagtggagagagagctagagctctctatttctctctaagttaaaaactacacctacactaaagatcagtcgtgttcaccttgaagctggcatcaaacccacctatgttctataccaaaaatgtgtcataccacccaaggcacccactggaaaaagctgagctcgagacttggacgtttgacatgccttggcatggtttttgtcgcaaagt

SEQ ID NO: 28221 - DNA, 835 bp, Zea Mays
gtttagtataaaataagtagggtaccttttatttgaataaaacaaggaaaccttagaaaaccctacaaaataaccccaaggtaaaaacacccccacccttgggatagttaatgttttgttattaagaacttagggaaaatatgaaatctgttgtttgacatttttcaaataacaatgtagtagaaagtgcctttttgacattaaactttagaaaatcataactaaataaccaccccttagctttctgtggtttttggcacagaagcctattattactgttagatgccaacaaaaataacctttaagacagaccccacctctaattaagagttgtagtacaaaatggcccatttgcccaacctttattatttttgtctaaagcatatcctttttgttttgaatctcaacttcctagaaggggctatagtgaccaatggcaacccactgtaatttttacagaatttttggagaatattaaactactgttgtagttcaaacccccactagaattcataaatagaaattaaagaaaggaaaatgaataatggaaattagtgtcatcctaaaacccttgtaaattatccactgaaatatataaagacaatacaaatccactatgtttatcctcaacaaaaatctaaacctaggagtgataagcataaaccactaaaggccccgtatgaccaagtaaaccctaagttactccttaacttagtttttcttctctcaacataatgttattaaatcttgcataatcatgacatacatgttcattgaatttcgatagactgtaaccttgctgacggagagtacgtcctcgtgccggagcaaggag

SEQ ID NO: 28222 - DNA, 266 bp, Zea Mays
ctctatagtggcgtttctagagctgtttgcactggcgttttcagtgccgccagtgctaggggccagtggaaatcgccattttcactggcgattattctagaaccgcaagtgaaaatataatttccactggcggttttcttaagcaaaccgccagtggaaatatcatttccactggcggtgttttttatttagccgccagtggaagttttcccgcctttttttaaattttcaatcagtactaaaatttatatatatttacacacaca

SEQ ID NO: 28223 - DNA, 244 bp, Zea Mays
ctaaactctggcaaagctaatgttccggaagcatcgtgatatttcccttctgcgggaatgacctctttcaaaatgaatgtgcacaggtactcaactatgccatacaatgcaccttcagttaagttctccgggctttcttgttgaaatttctgtaaagaaagtttataaacatcatctatttatactcaataataacacatttacatctttaatgacataaatacatacgtgactattactaata

SEQ ID NO: 28224 - DNA, 521 bp, Zea Mays
ccttaggataaatgatgaagcatatccagtggtccctgtacgaatcaaacttgtgatacatgtgtattgaaattattaattttatttatgcaaaatcacacttacttaaagttgtacgggggccactatggattccctatcttgaaattgaagcattgcgtgtcctatgtaggtggcgtatcttgctttaaaatccttcttcagatcctggctacgcacctcaatttcttcgtcagttagtctctgtaatgcttcgttgtcttttccgattgtaaaagtgtggctatcctcgcatatctttattgggttgagatactcaaccctttaactggcactagcattgggattggtgccataaaggatctcctactgatcatgttgcattctgcaacgcacacgtgcatgtcagatattgaaaatttatacaactcactaataataacacatatatgtggagtatgagtgacacttacaacgcacatatggttacaagttgcacgtcgagtctctgaaggttcatc

SEQ ID NO: 28225 - DNA, 94 bp, Zea Mays
cagtcgtccaaggatccaaggacgccatgctagacatccttgggcccgaaggtatcgaggcacttggacaagctatcaaaaattttatcctttg

SEQ ID NO: 28226 - DNA, 1110 bp, Zea Mays
tgtcaatataccagctcatgcttttattggttcaaataaaaatgtctttgttgcattcgaggacatgtggttaatgatgaaccttcagagactcgactgcaacttataaccatatgtgtgttgtaagtgtcactcatactccacatatatgtgttattattagtgagttgtataaattttcaatatctgacatgcacgtgtgcgttgcagaatgcaacatgatcagcaggagatcctttatggtaccaatctcaatgctagtgccagtaaaagggttgggtatctcaacctaataaagatatgcgaggatagccacacttttagaatcggaaaagacaacgaagcattatagagactaacggacgaagaaattgaggtgcgtatccaggatctgaagaaggattttaaagcaagatacgccacctacataggacacgcaatgcttcaatttcaagacagggaattcatagtggccccgtacaactttaagtaagtgtgattttgcataaataaaattaataatttcaatacacatgtatcacaagtttgattcgtacagggaccactggatatgcttcatcatttatcctaaggttggaaaggtgctggtgctcgactccttgcacatcaagccttcggcctattcaaaattcctcatcatcttagagctgtaagccttttctatgcatgcatacttatatcgatgagaattgtagcataacatgatgactctatttgagatcacagggcatttaggttttataagctataagatggaaagtacgacacgtccaaaaaaagcgtgccactaaacatccattataactggtcggtaagtatgtgaatttatgaatacatatcatacatatacgtacataagacaatgttgcaattaaataaccaatctcctgttgtgtagtgccacaagcaaccgcccagatcggtcctatgtgggttctacgtgtgcgagttcatgagaatgaacagacgatacatcacgaaccctggcaaggtattattagtaatagtcacgtatgtatttatgtcattaaagatgcaaatgtgttattattgagtataaatatatgatgtttataaactttctttaca

SEQ ID NO: 28227 - DNA, 673 bp, Zea Mays
gcgaaaatcttattaccaaattttacaagttacatcaaatttacaatgtacatgatgggagtaattacactatgttttgaatgtataaacatttatatgtttgaaatatatactagcttaagtgaccatcctcaataagaagtataaaagaagtacttagacttatagaaggtcgtgcccaccggcgcttaacaccaatcacaatcaaagtgactcataacctgcagcaacaatgggaataaaaccctaagtacgcaagtactcagcaagacttacccgactaaagaaaagactctctccagggtatgctagttttaaaaggatttaaggtaaggcttatcaagaatcaaggactctgtttacagaaaagcttactatgagcggatccttactttcaacattttaatgctagattaagtattaatagaccttgtttgcatctagtctaatttcatcatcactttaatcaatacaacatgatttttgctcattatgattccatccatgacttagattgcaagtcagtgaccaagtcttcatatccgagaagtaatggcgatcctgaatcgattaatacctagctggggatctccaatcacacgatatatgtagcacttaacctttgaatatgtcaactcgccaccggggttcttaagaccagatcatgttcacg

SEQ ID NO: 28228 - DNA, 374 bp, Zea Mays
tcctattctggtattagtctgcccgaggtaaagcttacccatgacgaggcatgtgactagttaaaagatcctcggtcatcaggcctacattctctataatccttaaccaacctgggtagaacatcacctgttcctagcccaagtctcgatttaagtacttccatcctcaggattgtttgtgttcttaggatgaaaagagcattatagggaactttgcagtaagatcccaccattgctcccaattaaaatattcttgcaggcagaagccatccttcctcaggataacccctaagctaggcattaacgcaaaggacaacctctatccgcaagatttacctctaggcaaggctaagaaattttgtaaatcatatttg

SEQ ID NO: 28229 - DNA, 150 bp, Zea Mays
cccccaaccaccacaacttcaagcatccaagttttctgaacatcacattcaatacaagagctctagcattcactacaagacacaatacaaaagatcaaattctctccgagtcccaaatccactccaaacacttagtggcttgtgagagag

SEQ ID NO: 28230 - DNA, 239 bp, Zea Mays
atcaggacatttttattatattatcatgaatgaatatgaacaatatcgaattacatttataccttcggcttgacagaaggtaaaaggctcgagagtgacgtgcaagcgaatacaagtcaacgtgaacagtacagtgctactattcatctatttatagacacaggacacagcttgtgtaaattacattcatgcccttgacatttactattgacctagggataatctatcaaggactagac

SEQ ID NO: 28231 - DNA, 999 bp, Zea Mays
cagaaaactaaattcgagatcaaaacctaaccccacatctaatacaacctctaatcctttaatccccatgatccaccacctccaaaagcacataattacagggaggaacaatgatcccatccatacctagggtttccccaagaaaatatgcaagaagagatggggagaacacctccttgatcctctcttcctcttcaattcaacgtgctcctcctcttctcgatccttgctgcgcagggggagatcttgggggaggaagcaatggaggatggctgccatagggggagggggcggccagccaagggggagaaagggggtggcagccaagagggggggtgaagggaaaaaaaggagtggccacctagggtttttgtgggagaaagaaacgacgcctcagatgacttctatctttgcatccaatggcccacaaccctttacctcatccacgcaccaaagattaacttttggtcaacatttttttgggatattacactcgaccccccttaaaaagaattcgacatcgaattcggccactccaagcaaaacacccaaggtaccccatatagcaccaccattcaaaacatgggtccattattggtcttaattaacacaagaacttctaccttggactaattgtctaaggaaactacatgacctgacatcaagcatgaaacaacatgcaatgaagctcaaagcaattcatagttgcaatcaacactacaatttcataccatcaaatttggatgcagctatacatcaacatcaatgtcttaagacaacactcttttatgaaggggtaatatgcaccaagcacaacccttaccaacttcaacaattaattttaattaaatggtgaaacatctacacccgacgaatgtataagaagatcaaacacctcaccttaaagcaccatgaaacaagtagttctattgaaacaaaaatcctaatcttcctaaaccttattcttgccatcatgaaaagataatcatgtaatctaac

SEQ ID NO: 28232 - DNA, 626 bp, Zea Mays
ccgtcctccattgcttcctcccccaagatctccccctgcgcagcaaggatcgagaagaggaggagcacgttgaattgaagaggaagagaggatcaaggaggtgttcttccccatctcttcttgcatattttcttggggaaaccctaggtatggatgggatccttgttcctccctgtaattatgtgcttttggaggtggtggatcatggggattaaaggattagaggttgtattagatgtggggttaggttttgatctcgaatttagttttctgcagaatggcagatttgatagtttctgttcatgccagttttccgtggtcttagtggcctcaaaaaaataaaaagtctatatatgagtcgtagataatttgtggatctttccgtggccgcgaagaacacctcaatcggacatcagaacggaaagttattgcagtttgattatagcagtttttcagtctcataattctttatagaatctgttctcttaagagttaggcaattttctcaacagaattaaactgtgtgttttgtaaaagaagttgtagataatttcataagctttctagattgttaaagagtgcattcatatgatttgtgaaactccagttatgttggttttactgtg

SEQ ID NO: 28233 - DNA, 339 bp, Zea Mays
cgattcttcaagcgaagatgaacctccaaggacacgcagccaccgatcctcatcacgctcatcacggtcatcacacaaatgccttatggcaagaggtaacaaaagcattccatcctctagtgatgaaagtagtagtgatgatgaaggtgagggaaagccctctgtagatgagcttgcagaagccgtagaatttttccaggatgtttgcactaagcaaaaagctcaacttaaaaccttgaaaaataagttggttagctcccaaaatgattataaaggtttgctaaaaaaatttgaaacttttgcaaacttaaatagtgagctgtcaactaaaattaagct

SEQ ID NO: 28234 - DNA, 365 bp, Zea Mays
ttattccacggtgcttttcattatcactcgttttcagcagactggtcaacaacatgcgtatcggtacccatttttttattttttattttttttaaaaaaacatctgcgagtatatagtagtagtgcttttaattacgtggagtctgattggaagtgctgttttccaatggacaggcaggcacgcggggcaaactcgctatgtttttttcttttctcttttctaacgtctgcagtggaggtggagcctgcccgagaaagtagaaggcctggctaatcgaagcgtggcggcgcaattatttgatttgattaggacgcacacatgcatgatggtgggatgggatgaagctatggtggtaggtatacat

SEQ ID NO: 28235 - DNA, 431 bp, Zea Mays
cgcggattgagcgattgcgctgcccaagatcttccacgggctccccgcgcgacccccagggagagcggccgcgagcgcatcgctccgcggatttgcgcatcaaagatgaagatacagtgccgagccaagtggatcccaggtgttgtggttcacggctcttctcagcacgcgacgcgacggcgatttcttgttctctctcaaatccacgctcgccggcgatttccagcaatctggttggtcgtgctctcaagaactccgtggcgcagggattcaatttttttttgacgagcaagagccaagagcgcgccatggttccccaacaacagccgaggataactcgatcttgaagggcactgggcgccgagtgccgatgggaaaaaggtctgggcacgttggagcagagggcggaagcagggacgcgacggggagct

SEQ ID NO: 28236 - DNA, 2830 bp, Zea Mays
gccagtaaacacataccactatactcatagtcctgcacttcatcagttgtatccaacagttctgacattagcctgtatctatgcggcccttgatcagaaaaagctgaatcctggctcggtggtgtgacaaaaacatgcccttgtgcaacactcgactgtggtgtgacaggtgtgccaggtgcagcttgatcataatcagcagcacccccttgatcttctgaaactgcatcttcagctgactgttctgtgggttcaggatctcctattgtagggttactgtcagaatcttcataatgaacaataaactctcctgacagctgatctgtgttgcctgctgcattggcccagtcccatgacacattttcatcaaatatggcatctctcccaaccactagcttgctagtagcaggattaaaaaatctatagcccttggttccactttcatagccgatgaaaatcatcttggctgatctgtcagatagctttgtcagaccaggtccaaccaacttcacatatgcaacacacccaaaaatcctcatgtgcttcacgttgggttttcttccatgccaagcttcatatggggtcatgttgttcaggctctttgtagggcacctgttcaacacatacactgcagtacatatagcttcgccccaaaaatcagaaggtagtgccattgtcttcaataagcatctggccatctcaactacactctgatttctcctttctaccaccccattctgttggggagtatagggagtagtagtgtaatgctttatcccaccttcactgcagaaaattgagaatagattggaattgaactctcccccccgatctattctcaatgccttcaacttgccatcacattcaacctcagccctgttctttattttcttaaaatattccagagcctgatccttgctcttcagcaattccacccacatatatttgctgtgatcatcaactaccagcaaaaaataggatgctccccccagagactttggagagatatgcccacacaaatctgcatgcacaagttctaagcccttttctgccctatagctggacatttttggaaatggagatctgtgtagcttcccaagagcacacccatcacacactttctctacccttgttactgttggcaaaccagtgaccatgtttttggattttagatcactcagggctttgaaatgcaaatgcccaaatctagcatgccacctccaggaaacatcatcaacttgagcttgcagacaaactggtgagtctaacccaaacttagctaggtacaatttgttcccaactctaggtgcagagattagcagtgttttctcctgatcatacacacacaatctcccattctccccaacatatttgaaccccttttcttccagctgtcccaaactaacaatgttacttttcagttcagggatgaaatacacatcagtgaggaccttgtgacccttttggcgatcttgaatcaccactgaacccatgccttggattctaaccttagagccatccccaaactttactgagcctttaacaccctcattcagctgtgacagtactgatctgttccctgtcatatgattactagcgccggtatccaaaacccacacgccatcaggaacaagcacaggtgttaccttctcagtgagatgaacctgggacggctcctgttcgatgtcgcatgttgccaccatcaaagcgccacagtggtcaccgccgccgatggccacgttcgcctccggctgcgccacctccttcttctccttcttcgggcgtttgtagtcctccgcccagtgaccgtagatgccacaatttcggcatcggcctttccttcttggcgtccccatggatgtcagtcttatctgacccgaggcgccgccgtcagagcgcgctattgccttgcccttggaggagacactgctgccaccgcttcctccagccttgttgccggggtgaaaacgatgcttgtgcttctccagccaaacttcctcggccagcagcagccaccctgccttgtccacgatctgatcgatcttgtcatcaaaacgctcttccaccgccctcaaccgaccgaccagctcttcaactgtcagggtcttgaggtcgacgaacatctcgatggacaccacaatctgtgagaaccgtgatggcgccacgcgcagaaacttcttcacgacccagaaatcgtcgatcgtctcgcccaaaatcttgagatttccaaccagattggtaattctcatgccgaaatcgtcgacagactctccctccttgaactgaatgttctcaaaatctttcaggagtctttgggcattaacctccttgacgcgatccgcgcccacacgcatcgtcttcacagcttcccacgcctctttcaccgtgttcttcctccccaacgtctgccacatctccttcgggaccgagcgcaggagcacactcatggcctgtcgatcttgtgcccgcttcggcttgtcacctggggtgatcacttcccagatttcaagcgcttcgtaattgcactgcatcaacatggcccactcggtgtagttgtcgctcgtgagcatcggccacatgatggaactctccttcacggtagacttggtggatgtgtcgcccatggcggccgacagtgatttggcggcggagcttgggatctcttcctcggttcactctctctctcgatggaccactggatccaccgtatacctctcccctcggctctgataccacgtgttggaaccagccgtcgaagatcgacgccggcgagtccgcgacgccggccggtggtgaccgcggacgctggaaacttaggaacgagagtaca

SEQ ID NO: 28237 - DNA, 716 bp, Zea Mays
attatggcaagtataggttgtggcaaggaagagtataataaggaaagacttcatcctgaactgtggatcttgattccgctggcgattcaacttgatctttgaagtcttgggttgatgcttatccttctttgtcgtggttggtattctttggcctttcttgttggagttgccatccgagttaaggacatatggtgactatatatgtgagtaggatggattatgtggtgtaggtaggttagaatcccttgctaggttaaaattgaggggttatgcaactatcggatggttaaggtagttgcataaggccaagtcggtctgtcgttcttaattttagtgcagggtgaactaagttaagacatgttctattagagtagagtctaatctatttcatcagtattatctaacatgtttgataagccactttagattagatcggatctaggttagattggtgtgactagcttgaactagataagatctaattaatttggattggatcatgattgttactccgaggtgagataagcaaagtggttaggataagataagataagatagtttcttttaggatgagataaatctattaaggtaagaaaatatcttttaagataagaaggatattatgaagctagatatattttaatggaggatattcttagtttatctagtgatattatgatttcttatgtctttatgtatatgcagatggaattgtg

SEQ ID NO: 28238 - DNA, 406 bp, Zea Mays
ttccatcgcaactttttgcttcatccttccttgtatactcctacttaaatgcacactaaagattgatgtgcaccatggtcattgtacccagcatggtgatattactgtgatttaacctcactgttgtaattataattaatagcatgtcaattattttgcagtttcaagcagttcgggaaatggtccatacaaatccacaaattttgcagcttttgtattctttgtttgggattacattctatggcctcttatgtagcacctgcctaaacattttgctggtagcacgttatagcctatgctggttgaattgagcaagaataatcctccaaatctaaggtttattgatagtatcatgatgagtgtcttcaattactaaatgagccctttgagggcggaggggcaatca

SEQ ID NO: 28239 - DNA, 911 bp, Zea Mays
gagaagagctcatctcccctcaattcaaaacttcgtcaaagttgctctattcaaagtttcgagttggaatacttcgtagaccaaggtatggagtctcactgattcgttttgtatattgggttgtgattttttgattattagtttccattgttgctcctagaatatatagtatagttaatatgatgactacatttgatttgatagtttgtgaaatccgattataaagtctattaggtacatgtgttaattataatcgtttcttagatgaaagacatgtaccgggaggcattgtggcagaagagaggtcgtcctcgggagttatatccggacgtatctagtaaggatgctcatgatccttctaaacttcctgtgcctaactgtgactgtgacaaactggcttgggtatgtcaatccaaacatccagacacggctgctcgttgtttctacctttgtggcggttttaacgtacgtaacttatgacttgtgacttaatattgtttactagatgtgtaataatgattcgttccattgttttaggagcacactgaggtgttttttccagtggatcgacggttatgataaatttgaccctcgatatcttcttttcgctaattggttgtgtggaaggactagtcatgagcgttttaagcgttgggtaccacctcccccaaatcctccaccaatgacggatgcggagaaggaggtagcaacagaaagaaaaatggacttgccgcctcgatgcgattgcggagatcgtgctgtcatcgacgaggaatatgtgctaactcaatactaaaatactaaacactaaactaagtaaatactaactaaatgctaaccactaactaaccactgactactaaactaagtaaaaccctgctaaaaatgctaactaatttctaaataaaacc

SEQ ID NO: 28240 - DNA, 325 bp, Zea Mays
cccattactatttccgtatggtgaaagaggttaccaacttggtatatattaccatgatacaaacaatgagaaaaagaaaaaaggacgaaagtaacaatgcatgaatttttcaaatatcacatgcattttagactagatcaaccaaatccatatttatgttatggacgattatcaaagcaagtaatagtcgattgtcgaactttagaagatgaagatagattacgatttattgctaagaatcaaaataaattacagatagaatatttacaaggattagccgatgcagtagaaaaaaggcgtagtacaaggcgatcaaattggaaag

SEQ ID NO: 28241 - DNA, 491 bp, Zea Mays
ctcctgttcatcttctccagaggagctcccatgaccgctcgcctggctctcccgcagcagctcgtcgactgtgcactggaggaggtggtgctcctcgaccgcgcccaagagcaacttggcttcttctgtacatcttctctgtaggggagctcccacaacggctcgcccccgctcgcacgttgcagctcgtcgcccgcttactggattttgcagagaccctcgactacacccaagacgaggcgaggacgcggacgtctgctccctcggctggaaatgcggcgaggatggcacgccggcgggcctcgtccactgagagatcgcggcggatgctctgcttccctccggtgtcctaatgagcgaggaagaggccgatctcccgctgtgccgctgacggacgttgctttggcgagcgggtgtgggaactcgattttcccttagatttacggggaaattttagggttttggggacaatgtttttttgaagagttttt

SEQ ID NO: 28242 - DNA, 514 bp, Zea Mays
ctgagacacacgacaaaagagctgtgtccggtagtgatgtacctatgatattgtaaatatgtatgtgtcattgcttccagggtatttactgtttaagatctggtaggtgtccatctttgtcaaatcactgtacaagtgttcagccagcactatgattatatggcttgaaaagcatttctgatctcatagtaatagtacttcagtgcaaatttttgttttgcatatatatgggttcagtttgccttcttcctgtttgagaccaacaatttagcacattgttgttttacatatatatggttcagttcaatttctatttaaatacatggttgttttacatatggttcagttcactttcttcctgtttgagaccaacaaaaaaaacacaacatatctttactttctatttgaatcctgatgaatgagtgcaaaatggtggctgccaactctgaatcctgatgattgagtgcaaaatcctgatgaatgattgattgcagtgaccaaatcagcgcttaat

SEQ ID NO: 28243 - DNA, 532 bp, Zea Mays
gtgaagctgagctgctgcactcacgtgtcgacactatggcacatctcaagcgtgtgtggcacgtacggattttccctgtggacggccacgccgtaccaggtacactggcggaccatgcatgcacatgggccaaaaaaaaaaccggcccgaaacggagaaccaggtcgctaccgcctaccggtaccgactgtcccgctcgcgtgcttgcaacttgcagtgcaacggtgcaagtgggcagtggccacaatttcctcgtctccaccctccaaaattccacggaacggaacgaacgatcacctcgcccatccccacgcgggggcacccaccagccccacacgtcagccgatcaaatcaaaatcttggcccgcgcggcagccggcagcgcccgcggtcccgaagcgcctctcgtccacacaggcacacagccaagccccgtccggggccctccgcccacacccacccgcgtgccggggcggaatggcccggaggcgggcgtgatgcgcgctgcgcgatttatacgcgccaaccccgc

SEQ ID NO: 28244 - DNA, 258 bp, Zea Mays
tggccttgataatatttttaatatcatggtgaattgccattcagaagtggaggtaataccttgtttatgtgtccaatagtatatagcaattataagctcgttgcaataaaataacagtaaagcattgccatctactagtgtatttgaattgtaacatgttctaggaaagatgctaatggacctagagtccgagacaaaagaatacatattcgcagatggttctagctcacgggtttgaccctcaatcacaactgaaat

SEQ ID NO: 28245 - DNA, 135 bp, Zea Mays
agcttcggcataatgacatgtctcaagacgaaggagtgaaccgacttaaagatgaaatgaccaataaacccatgatagtttgtgtcatgattgtaatcaattgtaaagggcataaatgtaatttcacacaggctg

SEQ ID NO: 28246 - DNA, 326 bp, Zea Mays
gtcaatgtcacacccagttttggaaggcaaaccgaatgcgaactatgtacgtgctaggatcagaattcacgtacatagcgattacataaatgaacatcatcgcatagtgctcgaataataacataaaagagtattaacttattacatcacgatgtcatagacatccacatagtcatcaactcaacgagtaaatcaaagtgctaaacgaaacgcagtaaagatagggccttcacaggcagctgactgggagtttgccgccaacccacacctagaactagtcgtagtcttggaactcttggaagtctccttccacggcttcatcttct

SEQ ID NO: 28247 - DNA, 1373 bp, Zea Mays
atgctactaaactacacatctaacattcatgtataaaatttcgacagtgtctcctttgaaaattgcataaacgggaaagcaacaaagtataaatagatatcatgataagaaaacataatagacattaataatctgctagcaatgggaagacgaccataacgacatgaactgaattaaccagtgcgcacgactagttaaaaacaaacatcctttgataagaagtttctaattaaatcatgactgcgcctgggcagcattattatgagagtgaaggtgtatgtgctgctacttcccactccccttgatgagcaacaagcacctgcattgagtaatgcaagagtgagatgaaacatctcagcaagctaattgttttgacgagatatttaaaccacattgaattaatcaacattttaaaagaatcacaatcaagatcagaaatacttgtagatatagaactcagtagtcacaatataaccaataccatctcatttcctcgaacaaccacaataggttgtataacacttccctgcatcaacaatacctgcaaatatcacttcaatgtatgcataggaatgcaatgtgtaggtcctctatcttcatacctctgagggtataaaaccacatcatcttcaaatatcacttcaatgtatgcatatgaatgcaatgcatatgtcctctgccttcatacctctaagggtatgaagccgcatcgtacccctcctcgggcaacgtacgatgctaagttgtactggtacggtcggaccataggtcacgacaaaacttcagatgcaaatgagtcatgcaatgtatatggcatgctgcatttatcaataaatttcacttcctttaaatacaatacaaatctcaaataatactttatctgccttcagatacaatgcaatcctcaaataatacttcgtatgcctttagatacaatgcaaacctcaaataagacttcatctgccttcaggggtgtgaattaatctcatgggtcatacttgaaccataataatcatcaatatatgatagagcatcaacataatacaatcaagtaaaacatcatcatagagttcaattatgaaagaatccaataattctgcatattagagtgtaggtgatagaaataacaggtcaaaataatagcaaccaccgctacattcacttgccttcatcgaagaagaagaatgtactaggcatgatctggagtgtagtcacctgctagcggggcataaaacttagtacaaatatttcacaaacatttgccaacaatcaacaaaacactcctacacttgaaaccaagacctagtggaaagactcccaccctgaaccacatgctatacagcagcagcgctgtttgttaattttgtatcttt

SEQ ID NO: 28248 - DNA, 634 bp, Zea Mays
gtcatacttgaaccataataatcatcaatatatgatagagcatcaacataatacaatcaagtaaaacatcatcatagagttcaattatgaaagaatccaataattctgcatattagagtgtaggtgatagaaataacaggtcaaaataatagcaaccaccgctacattcacttgccttcatcgaagaagaagaatgtactaggcatgatctggagtgtagtcacctgctagcgggcataaaacttagtacaaatatttcacaaacatttgccaacaatcaacaaaacactcctacacttgaaaccaagacctagtggaaagactcccaccctgaaccacatgctatacagcagcagcgctgtttgttaattttgtatctttaaaattaaaacattggtgatatcaaacaaatactctaagagtatctacacaaaacaatctacaacttcggtattcaatggataattaaattctgccatcaatatattctaaaacatctgacaagataactgactgaatctgttttagacagcagcctagttaacttcaaaattcgatatctcccaaactactgaaccaaaaattatgacattctgctggcagtaagaacttttatccctctacaaaagtcttt

SEQ ID NO: 28249 - DNA, 554 bp, Zea Mays
tttttttgagtcatagagcgatgattaggaattgaaccctggaccccatagaacagcaagcaaagaaactctattacggctagatgaggactgctgttataatagcaaagcagagcacacgtcttcaggtttctattacggcaggaactgcaccttgccgttccctcaactttcagcagcaagtttcagcatacaagtttcagcattccctacagcattacggcaggaactgcaccttgccggttccctgaactttcagcagcaagtttcagcatacactgctcctacatttcagccagctatccaagcagcgacgatgcggggggaggtggccgcaaccacaagcagagaggagctcgatgaggcacgctgcagggaggtctccctgggcgcggagaggagcttgactaggcgctggcagggagatctctgtggcggctaggagctggccgtgaaggtctctgcgtggaaggaaaggctgggaactgggagctggcggcggcgcagcggggcggcggggccgctggagctagtggcggggctgcctggcgtcg

SEQ ID NO: 28250 - DNA, 243 bp, Zea Mays
ataaggaaacctacctctttactgaggagtctatttatgacgggtctctttcaatcatttacctctctcaatcggtcccttataccggttgagtgttcttctcaattcaaaggacatgaagtccccataaggatccccggatccccacacacacaaagtctctttctagcctttataaagaatgaaaataggaatggaatgagagtacggatgaacaacaccaagcaaaagagcacaagaaac

SEQ ID NO: 28251 - DNA, 190 bp, Zea Mays
aatctcttcttgattatagctcaacctaacggttctgagttcagtgttgagaattgccttatgttgggttaaccaattcatacccaaaattacatctatatcctggcctttcagaataatcatgttagcaggaaagttccgctcggccattgttactggcactccataggccacttctctagtataaatg

SEQ ID NO: 28252 - DNA, 276 bp, Zea Mays
aagctcggtatctttccttaccttaccaggaacgtctcacccgtcttgcagacattacagaacatcggagataaagagatgtggaagcaattacataaacttacatttatttcaaaagcaagcttgagttattttattacagaccagaactaaaaagtgagtgcagagtagtaatattatacaaaccaagggaggcacaaactcctcccgataagctataagcaaaagatcctatgtggaggaccgagtcctcccgcacttcagtcttgtttttct

SEQ ID NO: 28253 - DNA, 1843 bp, Zea Mays
aaggcgataacggacaaaggtatatggggaaagatgaaggcattggagagccagtggtatgagtacaacaaagaatggagttgcacccatgcttacacgcggtaaagaagaggatatagccaagagtgaggtaagtaaaacaccgctctcaaattgagataggagattggagattttagataacagacataatgtaatcacaaggtatgatagagtgatgagaagggtaaatgaagtaataaacaaaaacccaacaaacgatagaattaaaaactcacaggtgacaaagaagaggatacgtccaagggaaaagtaggtaaagtacaatgcttagattgagatggaaaagaggatattttaaaggccggtataagataaacatcaaggtaagatataggggtgacaaagataaaggtgataatgatgaaaacataatccatggacagagttaagacaggacttgttgagggacgaagtgaagaaaacaatcaagtataagataagtgaggttccgacagaagagttgaaataaaaattcattaccgaaggaagttacaaggaatcaatgagatcaccaaggatgtgcgaaataaaatgaatgctcatggattatcgagaaacaagggtggtcaagggaatgtaaaatgaaatatcctaaacagaccttggggtatgaagataaacatacataaaaatataagagtatgcaagacttcaaggatacgagcataccaagaccaagggaaatagggatggtcaaatggtataaattcaatgatggaaaaaaatctcaaaagacaagaaggttatggtcaggggcatctacgaagatgtcgcaagcacaagagtgagatcagatctaatagattgagagaagtatagaacatactagaataaaataattttggcaagggggcatataggagcacaacatagaattagtcgaggtgactaatagtttgaatcagaatcaaggatgaggtgaagtaataatcaataagtccttaaaacgggccaatgctactctaggatagcggtcctacagtcagcaaggctttgataccacttatgtcacacccggtttcagaaggcaaaccgaatgcaaaccatgtacgtgccaggatcagaaattcacgtacacggcgattacataaatgactcatcatagcacaatgcttcgaataacaataaagagtaagtaataatataaagactagagtcatttacataatataatcaaagtacacagaatagaaacgtagccaacgtaaataaacccaccacagacagctgactgggggtggtcgctagcctaatcctcgaactcgtcgaagtcctggaactcctggagatccgcctcgacgccttcttctttacttgagtatagattgcaccaaaggcaacctggtgttttgtgaaagcaagggtgagtacacatcaacgtactcagcaaatgtcctgtttggctgaagtggactagctttatgtggggttaaggtcaaagcagattgcttttagttggtcaggtatttattattagtggaagccaagttttatcagataaccaacccatgaaccatttcctcatcgaggaaacaccaatatcagcatcgaaccaaaaccataaataaaaccattgtgtctcatatcatctgtatctctaatcaaagaggatcccaaggccgctcttaaccgtgagcacggctgatatatcagtttcattccctctgcagaggtcgcacactttacccatgagtcatgattccctttctgcccggggatcatgactccccattgatcacttcctaggtggtccggcagggtatcactacgtagcttttac

SEQ ID NO: 28254 - DNA, 528 bp, Zea Mays
attcaagtttattcttggggtcattttatgacttttaccctaaagcttttaggttttctcaacttgggttaggttttacccctttaatccctatttagggttaagtcctttaaccagggtcctatttgcaaaacacttaaacaatacaacttgtttgaaatttttgcctagtgaatgcactctaggtgtgtcaaacatatgcaatgccaatgctctgatgccatgctcaagttttagttacagtaacaccaggggtgttacatccttccccccataaaagaatctcgtcccgagattaaaagtcctagggtaagtaatggtaaaggaaacgcatcacatttttattcccttatttttggtacaagacaggggtggtgtgggggttacttctttattacaacagctatacaggctttacaacttacaaggggctagaaagcctgggaaattcttatctaagaagtcttgggtttcccatgtagcctcatcttcagaatgctggttccactgtatcttgtagaacttgag

SEQ ID NO: 28255 - DNA, 1545 bp, Zea Mays
attcaggtcaaactaaatgttatgattaatactcgtttagtgtagacgcgataacctctcgatcatagctccgcctgtcgcgttccttttccctcgtgtgactgtagtaacgcgctctatttcgttttgcatattttattatattttcctttgtatagtgtaatgttcttatgcatatatgtttgtttgtttgttcctgtttgtcttcgcttcgcgttgcgattagatcacgatttgtttccgcgctccgaggaatcgacgatcaagcgtcggtgaccaaatgatcaagctctctgagttttatgaggttgaagatcctgagcatctgtttggtgaaggcaagtgtcctctgacccattatgtcccattcacttttaatgcactgtcccgcattacttaattgaaacctaaggattgactagctttctatttaccttatccttgtttaccttttgggttatcacggttagcattatgctattgctttactttaatcaatgaacatgatgtgaatacttatgatactatgatgttatcctgatgatgttcctgtgatactttagggggctcaggctgtttcctgagtgcctctccgtaaggacctgtttggggagtgacaacccgggataacagtgcaaccatgagggtggaatgggacgcccttagctgattaattagaggaactagaggtgtagttgcttcgccgtcgtgctgtcaatggggtccaggcacagtgcttgctctaccgaggctgggtgccgaggttgtttcgttttgcttttgttagtcaccctcctgtggggagaggtactgtgtttatcaaactggagaaacctaacgggcggctatgacctctagggaatcttcgtaaaagctacgtagtgataccctgccggaccacctaggaagtgatcaatggggagtcatgatccccggacagaaagggaatcatgactcatgggtaaagtgtgcgacctctgcagagggaatgaaactgatatatcagccatgctcacggttaagagcggccttgggatcctctttgattagagatacagatgatatgagacacaatggttttatttatggttttggttcgatgctgatattggtgtttcctcgatgaggaaatggttcatgggttggttatctgataaaacttggcttccactaataataaatacctgaccaactaaaagcaatctgctttgaccttaaccccacataaagctagtccacttcagccaaacaggacatttgctgagtacgttgatgtgtactcacccttgctttcacaaaacaccaggttgcctttggtgcaatctatactcaagtaaagaagaaggcgtcgaggcggatctccaggagttccaggacttcgacgagttcgaggattaggctagcgaccacccccaagttagctgcctgtggtgggttttatttacgttggctacgtttctattctgtgtactttgattatattatgtaaatgactctagtctttatattattacttactctttattgttattcgaagcattgtgc

SEQ ID NO: 28256 - DNA, 1295 bp, Zea Mays
atactatgttccatataatgaaataaatgtggttactagcctcttgggactaggaatttgatcacatttgggttccaaaggacgggacgctacctgcccccgactccaggccagctgcctgaaggctcgagggcaggcggaagggggaaagctctagaggactaggctttcttgataacgatttttatgtgcttctagtaggcatggccacactaatatctctcttttgtttgctgtaaacctgacttacgcagggtcccgagaaaattgaagggagcaaaaaccgactaggccacccttcgagagcgccccgtcctacggaactaagcgaacgagaagacctcactttccggtaaggacccgaacccattcaaattcctttggcatggacaaaaagacaaaaagctcatggtgaggcaacagtgaattctggagtgcgaacaccagtccgcggagggctcgcgaccgctccatcaaaaatagagcgagggacagccggagacgggcacactagcggccaggaccctaatgtatgaaacgttaagggtgtcagcagctcatgttcgagtcttaggaaagtctgactcatggtttattgcggagagagaaagcaagttgtcgttccggttgaatagaatcgacaactatatgtgtcagtgcatgggagtattaggatggtccccaatggaccctgcacttggatcctacaaaatgaaccaggctctcactcagattacctgtttgaaactcaccgagtaccattgttatcccattgaggaaagtgtggtacaactcacctcccccattctcgcgaagggggtgcacatgggagagtaaaactaaaaagacgggacatgcccccagacggaccctgcactgagcagggcttggggctcgccttgcatgagtatggcgaacaggtgaaagttgcacgaaaagcatctccaaacccaaaaggactcaagacaaagcagggttaggggccctcgaaacccatacgtcaccgaagcagttgagccacacgtagagccaccgaagactgaatcacgaaactatgacgattgcaaactacttcctccacaacaccacctccgagtatggcatttgcaacagcaccgaaatcgcctgacaataggtctagaactatcgctagtgaaccctcatgcagaccgatggcattgtggaaattaccacaaaaatgtagttgtgcaatggcgagagccactgccacgccccggtgaattctgagctccatgatcttgtgcgcactggctgggataccaaggacacacaag

SEQ ID NO: 28257 - DNA, 512 bp, Zea Mays
ccggcaccaacgtcgtcaccggcaagtggatctggacgcacaagcggcgggccgatggtaccctggagcggtacaaggctcgctgggttcttcggggcttcactcagcgcggagtcgattacgatgagaccttcagcccggttgtgaagccggccaccgtccgcacggtgctatcgctggcccttgctcgctcctggccagttcaccagctcgacgtcaagaacgtcttcctccacggcgctctcaccgagaccgtctactgctgtcagccagcggggttcgtcgactcctctcaccctaacatggtctgccgactcaacaggtccctctacggcctcaagcaggcccccgggcgtggcactccagactggctacgtttcttgtgacactgggcttcgtggaggccaagtcagacacatctctgttcatccaccatcatggagcagagactgcctacttgctcctctacgtggatgacattgtcctcaccgcctccagtcagtcacttcttc

SEQ ID NO: 28258 - DNA, 163 bp, Zea Mays
caaaaagcatataggaacctattcatgcacttggattcacaaatttccacaaggatttgaatcaagctcaagaggtggagagaagggggggtgtgaggcattgtctgcacacagagaaaaagaaaggcagagaggtgctaggtgctcactagagagaggggca

SEQ ID NO: 28259 - DNA, 691 bp, Zea Mays
gacaatgcaacactatttttctttttggatgtccatgatactagtgatctcccaagcaaatggcaccccctggaagtactttttctatcaattttgcaaccggcataatccgaatcggaatagccaactaagccaaaagctcctttgggataccaaaggccaacgtttgggtgtgcttgagatacctaagaattcttttaatagtgcgaagatgagctttcttaggattttattgaaatctagcacacatacagacactaaacatgatattgggcctagatgcggtaagatacaataaactaccaatcatagaacggtagagagtttgatcaaccgggttacctccctcatctaggtcgagatgtccatttgttggcataggtgtcttgattggtttgcacttctccatgttgaatcttttcaacaagtctttggtatacttctcttgtgagaggaaattaccatctttcatttgcttgacttgaaagccgaggaagtacgttagctcaccaatcatagacatctcaaactcctttgacatcaactcaccaaattccttgcaatgataatcatttgtcgagcaaaagattatgtcatcaacatatacttgacaaatgaaaatatcactgttatgtttctttttgaataaggttgtgtcgacggtcccaatcttgaagcccttttcgatgag

SEQ ID NO: 28260 - DNA, 500 bp, Zea Mays
ctcagacggagacactacaccgagactctgttctcgtgcaagtcacccacccagtctcagctttatcacttcaatccaaagtttggtacctggcagaggtacatcttttccgatgttgaacccatcatggccatgatggatccaccatcaagttttattttcgaaaacatccctcccactttgcagcatcatcgtttgtaaaaataaaacattttgtttttctagagcaaagctaagcataagaaaaaccttttgtaaaaaaatgatttgaggagaagtaatcaaatccaaggaagaaaatgcaggaattggtttagcacacaactcctatcacctaatgcatcaagcaagtgagaaagattttaaaaggaacaaggaggtggcaaatgcaccggggcttgccttgtgttactggtgaatcaggctctgttccgcagatatcaaaataaaaacagttgcatgcctgatgttcctcaggtggtggtagtgatgaagtcctt

SEQ ID NO: 28261 - DNA, 330 bp, Zea Mays
cccatttccatgttggtataggtaaggactgcaatagaccagcagctttcatgtgtatggccttgacacgtctacaagtgtcacatcttgccacatagcgtgcaatttcagtcttcatttttgtccaccaataatgctgttttagatcatgatacatcttagtgcttccgggatgaatagaatagcgactaagatgtgcttcatctagaatttgctggcggatctcatcatttttaggcacaactatgtggttgttgaaccatacaacaccttgatcatctcttctgaagcagttagctttaccggcctttattttctcatgaatgtgct

SEQ ID NO: 28262 - DNA, 969 bp, Zea Mays
catcaccctgtgggctcgtcaccgggtgtgtgtcgccgcgggtgaatcacgtgatcaccagtgctgggatcctcctggccttcatcggtgtgcgagtgcgtttggcgggcatcaccggtgggctccctcacggatcgacatcgccgtggggcgcgcgtcgtcacagcagcaggtgagtgaccttcctatctttagatggcgtcagtaagtgtgaggggcgcttgtactcgggggataccggacaccagggcgccactggtgtgcctctccggcatagcaccctcttgtcgcgcacgacggcggatctaggcgcggtgtcaatgctagccgcgccgtgaggtataagaaggccagcaaccgttgatcaaacgctgtagggctaggattagatctaggggaaagttggcccccaaccgttgatcgtgcaggggatggtctagatcgagtcttggtgtaccccttcgagccattaaatcagaaccgtgaatcccggatccgatggcctaggttactcgcggggttgatggatgtcgaatctaatcgtggtcgtcgggctttgatctgatggctgagacgaaagcatacccttcgcctgaaccagttttcaaatgagcccctagactacttaggaatcaacccgccatctagggaccctgttctctgtgtctgggatatcttgcgcatagccccctgtcttcatgaactcccacctttggtgagttcatgccacattattccccacaacttgttgagcaatgaacatgtgtgagctcacccttgctgtctcacacccccccacaggtcaagaacaggtaccactggatgaggcgcatgatggttgttgcgctgtgttcgtgagcggtctaggtcatcgtctccgagttgactttctggcgccaaggatggattttagatcctgttgtatttatctttattttgtaagacttccgctatgtaataatactctga

SEQ ID NO: 28263 - DNA, 332 bp, Zea Mays
cttaccttatctttatcctatctcaccttctactgttccactctgatcattcttatcttttctactctaagacaagatggatttcacaccttggaatcctacaactatgatctttctaagagataggaaacccaagacaaaattaaaattattttctctattaaaaaaatgttggttgattgttctgatgatcaatgcctgatttgcttctttgattgattgaaatggtatagacgagcatcttagcatgtaccaccataaggtaatgaattaactttagtaggtgacacactaatctacttagctaataaatctcccacagtaacatttct

SEQ ID NO: 28264 - DNA, 274 bp, Zea Mays
ttcgtccttcctcttgcgctggttcagtcgtggtttggtgcaccctgaacacgtatccactacaccggcgaggttggggaatggcgccgccatgtggagacctggccaccgcgtgttggggaattaggcgagggagagagcttgtccgttcgtccaggatcaaacggcgtggattagatgcagctggacggtaggtcgttgtgcgctacgccattggatgtaagttgggcggctcagatctgatggagagcaccgtttcagacagggtagcgtg

SEQ ID NO: 28265 - DNA, 413 bp, Zea Mays
ctcgccagaaccgagcggattcggcgaacccgcaccgtgccgcgaacgactacgcttgacctctcaatcaccggtaaatactaccttcgtattttcgcgctagttcgtccttcctcttgcgctggttcagtcgtggtttggtgcaccctgaacacgtatccactacaccggcgaggttggggaatgacgccgccgtgtggagacctggccaccgcgtgttggggaattaggcgagggagagagcctgtccgttcgtccaggatcgaacggcgtggattagatgcagctggacggtaggtcgttgtgcgctacgccattggatgtaagttgggcggctcagatctggtggagagcaccgtttcagacagggtagcgtggatcgttcgatttgatcggagggctgtggttggggc

SEQ ID NO: 28266 - DNA, 85 bp, Zea Mays
caaaccgggaccgggcggcatcctccgtctcgtactgacccccgcaccgccaaaccctagtccacagcggcgaggcgaccttgcg

SEQ ID NO: 28267 - DNA, 360 bp, Zea Mays
gtgacatatctgtgcaaacagatgaaggagttgacatcgacatagcggaagcctcgatctgccactagaaactactgcggactgtcaaacatctaacttttgagcaggtttttatgagaatcgttttattgaaaaccgtccaaaatcaacatgaacatagaatcagtaagtcatcgcgatagtagaaatccgtcattttttaagattataaaccctatagatctatttatcttccttcgtatgtaatcactacgatactcagattctctatgtagctagatttcgttagaaaaaaaccgaaacaaacagcactaggcgcgtgctgcagcgccagcgcaaaaaaaaaaaaaaaaaaaaaaa

SEQ ID NO: 28268 - DNA, 336 bp, Zea Mays
caaagcgcaacgcggcgaccgattggccgcttgacctattccgtgacgcagagcactgtgcaaactgttgtgttgcttgctctgaaacattcaaccgtgcctgacggaattcgttaggcgacgactggcgactgcacactctgggagtagtcaagtgtggtgctggtgctgtcgacggacgagcgtgctttacgtcactgaaaggaacgtacgatacggtagcgaggtacatggggccaccagattacaatgatcgcagcaagataagcaatcaaccaatcaatccagctcctaaaaccacctgccgaattgttgtttattccgactagcaaaaaa

SEQ ID NO: 28269 - DNA, 569 bp, Zea Mays
cttgattcaacagtcagaaagacccgcacctcagaggtgaagctctgtaaagttcagtggagcagagaaggagaagaggaagctacctgggagagtgaggactccttgaggagggaatacccttatcttttctcaaatccagtctaaatctcgagggcgagattcctttaagtggggtaggtttgtaacatcccaaaatcccaaccaaggtttgaaaccctaacctcctaatccccccttattttatttttctcccttaaactctacccttagaaccccttctcatatgcatacacttgaaataattagagcacctcacatagactatattcatcactcaagatcatttagagaatatttttggtttcaaaagaaaaagaaacaaaaagaaacaaaaatagaaaaaggaaaagaaaggaattagaattagaaaaagaaaagaaaaaaaagagaaactccttccccctcctcggctgggtcgaatccggcccaactagcccccgcacgcccgcgctcccctcctctctccccggcccaggtggcccagctccgcgcgccgctccctctcg

SEQ ID NO: 28270 - DNA, 1419 bp, Zea Mays
ctaaaatcaaatccccgttcaatgctttaacaaacttgccaaacctttaaccatatgtcatcattctatcaaccaaaattcactaaagggctagaagcacttacactagcaaaactcatgcattcatcatcaccatgcatgactcactaatctcaaggtgtgtccaacttccatttccttggcctgatggtccaccaggatcttatggcccccaaatatgttttgttagttagaaagtgtaaattgaaaatcgtacgtgtaatagacgacttaatgtctgacaattttttgcctgttcttcgtatggacgataagagactatgaatacgttgagctcaaccaagcacaccttatttgactactcgatcatatgtattatttgaagtttgaatcataaagatatattttttccaagatttatagaagggaagacaaaccgatgctaaccataccccttttgtcatgccttcttcgcgatgtcttcctcataaaacctaagacctacacattttgatgagatgctgctgccttgtattcacacatgaatggaagaagacccagagaatagagaaaatagagaagagagacggccggagggaaattaaggcttgattctgattcgtaaaactagttggttatggtcttctcttcctgttttccccttaattacatgctagcttgctgtcgttgttcttgatggtgtcgttgccacgggtggagtagataattaagacgatgagaggtatagctagcgcggtggtgatcgccatgaggacgaaggataatgagatgttaatcgctgtggatctcaatcatcatatattcgttgttagtggtatataagatctttccttttcctgctgctttaacgtgaaatctatgtcgttagggtttcgtagattcgttggttgataggtttaggcgcttctagctagctaatctcgtaatcaggccctcatattttcccggattgcacatcgtaatcaggccctcatattttccctcatattttcccggttgataggtttaggcgcttctagctagctaatcgtacgtgttggatgctgtttatggctggttttatgtatcaaaaatcatgaaaaaaaatatatattcaagtatcagtatctttttatcgatcggcgtcaactaattaagatcacatttatatatatatagcacttttatatatgtatggtggttgtttgataatgaatctgcgttgtctgaattgtggacaagctaagataaatgcagtcagatttactgtagcttgactccttgagtccactttaccggtagcgcttgatcacctgctcatttgacaaaaaagccatctttgcttggaatccttcaaccttggcagcggctggtgggccggggccgatgtgatcccaagactgctgcctgctagtgcta

SEQ ID NO: 28271 - DNA, 192 bp, Zea Mays
cctcgggaacctgctccccagagacaggcgacgcccgagccccctgcggtgaaacgccctgcgaaagggtcggctgaacgacaaggcccggggcgacgctggccgcacagaccggcgccgtcttaagggccttccggggtgccaggtcggtctggccatggcttcgcttgctgaataaaaaaaaagaaaaaa

SEQ ID NO: 28272 - DNA, 228 bp, Zea Mays
ccctagcgacccgcgcgtctctcttctatcccgcctacgcgcgagccaccggtccccgctcctccccgcgcggcgccgccagcctgctcctccaccgcgcccaccgctagctcgctcctccaccgcgcccgctgccagcccgctcctccaccgcgcccccgctcctctgccatcatcgctggttgagatgggtgggtagggtttgggcttgggcgtggccgcttggga

SEQ ID NO: 28273 - DNA, 490 bp, Zea Mays
gaataaaataatatacttgttgaagcaattaagttcttacatcaagatcacgtagtggccaggtacaaaaatacataagcatctctataactaattcataatttataggacttgaatggctaataagtgcacatttgtgtctagtctacatacagaaaaggaacaccagcccaccattgtgctcatcaataattcccgagtgacacataggttagccaaaggagtggttaagtctaaacactaaggatgacatttggattatgtagtttcacttgacaactttagagtgtgctatacttgatgggttttctagtcgatagtattagagctatgctacaagcctacaaatgaactcaagctttctcattcttaattaacaacaatacaacttacttggtggctcgaggaatctacttggttgtactcgggcatgtcatatgcgggcttagacttactcaattttcaattgtatacattggagttctctaaa

SEQ ID NO: 28274 - DNA, 204 bp, Zea Mays
cttgtccgcaagcgcaagctaatctgcgctgcgtgcgcgcccatccagcgagcttccgtcgcgtgcgagtgcgagcagcagcaggccgccggctacttggctggcacatgggcggcgagtattccgttcgtccatgcgacgacctcgtgctgcgcacgatggcccagcggcagcgcttggaaacaggtagtacgcacgttcgcc

SEQ ID NO: 28275 - DNA, 946 bp, Zea Mays
cgacaccgagctcgcccgagctgcaaaccgtcccgcgcgaccgtccgctttaatggagatttaactcgtccgttcctctttctccccattcctctccccgttagtggtgataatggcgacgttaatggctttaaagaccgccgtttctctccccgtctctccctctcccctccctctctctataaagccacggccgaagcccttcctctacattcccctgctcgccatccctcctctcgcatactgtgtttgttgtgcgtgctgtgcgccgccgtcgctctgtgtccacggatgccagtgcctcaccgacgactgcgcccacatcgacgtgcaacgacgaaactcgccccgtgccggagcctctactgccctgcttgctgctgtgcgctcagttttgctagccatactcgctgtcgtgtgcctcatcgaagcttctctctggtgtatgggcgactctctcctccacgaccggaacaccacgtcgagcccctgttgtccacacatcggctcaccgacacgtctcttcggagatcgctcgccgtcgttcagctcgtcttgccattgacattcttggtacgccggagctacacacccgtcgtaccgagccttcaccttacgcccgttcgtcgtcgtccgttcaccacaaggttgaagacaacccaaatgtttttattaactccaaaatcacagtttgaattaattcattaatttggtaattatttgttgtgatttagaattcatgtatgtgaacgattgatttttagtatccgtgcaatgaattagtatattaaccttattcatattatttgtttccaattgttttagaatttaagatttaaaagaggaatgacggaatttagtagaccatgtgttagtgatgaaaacactagataaataatatcttagttattttttctaaaagttatatacataagttcatttaaac

SEQ ID NO: 28276 - DNA, 112 bp, Zea Mays
gcaatccgagacacaacatacactaccacatttttataaacacacatactcacaagtattttcgcacatcgaccaatctatacgaatcgtaaaccactaatctctaactcga

SEQ ID NO: 28277 - DNA, 373 bp, Zea Mays
tttgaaaccttcacctacttgctcaacaaccaatttccacaatgtcctcacacctctaccgatgtgggacatgtcttcttcgatgaccttgggaggatgtttctacctgtacctgttacctgagtccacaacctctatttttatatcatattcttctatgtatcccttctgacattacatggatgctcctcatcctcccaataaaaattctaccatcggcatttctcctctcctactgaagattctaccatcgatgcttctcctccatcacatttcacttatccatactcgtatagatacccatatgatgctcctctatatggattgtatggtgctcctccctcgttctctcccctgtttggtgcttctcccc

SEQ ID NO: 28278 - DNA, 343 bp, Zea Mays
tgattgccccataattgatttttgaatagcatttcttcttaattgaaaatccaaataagtaatttaataaatattagtccaagagttaatattttatttatcaataattttagtttaattattatgaattttatgattatttgaataggtatttcgaaatttgaaaaaaaagaaaaaaaaacacaaaacctaaccctaatctaccctggccgaatcggcccactaagggcccaactagaaggagccgccgcccctgacctagccgcccctgtttctttgcacagcagccgccgcctctgtcttcttcctccaagccgagcgccgccccctgctccctgtgctt

SEQ ID NO: 28279 - DNA, 399 bp, Zea Mays
atttgagcaaagaaataatcatgatgtattatctgatgttgctcaacttaaaactgagaattctatgcttaagagtcaagtagagatgataaatttagaaaaaaattgctttaagtgaaaaatatgatatgctatcttattctcataatgaattagttgatgaccatatcatgcttaatgttgctcatgaggttgtaattgcgaacttaaattcatgtgaacctcattcttgcacacgtgcacatttagataatatatcatcatgtgctaacccctgttgctcaaaagaaagccaattttttaatgagcatcaagttgcaggatcaaaagaaaagttgctcatcaataaagaaaggaacaagaaagcaaaacaactaaggagaagacgcattgctcaac

SEQ ID NO: 28280 - DNA, 358 bp, Zea Mays
atcatttcttcttaaataaaaattcacataaataatataataaatattagtccaagaattaatatgttatttataaataattttagtttgattcttacaaattttatgattatttaaatatgtatttcgaaatttgaaaaggaaataaaaaaaagaaaaaaaacaaaacaaaacctaacctaacctagctggccgaatcggcccaccaaggcccaacagccggccgccgccccctgctaaccctagccgccgctacccctggttccctctcccagccgccaccttcctctcccctctctcccacccgactgtctctctctctctctcttctcccatctctctcttccaggacgcagac

SEQ ID NO: 28281 - DNA, 679 bp, Zea Mays
aaaaacgtcatcatgtgactcttaagcaaccggcttgaggttgaggtttcagtacccccagggagttgagtgctgtactcctactcttgtatagtcatttaaaaggtaggtaggtatcgtatagtatagtctaggctagctagctaggcggctcaacttcttgtcacctcatgtacgaaagggaacacatgcatgcatggcccaaggcctgcaccaggattgcaacagcatcagccatcagcttcatttgttttcttccagaagctcattagcagagggctagctatatataccatgcaatgcatgcatacacagcacatctgaaagtaatataaggaagagtgctgtcgtcgactaattatattaccacctaaagctaactactacttgctagaatttccagcatgaaatggaccatgcacgctggtgtcctgctaattaataatacccctatacctgtagtaggagtggatcttgctaatgctgcgacagaactcctcatgtgtcatgcaggcgtcacaacgccagcagcatgccctcttgaccattatattgcttttgccctttgctagctgctatcacttgtaggcttagcttgtggcacatactaacatatacacgcctcccccaccaaactaaaaaggtatcagggagttcagtggagctgtgggaaagtaca

SEQ ID NO: 28282 - DNA, 812 bp, Zea Mays
tgacctgttatttctatcgcctacactctaatattcagaagtatcagattctttcataattggactctatggtgatgctttacttgcttgcattatactgatgctcaatcatatattgatgatgattatgatttgagtatgactcatgagattaattcacacccctgaaggtaaatgaagtattatttgaggttggtattgtatctgaaggtaaatgaagtattatttgaggtttgtgttgtatctgaaggaagtgaagtttattgataaatgtagcatgccatatacattgcatgactcatttgcatatgaagttttgtcgtgacctatggtccgaccgtaccggtacaacttagcatcgtacgttgcccgagaaggggtacgatgcggcttcatacccttagaggtatgaaggcagaggacatatgcattgcattcacatgcattcattgaagtgatatttgcagatgatgtggttttatacccccagaggtatgaagatagagtacctacacattgcattcctatgcatacattgaagtgatatttgcaggtattgttgacgcagggaagtgttatagaacctattgtggttgttcgaggaaatgagatggtactggttatagtgggactactgagttctatatctacaaggatttctgatttttaattgtgactcttttaatatgttgatgaattcaatttgtggtttaaatatctcgtcagaacaattagcttgctgagatgtttcatctcactcttgcattactcaatgcaggtgcttgttgctcatcaaggggagtgggaagtag

SEQ ID NO: 28283 - DNA, 1103 bp, Zea Mays
caaatgcttcggcttgagaacaaggcaacacgaaaaatgttaaatgttaatgcccttcgtccttcgagacattatttcccttagggtataatgatcttcagacgaaggttatgaaggtcataccttcatcattgcagtatatgataataaaaggagagtcatatgaaatgtaagaaataacatgaacaattatgtattattattagttcatttctattttattatcatggaaaaatagaaatgatatcaaattacaaatgtaccttcggcttgaaagaaggtaaagctacaagcgtgacgcaaaagcaaatgccaagtcagcgtgaatagtacgggagcactgttcatctatttataggcatgggacgcaacccatgtaaaattacacacatgtcctttacatttgctaaagactctatagtgatccatcgaggtctaaatggccttttcccttttaagtcggttcccttttctgctgtcatgccgaagctcccttgcacgtagcttcggcgctgcgtcaaccttcgtattctttgcgcttcttacactgtggttctgatccgagtccgaaggtacctattcatgtattatactcgagaagcattgttagatcatgtttttgaggaccttcggaagacgaaggcccccaacaatagcatagctaaccttgataacccaaaaaggtaaacaaggataaggtaaatatagactagtcaatccttaggttttcataaagaaatgtgggacggtgaattataaagtaagtaggacataataggtcagaggatacttgccttcaccaggttgttgctcaggaagatcttcggcaacacactcaggaaccacgggctgctcgtcgtctaaataaagcgatcatacattcaatacatttgaaaaataacaaatgaacagcacaccaaacatgtacaaacaatggaacacatctcaaaaataaaagtataaactcaaaagggagtttaagttataaggtgaactaatcacattcaatagtttgttattctctaagtgttgtctatctctatgattacataatatgattctactcattttaatgacacataaaagttaaaccagggataaat

SEQ ID NO: 28284 - DNA, 456 bp, Zea Mays
cagaaacagcaatattttatgcagggttgttttgaaaaacattttgtattttgcaaagtgcatcctctccaaaaggagcaggaagtttttcaatattagaacaaaatctctggactaaaccatccaggtatctcagcagtttcccactggttttccttttcaaaaacagctattggacttcccgtccaccatagctcacggctcaaccgccgaaccttttaaaaaccacttttctcaaacgcaccttttttttttgaaaacaaaacattaattgccataccagactcgtccattcctgtggacacagactattcgaataggttttcaaactctgcgcagaggtgtacactttacccactagtctggctctgcgatctcatgatcaatgagatccgaatccgactctctttctttccccgcacgtcctaaccttaacggttatccggaaggagtcag

SEQ ID NO: 28285 - DNA, 2220 bp, Zea Mays
cccaaatccagcatacccttgagagtcttttctttagtcgggtaagtcttgctgagtaattccatactcagggttttattccctgttgtttttcaggtcatagttttgtgctgctgatgatggtgttaaatgccggtgggctcggccttcttataagtctaagtaatccttctatacttcttaatgaggatggtcccttgagctagcatatattttaaacttatacttttgcaatcactccgataaaataatgtaaaatttttgtaacttgtaaaatttggtaacaagatttccgctgcaaaaatattggtgtgtgtgatttgtgttacttaatcccgcggttctggttgtaagtggtttatctgaggtccttgggacactcggacggatcctgttaagttatttggtgcacatgcatagccgtctgaggtctttgagacaaggacaggtgcatgtgggcccaataacttgggaggttctgccacagtaaacacatttatacatcagatgattacagatctgcttaaacgagacaaacctataaaggtggcgatcaactttaagagttggtccacaactcgggacatatcatcagagtgggctgaagcagcccgatatacgcagcgaagcaaatcagcggtccaacagccacaggcaaggttgggaacattcgtaactcttacccgatctccttttctgaaaaacaacaaataagcaagggtgagtacaaacgtactcagcagcccaccttcacccgcggaatggggaaatcagatataatgctggaatatgtagatctcaggatatttgcagaaacaacaatattttatgcagggttgttttgaaaaacattttgtattttgcaaagtgcatcctctccaaaaggagcaggaagtttttcaatattagaacaaaatcccctggactaaaccatccaggtatctcagcagtttcccactggttttccttttcaaaaacagctattggacttcccgtccaccatagctcacggctcaaccgccgaaccttttaaaaaccacttgttgggggccttcgtcctccgaaggtcctcaaaaacatgatttgacaatatcttccaagtgaaatgtatgaacagatatcttcggacccagattgtgaacatgaagtacgatcaggacgaagcttaagctagacgaaggaagattgagatgaaggacgggctgatcaccaagccgtacgagggatggtgcatagccgaagctatgcgcaggggagcttcggcatagtggcagaaaggggaaccgacttaaagatgaaaagactacttaggctttgacagatcctcataagtcattagcaaatgtagtggacatgaatgtaattttacatgggctgcgtcccacgtctataaatagatgaacagtactcccgtactgttcacgctgacttggcatttgcttttgcgtcacatttgtattttcatctccttccaagccgaaggtacatttgtaattcgatattgtctctatttttctatgatgatataaaaaagctaaattgatgatgttatatgattattcatgctatcttttatgtttcatatacttcgtctttcattaatgtatactgtgatgatgaaggttcgtccttcatgaccttcgtctgaagatcgttatatcctaagggaaataatgcttcaaaggacgaaggattttatcgtttaacattctctgtgttgccttgttcttaactcatagcacttgagaacaagtccccaacaccacttttctcaaacgcaccttttttttgaaaacaaaacattaattgccataccataccagactcgtccattcctgtggacacagactattcgaataggttttcaaactctgcgcagaggtgtacactttacccactagtccggctctgcgatctcatgatcaatgagatccgaatccgactctctttctttccccgcacgtcctaaccttaacggttatccggaaggagtcaggccaccaccatgtccaaaccggacaaaactttccccctccttatcctcccggtgttccccagccttcataaccctggggttggaccgtacgagttcagattgagtgactgcccacacagtctcaagtggttgtactattaaagagtacaagtagtgaagatgacaaaccggtccttatatgaggggacaatccttctgctcacgcctaaaccagctgagccaac

SEQ ID NO: 28286 - DNA, 563 bp, Zea Mays
ggtaacatgacttgtgggtaaagggtaccacctctgcagagtgtaaaactggtatactagctgagctcacggtcatgagcagctcaggactctctgatgattaaattatggaacttaaactcaatttgtcatatgcattgcatcgcaggtgaggttgttacttttgttctactacttaattgggttggtgtttacttatacttagtaattgctaataaaattttgaccaactttaaaagcaatgctcagctctaaccatctcctttggtaagccttacacttcacgtgagctcccacctttggcgagttcatgcacattattccccacaacttgttgagcgatgaacgtatgtgagctcactcttgctgtctcacacccccccacaggtcaagaacaggtaccgcaggatgaggcgcatggaggatgttgcgatgagttcgtgagagatctaggccgtcgtctcctagtcaactttgggttgctggaccgttgtctccttataatgtaattatttattttgtatagaactcctgttatgtagtaaagatgtgacattcgatcc

SEQ ID NO: 28287 - DNA, 414 bp, Zea Mays
gcacggtcgggatggcgcctggcgagctgggcgtcgggtcctgcggggcgttgcctgggagagagaagcgaggagagagagagacagccgggtgggagagaggagagaggaaggtggcggctgggagaggaaccaggggtagcggcggctagggttagctggggcggcggccggctgttgggccttggtgggccgattcggccagctaggttagattaggttttgttttttttttcttttttttatttccttttcaaatttcgaaatacatatttaaataatcataaaattcgtaagaatcaaaccaaaattatttataaataacatattaattcttggactaatatttattatattatttatgtgaatttttatttaagaagaaatgatattccatattcaaaatcaatcatg

SEQ ID NO: 28288 - DNA, 297 bp, Zea Mays
cttaccggtgctggtgcagtagggaaccccgctcgctgcggggtgcggctcctcggcggcgccgatgcgtcggcgagaaatctccggttcttcggtcgtggttcacgcccgacgaggccacatatacgcgcggcaggatcctgcgacgctcctaaaccactcgacggggccagagagtcgcccccaggatagatcgctggcggtggcttctgccctctccttgccctgttcgtacgagctcgctgcgcgacgaaggcttggaacggaatcaatgggtggcgaagatgtagcggaacc

SEQ ID NO: 28289 - DNA, 262 bp, Zea Mays
aatgagggaagtagcagcatgtccactttcactctcacaataatgctgcccaggcgcagccatgatttaattaggaacttattatcaaaggaagtttgtttttttatatagtcgtgcgcactggttaattcagttcaggtcgtatatcttcccttgctagccgattaataatacttagtatgtttttgtcatgatatatgtttataccatgttgccccctcatttatgcaatcttgcaaaggggatgctgccaaaattatat

SEQ ID NO: 28290 - DNA, 449 bp, Zea Mays
atgcgatcgatggtatgcacgttcagaagaacgtgtttgaaagcataatgggcaccttgctagacataaagggcaaaacaaaagaaggcctcgcaggcctgcccgtcagccgtttccgacgtattatatcctccggcaccttcggcggtttctgcttcctctagccctaggattggagccttctctagttctcttgagttgagcctcgactactccggcgggggaaagtgtactgctgcagcagcactggagcgcagaagtcgaagtcttctttgatcaatcgagtcaatcaaaggagttgcattttgttgtcgtctcaccaggcaggctatctgatcggcgacatgtctgaatgtcgtatcaggctttatcgatcatctccacaggtattatatactctacttctcattgaactctagaggtgcccacagcattttgtgataaagagg

SEQ ID NO: 28291 - DNA, 120 bp, Zea Mays
gcgtctcggtcagcttcggcgatagcacattttaacttcgcttcagccagctgtttccgaagatcttcaatttcgcacttctgggcttcagcttgggctttggaagtagcttcgtcttct

SEQ ID NO: 28292 - DNA, 1106 bp, Zea Mays
aaaatttcgacagcatctcctttgaaaattgcataaacggggaagcaacaaagtataaatagatatcatgataagaaaacataatagacattaataatctggtagcaatgggaagacaaccataacgacatgaactgaattaaccagtacgcacgactagttaaaaacaaacatcctttgaccagatgtttctaattaaatcatgactgcgcctgagcagcattattatgagagtgaaggtggatgtgctgctatttcccactccccttgatgaacaacaagcacctgcattgagtaatacaagagtgagatgaaacatctcaacaagctaattgttttgacgagatatttaaaccacaaattgaattaatcaacattctaaaataatcacaatcaagatcagaaatacttgtagatatagaactcagtagtcccaatataaccaataccatctcatttcctcgaataaccacaataggttgtataacacttccctgcatcaacaatacctgcaaatatcacttcaatgtatgcataggaatgcaatgtgtaggtcctctatcttcatacctctgagggtataaaaccacatcatctgcaaatatcacttcaatgtatgcatatgaatgcaatgcatatgtcctcttccttcatacctctaagggtatgaagccgcatcgtacccctcctcgggcaacgtacgatgctaagttgtaccggtacggtcggaccatatgtcacgacaaaacttcagatgcaaatgagtcatgcaatgtatatggcatgctgcatttatcaataaatttcacttcctttagatacaatacaaacctcaaataatactttatctgccttcagatacaatgcaaaccttaaataatacttcgtctgactttagatacaatgcaaacctcaaataagacttcatctgccttcaggggtgtgaattaatctcatgggtcatacttgaaccataatcatcatcaatatataatagagcatcaatataatacaatcaagtaaaacatcatcatagagttcaattgtgaaagaatccaataattctgaatattagagtgtaggtgatagaaataacaggtcaaaac

SEQ ID NO: 28293 - DNA, 537 bp, Zea Mays
ttttgggtgaaactaatactaaatgaccttatttttgagggtttaataattacccttggaaattacatatttgtgacagccctcccaagttatcgggcccacatgcaccaatccttgccttaatgacctcagatggctgtgcacgtgtaccgggtaacttaacaaggctatcgagtttgtcaactggaactcatcatcctaaggatctcccacataacaggtatattacagtaatcacatttgatacacacacattgaagatagagcggaagacttttacaaagtacactttacattccagaactcaagttttacatggtagaaagagatgtatttattacaagtcctgatagtactcgaagtgcataacttattacaataatgggaagggtgaagcctttccataagagatatataaaaacattctaagcttcaagtcctccacatgaagtaactaacccaaagataagggaataaaacttctcctacaaaaacaacaagggataaaaccctgagtacgcaattactcagcaagac

SEQ ID NO: 28294 - DNA, 286 bp, Zea Mays
gccatacatgcgagaaacgcggcctgggaatcaggagatacgtatggagcaggccactcacatccagccatccaggattggaggggcacaagtttggacaagcctctctgaagggtactagtagtacaggacaaagcgcaagatctttttgtcagctatggtgcttgcattgcatataaaggctgtggcgagatggagtccattatattttaagacaacaacaaggcaggcggccgcgttgcatccgaacaagaggcaaacaccgatcactcgaaaggatcagacc

SEQ ID NO: 28295 - DNA, 237 bp, Zea Mays
gttgggccggattcggcccagccggggagggggagagttttctttttctttttctttttctaattctaattcctttcttttcctttttctatttttgtttctttttgtttctttttcctttgagaccaaaaaaaatttctaagtgatcttgagtgagaaaatatagtctatgtgaggtgctctaattatttcacgtgtatgcacatgagaaggggttctaagggtagagtttaaggg

SEQ ID NO: 28296 - DNA, 247 bp, Zea Mays
cggattcggcccagccgggggagggggagagttttctttttctttttctttttctaattctaattcctttcttttcctttttctatttttgtttctttttgtttctttttcctttgagaccaaaaatattttctaagtgatcttgagtgagaaaatatagtctatgtgaggtgctctaattatttcaagtgtatgcacatgagaaggggttctaagggtagagtttaagggagaaaaataaaataag

SEQ ID NO: 28297 - DNA, 617 bp, Zea Mays
atgctttggaggtcagcattatgtcatcaatattttgctgcagaggtcagcatatattttgtctttagcaatcgagtttgcaatccatccatatcttgctaggtaatgcaatttatttgcttctgcgactgattggacgtttgatggacgttctctgtctagtcttcacgtcgcttctgtcggccatatcttgtactttgctggctatatttggctttcctctgatccttactgatatctcatttttgtcttgaggtattcactgcgtgtcctgcacggatgtgaccgttttgaaaaatatactgataattcctgggcgtcacccccaatgggtgtgggcaagggacggcttggtacgctgagtgttttatccggctgcttctgagtagtaatgtgatgggacggtgagtgtaatcatatcctttgcgctgttgactggagtcccaatgggtgtagtgttgcatgaaacggcgtcagccgtctgacgtgtcttcagacgggtgggagtgcctattgaatgctttgcgactgttcagtgaccacagttggaggtgagcggttgcctttcccttctataaataacgacgttgctcctctggttttttcacatctcttcg

SEQ ID NO: 28298 - DNA, 436 bp, Zea Mays
gtgatattaaaggattgaaaacattgatcatgcaagagtcatgtaacaccccactggtcacacacaatggatattaccaaaaaccccaccctcctaacttactcaacacaagaggcgtaataaagacaggcaatatagcaaaatccggcagcacctcctttgaaactaacataacaaggaggggaaaacatgaagttcatacaggatataaagacttataattcacaaagtagaagctaaatgcaaagtggtaaactcatttatgccccaactgaagcaaaacaaatgggatgaggaactcagcccaccccaagataaacgctcaaccaagaacaatgcaattcactagacttgaccacttctgattaacaacattattaaatggtgattcctttatcaaaggtgtagtggtcgtgctgctacatccctctattcc

SEQ ID NO: 28299 - DNA, 435 bp, Zea Mays
gatgcagaaacattttgacataagatttcattgacaacatgcttggtccaaatggattacataaattattcaataatattatgcttcgacgtgataagtgtgataagaaaaaaggaactccctctaaagtagcttttgggcttttgatctcttgtggagagtagaactgcaattggcaagcatttatcttgatcttcgcatcaaaaataccatggcggcgatgctccttcttgacccgacgacataggtgcattccccggggcgccatgatctttgatcttgggaccttgctcagatggtgagacaacattgtaatttgccggtgagggtgctatggttgaatacatcgatctagatggtggtggaagtttcctgtggccacgtggtggttgtgcctcaccatgagaaggcgatggtggtgatggatacttgtaa

SEQ ID NO: 28300 - DNA, 247 bp, Zea Mays
tgtggctaggcggcgagctatggtaggacggtggttcgacgggcgctaacgaattacggtggtggtgctccccatgctccgatccagggtgcgcacccagcggtgcctcggcatagagcgccggagccggtgcttctaccgctgggaaggcatagcgagacgatgcagcgctgcagcaggaggagaaaacagcggtaagagcaacaaggagggcaaggcccttcatgttcgtgatgcccatgctttg

SEQ ID NO: 28301 - DNA, 278 bp, Zea Mays
gaaaaacctagtgaataatataataattattagtctaaaaacaagtattttatttataaataactttggtgaatttttagaaaatttttgagctctttaaaaatacatttcgcaatttagaaaagaaaagaaaaaaagaaaaaaaaacaaaccctaatctaaaaccggtccactaaggcccagctccctgagccccagccgtgcgcgccgccagggaaattcccagtcgccctgccctatctctctctccctatctctcttctctcccctaatctctc

SEQ ID NO: 28302 - DNA, 140 bp, Zea Mays
accagggtaaagggaagaacattacactgaggcgacaggagaggcgagaagtagacgacggcgccgggtgaagcagatcgatggtggagctgctggtcgatgcgtgtgtacctttgctagctctgttccctgagccgctg

SEQ ID NO: 28303 - DNA, 781 bp, Zea Mays
gcaaatacaattttgtttaatttaatcatatgaaggaaatctcattttataaaataataaagaattatcaatatattaccattgtaatatgcattttattatgttaataacttttaattatagtgcttgcaaaagctccattttatcacttttattttattttggtaaagatcttttatttaaaatagaattcttcctaaaacaatattcttatacaaaataaatatttatttgtgttaatattattttagaagtttttttttctgcagtgtatatatattatatattctgaatataaaaaacacacacacaacacacgcacacatctaaataaaaaggaaaaaagataaaagaagaggaaaataaaaaaaaaatgaattttgaaattgaaaaaaaaacaaaaaaaaccaccgcctagcctctcgtggccgaacgtcccagccaatccaatgtcccagctcctctcctctgtttgactgaccagtgggccatagctagcatcttcttcgtaccgtttcaactctcaggaatagcagccgccgctcgcacacgcagtacggatgatgttgccgccgccgtcaccaggaagctgaagcgctcgccgccaagtcagctgccagtgccttgcctccctgcggatccctcgctctcccaggaccagaaacagccgccaacttctctcccctctactctggaaaccgacgcccactctctccctctcccgtaacggtcaccgctaccatcaatggagtttaaggccgaccgtcgaccgtgactatcc

SEQ ID NO: 28304 - DNA, 778 bp, Zea Mays
gcaaatacaattttgtttaatttaatcatatgaaggaaatctcattttataaaataataaagaattatcaatatattaccattgtaatatgcattttattatgttaataacttttaattatagtgcttgcaaaagctccattttatcacttttattttattttggtaaagatcttttatttaaaatagaattctgcctaaaacaatattcttatacaaaataaatatttatttgtgttaatattattttagaagtttttttctgcagtgtatatatattatatattctgaatataaaaaacacacacacaacacacgcacacatctaaataaaaaggaaaaaagataaaagaagaggaaaataaaaaaaatgaattttgaaattgaaaaaaaaacaaaaaaaaaccaccgcctagcctctcgtggccgaacgtcccagccaatccaatgtcccagctcctctcctctgtttgactgaccagtgggccatagctagcatcttcttcgtaccgtttcaactctcaggaatagcagccgccgctcgcacacgcagtacagatgatgttgccgccgccgtcaccaggaagctgaagcgctcgccaccaagtcagctgccagtgccttgcctccctgcggatccctcgctctcccaggaccagaaacagccgccaacttctctcccctctactctggaaaccgacgcccactctctccctctcccgtaacggtcaccgctaccatcaatggagtttaaggccgaccgtcgaccgtgactatcc

SEQ ID NO: 28305 - DNA, 396 bp, Zea Mays
cgggcacggcgacggcttggggctggcagctgcgcgtggaagagcgaggaaggagagaggaggagagagagtggatggcggctgggagagggaaccaggggagcgacgctaggttagaagggggcgcggcagctgggccaaatgggccaaattcgttagggttttgttttttttcttattttttctctttttttccttttgtaaattccagttatatttttaagtaaccctaaatttcataataatcacaacaaaactatttataaataaaatattaattcttggactaatatttattatattatttatgtgaattttcatttaagaaaaaatgatattccatattcaaaatcaatcatgagcattcaaaaatcataccaaaggcaaataaataac

SEQ ID NO: 28306 - DNA, 355 bp, Zea Mays
ggaagaagctgcacagcatggagactcagggggctggggcgagttcgtcaaggagcagaggggctggggcaccatggggaagaacctcggcgcgcagagctccacggcgagccaggcgagcagaaggaaccagcagcgggcgagacctgggacagggaggaggaagcggctgggatgggcgcgtagagcagcagggcaaggccgcggtcaggcgagatccgaacagagaagctccggccaggggcgagcgatcggccggcgatggagcaggcggccatgggaagggcagaggaagcgccgacagaggagggggacgctagcagcaaaaaatcagaggagggagaggatagggatg

SEQ ID NO: 28307 - DNA, 579 bp, Zea Mays
aagtcccaattccactcaaagcaatagtgactagaagagagagttttgttgtgttcttttgagctcttgcgcttggatcgcttttcttcttcctctattcttgcttccaagttctttgtaatcaaagcaagagacaccatttgtgtggtggtccttgcggggactaagtgtcccaattgattgagaagagaagctcactcggtctaggtgaccgtttgagagagggaaagggttgaaagagacctggtctttgtgaccacctcaacagggagtaggtttgcaagaaccgaacctcggtaaaacaaatcaccgtgtcatccgccttatttgcttgtgatttgttttcgccctctctttcggactcgattatatttctaacgctaacctcggtttgtagttgtgcttaaagtttataaatttcagatttgcctattcacccccctctaggcgactttcatcatgtcgttctaggtttttcctcaactccctccactattgtgctgccattcttactaatggatgggggttcccattttttgttatttggaaataaagatcgtcttggtatgatgatgcata

SEQ ID NO: 28308 - DNA, 1985 bp, Zea Mays
cgcccgccgtttatctaaatctgggtcataaacctgtttcctatgcttcgagctaggctggggatgtcaatcaaatctgctggcgacaaactgaagtttggcctattaacaattttcccgtgcgtgcagccagccttcaggaaagcagtagtcgtgtctcgagaagctaacagggcgcagaaatcggcatgcccagcgataacttcgtcaagtgcatcaacttcgccctcaatgtattcaaaggtgcttggcaggttttcagctgaaggtgtaaacttatcagaactggctccaattgagtaaaacacatccttcagccgctgcacacatcggttgccgaaatctaagcatttttcctgcagctccttcaatgatttctgcaaatttgaattcttctcaatttcggtcttgagacttgtttcgagattcttcttttcttgctcagatttttttgattttacgagtaattcgctgtttaatttgtcaatttcggcttgagcttcagccagtgaaccttccatagagtgaatgacgaagtctttcttctccaaggcagcttcgtgatctttaactttattttcaaggtcttgaatgacgaagtcctttttcttcaaagcagcttcgtaactttcgactttgttttctagatctttgatggtagcttcgtttttcttgtcttcaagatcttgttgcatcctcagcactttacttagtaatataatctgccaaaacaaccttcgtcagaaaacatcttaattcaaaaaacaataaaaagttgagagtttttaccttgaaattagcgtagaacaagctaccggtgatatgttgtcgctgatacctgcagaggtccgcttcaatcttcggtaggccaacgttctttgaaaaagtcctaacaatcttggcctcggttcgattccgaaggcttcttagtttcccttcattgactccgccaaacagcagagcccctggtttgtacccacaggatatagcatatttctttagctcttcttttttagtttctgaaaactcttgtcccagtatatcttgaagttttcctcttccaaagtatcttcaatttgctcttttcctttctcaattgtcgtgtccaccgcggccgcagcagcttcttcctcagccatttttagaagtatgttatcaatgtcaccaagtgtggtttctagattaggatcttcggcggtctcagtttcggctccggtggcttcggtttcggtggctgctccggtggcttcggctccggtggctgcggtttcggcagtaccagcacttctaataaattgtggcagaacctccaagttattgggcccacatgcacctgtccttgtcccaaagacctcagacggctatgcatgtgctccagataacttaataggatctgtccgattgccccaaggatatcggataaaccactttcaaccagaaccgcgggattaagtaacacaaatcacacacaccaacattgttgcagcggaaatcttactaccaaattttacaagttacaaaaattttatattattttatcggagtggttacaaaagtataagtttgaaatatatgctagctcaagtgaccatcctcaataagaagtataagagagatacttagacttataagaaggccgagcccaccggcacttaacaccatcaacagcatcacaaagttaggacctgaaaaacaacagggaataaaaccctgagtacggaattactcagcaagacttacccgactaaagaaaagactctcaagggtatgctggctagagggatgcaaggaaaggcttatcaagaatcaaggactctgttttgcagaaaagcttactatgagtggatccttaaaaatccatttttaatgtcaggttaagtaaaattacctgcatctagagttctgtctaccctagttcaagcacttgacctgcactagccaatttcttatcaacccttcatcttcactggattgctacgtgtaag

SEQ ID NO: 28309 - DNA, 947 bp, Zea Mays
aagaagctggggcaggggcagggccgagtgccgtcctgggcgaggagccggaataccacgatagacgaggacgccatggtcagacctgggcgaactcggtcagagcagggagcagaacggacgccgtggccaggaagttcaagaagatgggagctcggccatggagaggaggatccgattcagtcgagccccggcgcgcagaatagggagcagggcgcgcgacggccatggctgggagaagctgggtgagttgcgcgcagggacgagcacaacagggcaccagggacacgcgtgggagcttgctcgcggcgctgggctataggagatggggaggagcgagctcggcgatggcaacagggaggaaatgtagcctcaaagcttccgtcggctaggagatcagcaccaggggaatagcgagctcatcggctggagattttctcctgagcggtgcaggataagctccacggagcaaaaaaaatcagaggaaatgagagagagcggctggggtttttttttccagggttgtgcagcgcggacaggagatgagatcgcccggaaaaaaatcaaagaccacgaacggctgaaaaagatcaggacgttgggatatttttcttttttttgttttgttttttgtttttttgttttaccaaaaatggcagatattttggaaccagatttttagaccggggcaagacataatcaaatcaaatcggaatgttgttaacaatagtattttggactgtgttttatttgattcgatgaatatttcccgtatcagatgaattcttacccttaatttatatttaaagatttgaatccggacgatgaacgacaacctggattgaactgatttcaacttcgatattgtacacagctttagtttacctagaagccagacaaaagtttatctggtaaggagtagattaaattaccaaggtccgagtttt

SEQ ID NO: 28310 - DNA, 696 bp, Zea Mays
gagaagctgggtgagttgcgcgcagggacgagcacaacagggcaccagggacacgcgtgggagcttgctcgcggcgctgggctataggagatggggaggagcgagctcggcgatggcaacagggaggaaatgtagcctcaaagcttccgtcggctaggagatcagcaccaggggaatagcgagctcatcggctggagattttctcctgagcggtgcaggataagctccacggagcaaaaaaaatcagaggaaatgagagagagcggctggggtttttttttccagggttgtgcagcgcggacaggagatgagatcgcccggaaaaaaatcaaagaccacgaacggctgaaaaagatcaggacgttgggatatttttcttttttttgttttgttttttgtttttttttgttttaccaaaaatggcagatattttggaaccagatttttagatcggggcaagacataatcaaatcaaatcggaatgttgttaacaatagtattttggactgtgttttatttgattcgatgaatatttcccatatcagatgaattcttacccttaatttatatttaaagatttgaatccggacgatgaacgacaacctggattgaactgatttcaacttcgatattgtacacagctttagtttacctagaagccagacaaaagtttatctggtaaggagtagattaaat

SEQ ID NO: 28311 - DNA, 227 bp, Zea Mays
agctgctccacctactactttatcttaactacatgtccctaattcggataacaacttcaagaacgaagatcgaagatgatcgacctcatcaaatcaaggaaggataagattcaagccagatcttcaaaagaatcaagagccacaatcttcgatagagtcttttcttaccctactctttcttaccccaaacctataactgccttaaaatatcttttatcctgcataat

SEQ ID NO: 28312 - DNA, 647 bp, Zea Mays
atctagcttagatcataataaattagatagaatccagattaggttggtatgactagattaaactagttaagattagatagatctaccgaggtgggataaatattattaggatatgctagaatcttttaagaaggatggacattgtttaggctagatattttaatgagtgataatctaagttgattagttatcttatgaattttttttatttatatttatgcctatatgtatatgcagatgtaattgtggacattactccacaactcatcacactcaatcaaagatccaaattagacatgtatcataagaacaaacattcaagcatacaaatatttacaaaaatacttttgattttgttcctaagagtgggtctcctatccctaaaggtcactttaggtacggaatttcaaagtgtgaaatccacatttgccttttagaaagaaaaggtaagaataatcagagtgaagcggaaatagatgagaaaagattaagaaaagcttagtaaagaatcagagtagcaaaggtaagtaagtaatgattgtccagttctatctaggtttcgtcctacagtcaacattcctctgataccacttctgtcacacccggattttaggggtccaaaacccgagcgcgaacataaacaccag

SEQ ID NO: 28313 - DNA, 137 bp, Zea Mays
aaataaaataacaacataactggaacatagatataataaaatattaacccaaaaccatataaagcagtagcagaactacccaagtgattcaggggtaaacaaggtattgagataaaaaaatctagggtaacctatta

SEQ ID NO: 28314 - DNA, 501 bp, Zea Mays
tttttatcttatacaaattttagggctttacaaattctacccccctaacagaaatctcgtcctcgagatttgtaagataagggatatagagagattggttgtaatatagcttttagtttctagttggtaccaaaatcaagagattttttttatacaaatgagtaggtgattatgaaggcatgggtatatatgtacaaccaccaaatgtgtaaaacaatgtctttaaagcatggataggttgggtaggacatagtagggtaaggaaggacttcataatgcatagtggatcttgattcctttggaagtatggcttgattcttattattcctcaacgagtttgatctccttcttctcgagtcttgatgtcttcatccgggtttgggacaagaggttaagatagatctgtaggcaacagatgggtagagggtttagtaggtagctatatgatagatgggattagttatgtaacctgttttgtaggtcaagttattaggtgtggcc

SEQ ID NO: 28315 - DNA, 226 bp, Zea Mays
ggaaaagggttaagaacgtgggtacccacgttcttaacgttaagaacgtgggtaccgtcgaacttaatgggcagccctcgccgacccacgcaggacccataagttcgacggccacgtggccccgtcgaacttaaatgtaagaacgtgggtgccgtcgaacttatgggaaaaaattcgacggcccccgtcgaacttaaaaacccacgttcttaaagttaagttcgac

SEQ ID NO: 28316 - DNA, 448 bp, Zea Mays
aaaattcaggttagatcttatcccagcacccttttgagcctcgcactttctttcaataatctgcattgttgaatttgtgtgctttcacgtcatttgttgctggttgcattgtgtttttttcaccatccttctttcttccaccattcaaaccctagcgcgccgccaccatctcacgtttgatcacgccacaaaccgagtcaacgtcgcttccttgtttttctccttcagttacgtaaaaaaacagaaacaaaaaaagaaaaaagaaaaaaaagaaagagaaagagaaaggatagaatcaaagaacaaacaaaaaagaaaggggaaaggatacaaagcggttgtctcatctcggtcattttcgttcgaaatttcccgccgatttggacgtcctgtagtaaaacggccataacttttcgctcggaactccgatttcagtgctctttttttc

SEQ ID NO: 28317 - DNA, 689 bp, Zea Mays
gttctcttctccctacaccccacaacaaaatggtgtagtggaaaggaagaatcgaactctattggacatggcaaggactatgcttgatgagtacaagacttcggatcggttttggggcgaggcagtcaacaccgcctgctacgccatcaaccggttatatcttcaccgaatcctcaagaagacatcctatgaactcctaaccggtaaaaagcccaacgtttcatattttagagtttttggtagcaaatgctttattcttgttaaaagaggtagaaaatctaaatttgctcctaaaactgtagaaggctttttacttggttatgactcaaacacaagggcatatagagtctttaacaagtccactggactagttgaagtctcatgtgacgttgtgtttgatgatactaacggctctcaagtagagcaagttgatcttgatgaaataggtgatgaagaggctccgtgcatcgcgctaaggaacatgtccatcggggatgtgtgtcctaaggaatccgaagagcctccaaaggcacaagatcaaccgtcctcctccacgcaagcatctccaccaacccatgatgaggacaaggctcaagttgatgaaggagaggatcaaaaggatgagccacctcaagataacggcaacgatcaagggggagatgcaaataatgaagaccaggaggatgaac

SEQ ID NO: 28318 - DNA, 699 bp, Zea Mays
aaacaatcctctcaaggaggccaccaaagaaagtataaaagtgggccataactaaagaaaaaaaactaccacaaactacaaagacaagtatctaagctgagagcagggaaagccccttggctccggccatgctccaagccacaatctcctctccagctagaaccaaggcctggaagttttccattaaagatgcaatcgtttctatgcttccaaatggcccacgcgaccaggaggatgagggagttcaggccattcttaacagaaccgcccaccgagctaacagcctgcttcgaaaaaagaagtcgactatagcggggcaatggcagcaaggcccaatctctgcagcaggatgaaccaaaattgttgtgcgaaaacacaatttatcagcaaatgatggataataatgagtcatctgttagatctgccttctgacatgccatgattttctttataaatctcaccagttaacaatgataaatagaaataaaaagatcgatcctggggattttgagtcttgccttttatttttatgttgcacaggatttttgagctaagttttccccctgtgataacgtgatttttttcataacaattcaattgaagccttccgttcagaaagacaatttaatcctgacctttcttattaatttaaacttataaaacaatgaatttttccactggccaatcattcaattgaag

SEQ ID NO: 28319 - DNA, 1985 bp, Zea Mays
ataatttgtagatctttccgtggccacgaagaacacctcaatcggacatcagaacagaaagttatgacagtttgattatagcagtttttcagtctcataattctgtgcagaatctgttctcttaagagttaggcaattttatcaacagaattaaactgtgggttggtaaaagaagttgtatataatttcataagctttccagattgttaaagagtgcattcatatgatttgtgaaactccagttatgtttgttttactgtggctgttcctgtttgcctgacaaaaatgagtgggtctgttcactggtgggtttcatctagtaaatggccgaattggctcttccaactatggagacttttgtagagggataaaagttcttacttccagcagaatttcataatttttggttcagtagtttgggagatatcgaattttaaagtgaaccatactgctgtctaaaacagattcagtcagttatcttgtgagatgttttagaacttgtagatggcagaatttaatcatccattgaatactgaagttgtagagtattttgtgtagatactcctagaatatttgtttgatatcaccgctgttttaattttaaagatgcaaaattaacaaacagcgctgctgctgtatggcatgtggttcagggtgggagtctttccactgggtcttggtttcaagtgtaggagtgttttgttgattgatggaaaatgtttgtgaaatatttgtactaagttttatgcccgctagcaggtggctacactctagattatgtctagtacatttcttcttcttcgatgaaggcaagtgaatgtagcggtggttgcttccgttctgacctgttatttctatttcctacactctaatattcagaagtattagattctttcataattggactctatggtgatgctttacttgcttgcattatactgatgctcaatcatatattgatgatgattatgattcgagtatgattcatgagattaattcacacccctgaaggtaaatgaagtattatttgaggttgatattgtatctgaaggtaaatgaagtattatttgaggttggtattgtatctgaaggtaaatgaagtattatttgaggttggtattgtatctgaaggtaaataaagtattatttgaggtttgtattgtatctgaaggaagtgaaggttattgataaatgcagcatgccatatacattgcatgactcatttgcatctgaagttttgtcgtgacctatggtccgaccgtaccggtacaatttagcatcgtacgttgctcgaggaggggtacgatgcggcttcatacccttagaggtatgaaggcagaggacatatgcattgcattcatatgcattcattgaagtgatatttgcagatgacgtggttttatactctcagaggtatgaagatagagtacctacacattgcattcctatgcatacattgaagtgatatttgcaggtattgttgacgcggggaagtgttatagaacctattgtggttgttcgaggaaatgagatgatattggttatattgggactactaagttctatatctacaagtatttctgatcttgattgtgattcttttaaaatgttgattaattcaatttgtggtttaaatatctcgtcagaacaattagcttgctgagatgtttcatctcactcttgcattactcaatgcaggtgctttttgctcatcaaggggagtgggaagtagcagcacatccaccttcactctcataataatgctgcccagacacagtcatgatttaattagaaacttctggtcaaaggatgtttgttttaactagtcgtgcgcactgattaattcagttcatgttgttatggttgtcttcccattgctagcagattattaatgtcttttatgttttcttatcatgatatctatttatactttgttgcatccccgtttatgcaattttcaaaggagatgatgtcgaaaatttata

SEQ ID NO: 28320 - DNA, 990 bp, Zea Mays
aaatatctttgatatatattaatgtctttggaatgcagatgacaataatttcacccctccctattcctttacggtgatgtggtaagtcgtttatgacttaatgcctaataatttatctctaaatctttatattgttttattaatgcgattgatatcgctggtcttttgagagattgaagttgttattatgcttgtgatatacaagtatgtctatgttgtttacaccatgtttttcaaggttgagttttattacaataatattgttatatatgcttgattgaggatgtttctaagaggagtgtgaattgcgtgttttgggttacaaggtaaccatcaatttgaatttaagttgttgagcggttggtggatagttccaactatctttgcaaagaatgattgtttatgtcgagaaaccagttctgaaagaaatgaatgttggtacttttatatgaattttgggggaagtctttacctagctagaatggcttacatgtctctcttctattgtgtgttttagtagccacaaagcctagatgtggtttaaagtggttgcatgttagtcatgctagttgtagaataaacctttgattttctggatccattgattatgtattaatatatggaggattagatggttctctctccgatgcatgcttgtggagccattgctggaccacctatctattggtttgaatgaagccagtgcctagcctagagtttgttgtgtgtggttagtcacctattcgtaaatgatgtggtttttacatcagcttgagatgtttgtcaaatgtgtgaaggattacggggttattattgaccttgtatgttatgtactttgagtgcatcgtatgatagaatgaaatgtaagtttatgaactacagtagatgaagacttatattatgtgtaggttaaccttactagttcggatatttttcttagttgagttgttggatgaagtatactgacaatggttaccaagtattgtgttg

SEQ ID NO: 28321 - DNA, 1411 bp, Zea Mays
aatgggggtacactgttggcgagcgtatgtaactgaggccatgtgggagttggagacttagcttggggaaggagttggcgctggttgtgtctagacggtgacgtcatgtgtgagtgaatcccttctgttcgtcgagaattctagtaaaactctataacttcgtgagagaaggatagtttcaggggcggggctcgctatcatcaccatctatctctcacaattggtattagattcttgttgcgatcctagcggatccatctgagtatactcttcgcccttaaaatcaggcaagggggcaaaacaaatcgacaacatggagaagagtttagccgatctctctcagctgctgcaatctttacaagtccagaatgattccatcaagcaagccattgaggtaaacatagcatctaagccctagaccgaggacgatgtgggtcacctgcatgaaaatgtgggacacctgtcgaacaaagtgaagaggtgatggtctgcgcccaccacacattcatgcatcgaaggtgttcgaaggtgtgctattgaaggatcaagcgacgctggaagtctctacatcgacatcacggcatcagtctgtaccggacctctacgatcaccgccctgctacagcttaccggagtgatggttttggggttgtcaccaccctaacaccatctccggttgcaggtaacaaaacccttttgcatccggattccccttcatctaccttacttcctcatgttgaacccatgtggccatcttattcgcctcatatgatggcagccttacctcaaatgagttttccttagttcgatggtcaccatacgaagatgtggatggcaaagtgcgagtcctactttgatgtgtttgttgtcccgggtgaattatgggtcaaagtagcaatcatgcacttcgtcggttcagtcgttttttggttatagtctatggaaaaaagctttgcgaaacacagtggacttagttttgctcagcggtgtgtgcccgctttgagcgtgatcatcacaaccatttagttcatcggttctttcacatcaagcaagttgacactgtcacggaatatatgttgagcacttcaatactctggtgcatcaaattctagctcatgacccttcatttaacatatttgctattgtaaatcgttttgttgatggcttggaacctggcattaaggttgtagtttttatgcagcggccatggacctagatactgttgtttccttggctttgttacaggaggtgctcactggtcacaagacccactctatgccttctaaggtagctgaaccatcactgtccagaactgtgtcacatccgacaccattgtcttcctctcaacctgctgctacaacttcagaactccggcgtggtgtggatggcaccaaatcaagcttgaagaaaac

SEQ ID NO: 28322 - DNA, 357 bp, Zea Mays
cccaaactggttactgaggatctgtcgtcggcacgttaattagcactgaataattgaatatgtttacgcgggtacgccacacacgaatttaactaaattaataagcgccatgtcacgcgcgtcgtcgaaatttagaaatattaatcgatggaggctgctcacctgagatagacagcaacgcccaaatgtcacgcctgaataagtctggatattggttattagctcgtcttgtttggttgcgagcgaggagacatgtttgagtgcattcaccgcattcatttgaagtttgcttttgcaaaacctgcagcaataaagcagtagacctaaattcaaagatacggaaaaaaaacaaaaaaa

SEQ ID NO: 28323 - DNA, 617 bp, Zea Mays
cctggattggcgaaattgtaacactctaggttccacaaacaacccggtatgttactgtactacacttccgacgtccatatataaaatttcggcagcatcccctttgcaagattgcataaaagagggagcaacagagtataaacatatatcatgactaaaacatactaagtattattactcggctagcaaggaaagataaacatacgacctgaactgaattaaccagtgcgcacgaccatataaaaaaaataaacaaacttcctttgacaataagtttctaattaaatcatggctgcgcctggacagcgttattgtgagagtgaaagtggacgtgctgctactcccctcattcccaacatgtatcaaggacctgcattgagtaatgcaagagtgagatgacacatctcagcaagtaaaataatatcaaacagtttaaccacataagaacattgttttaccaccacttaattccacaaccttcttattacgaaggtgcagcacgtatacaacgtacaacgcacctagttaccacacctcgcaggtagaaaccacaatagtaacatagtaatgtcacacttcatatattcctcatgagtgcaaatgtctgcaaatgcaag

SEQ ID NO: 28324 - DNA, 578 bp, Zea Mays
cggattcaaacggtgataactttcaatttataactccaaattgagcgcataaatactcgttggaaaggtaaggtaaagttctacatgatccccaaactgatttcccttaattcctcacgaaaaaaacacagaaactgctagactactgctgttcacccaccacctaaaattctggacagcccccctctaccccaatcgcaaacgcaacctctaatcaattaaattgcagcgcaaatgaacaagggatgaacacaaaaatcaccttggattctccccctttccttcctcccttcttccctccaccaaaacgattgaagactcgcaccacgacgacgatgatccgagcggcaaggattggcaccttgggaggagggaattgagagggggggcggctagggtttggtggctacaagaattgagagaggaggagatgggcaggggggacggcagccaagggggaagagaagtggggggcggctgcacatgggggaagggggttaggagggaggcggctagggtttgggagggttaatgggccgaaactccaattgcggcccaactaacccacgcgacagctc

SEQ ID NO: 28325 - DNA, 419 bp, Zea Mays
aaaccaaacacgctatatactataatagagtggctccatgaccctatactctggatccaaacgctacctaagtgggggtaggtttgtaacatcccaaaaatcccaacccaaggtttggaaccctaacctcctaacccccctcttattttattttctccctaaactccacccttagatcatcccatcatgtgcatacacttgaaataataggagcacctcacatagactatattcatcactcaagatcatttagaaaattattgattaaaaggaaaaagaaataaaaagaaacaaaagtagaaaaatgaaaagaaaagaaatagaaaaaagaaaaaaagaaaaaaaacctcccccccctcggctgggccaattctggcccaaccagcgccgcgccctcgcttctcccccctctcccccgg

SEQ ID NO: 28326 - DNA, 318 bp, Zea Mays
ccaccacctaaaattctggacagcccccctctaccccaatcgcaaacgcaacctctaatcaattaaattgcagcgcaaatgaacaagggatgaacacaaaaatcaccttggattctccccctttccttcctcccttcttccctccaccaaaacgattgaagactcgcaccacgacgacgatgatccgagcggcaaggattggcaccttgggaggagggaattgagagggggggggcggctagggtttggtggctgcaagaattgagagaggaggagatgggcaggggggacggcagccaagggggaagagaagtgggg

SEQ ID NO: 28327 - DNA, 191 bp, Zea Mays
ccacccccctctctctccctctccttcttccccaagtgattgcagcaccacccctcaaccctagcccccccctcctctccatggtgcatcctccccgcttggtaccccgtcgtgtgggtgcgagtcttccattggagtttggagggaggaagaaggaagaatggaaggaggaaaggaggaacccaaggtga

SEQ ID NO: 28328 - DNA, 156 bp, Zea Mays
ctgtaaacgagcactcggatgcccgatttcacgagcaatccgacaacgttgatggtcgggatctgcaggttgagcagctcatactcgagaacgctgtgtagtgtaggagaaccgaaacattgcaatgttagtttcgcgtttagagttcagacagag

SEQ ID NO: 28329 - DNA, 2249 bp, Zea Mays
ctcctcgataaaccatacatagagtaatttgaactaaacatagttcaatccacagaatattacaaataatagtccacaggcatgagacatagagttcaaagttcaaatagtagtagctagtaccaagtgcataagacataaaataaagcatgcgacataaaatggtaaacatgcacatgcacggtctcaatgtccacatagaccaactccccctgaaaaccctgaatgtgacaactgctcttctctttcttcacttctctccccctttggtatcaattgccataaaggagaggcttcactgatcactcggtggaggatgcatgttgtagtagtgagtgctgaaggtgtcaaaaagagaggagaactggccaaagtcttgctggagttgttgctgcctctgactgatctcatgcatgctgtcatttgtagagaggttgtcaaattgactagacagagctcccatgttatcctgaaaactctgctgcatattgttaagtctggtcatgataggatcagtgacattagtttgaatgtgatcacgaaattcagaatactcagcattgagcgcatcccagttactgtcaaaactggattgcatgacatccagacgatgatccatatgtgtcatcattccctcaaagcgagtatcaagatgagtctgaagcccttgctgcatattttgaaaatatgggtcaaagtagcctggaccaggctgccaatactgctgaggctgaggaggagatggaggaggaggcatctgctctgcctcagcatcatgagctgctgctgcatcataaccagggtcttcctcatcatctgggaagggagtgagtggcctggtgaggaacccaatttcattcttaaagggtctgaacggtgtatgaactatctcgcagggcccctcaaatcttgtctttgctttgatgagagccataatataaggtgcataggttaggttctggtttttatccattttcagatcattgagttgtctcatcatgaagagcacaatattcattacctcaccattcatgacatggtggataatgttccaaaatttgtctcgaattttgctcttatccccactcttgggaagaatagtgacccttgcaatcttgttgatcacagcaggatgatggctcagtcctgctgtctctccaaacctcctagggatgcccagccttgctggctcatagaattgcacaaagtcctcaaaattatcttcagtgtagagatctagcccagctgaaatgatgccataattcagactgttggcagcagcaaaatcagcaaaagttgcagaatacctcttgaatccagtcatccaagtgatagattcttcttctatatcaatctctgctgtggccaggaattgcttgactgccatctcactgaactcagttctctgccccataaactagtacagaccacatgtctcaaacttagtaatcagatcctccatgactgattgtcccagcatgaaggaccaatcaatcacctgatgtttatgaaaatttgtatccatcaatgtgcctcaaaaaacatcaaattggagctgagtgtggaaaaattgaacattggtgtcaaatggcagagtgtattgattcacagtgtaacactccaggttccacaaacaacccggtatgctactgtactacacttccgacgtccatatataaaatttcggcagcatcccctttgcaagattgcataaaagagggagcaacagagtataaacatatatcatgactaaaacatactaagtattattactcggctagcaaggaaagataaacatacgacctgaactgaattaaccagtgcgcacgaccatataaaaaaaataaacaaacttcctttgataataagtttctaattaaatcatggctgcgcctgggcagcgttattgtgagagtgaaagtggacgtgctgctactcccctcattcccaacatgtatcaagtacctgcattgagtaatgcaagagtgagatgacacatctcagcaagtaaaataatatcaaacagtttaaccacataagaacattgttttaccaccacttaattccacaaccttcttattacgaaggtgcagcacgtatacaacgtacaacgcacctagttaccacacctcgcaggtagaaaccacaatagtaacatagtaatgtcacacttcatatattcctcatgagtgcaaatgtctgcaaatgcaaggatgacttctgccttcatacctctaaggatatgaagc

SEQ ID NO: 28330 - DNA, 367 bp, Zea Mays
cttaattcctcacgaaaaaaacacagaaactgctagactactgttgttcacccaccacctaaaattctggacagcccccctctaccccaatcgcaaacgcaacctctaatcaattaaattgcagcgcaaatgaacaagggatgaacacaaaaatcaccttggattctccccctttccttcctcccttcttccctccaccaaaacgattgaagactcgcaccacgatgacgatgatccgagcggcaaggattggcaccttgggaggaggggattgagaggggggcggctagggtttggtggctgcaagaattgagagaggaggagatgggcagggggggcggcggccaagggggaagagaagtggggg

SEQ ID NO: 28331 - DNA, 259 bp, Zea Mays
aaaagatcatagctcaataggttgtggggaataatgtgcatgaactcaccaaaggtgggagttcatgtgaagtgtaaggctaatcaacaataggggttaaagctgagcattgtttttaataagttggtcaaattttattagcaattactagatgtaagtaaataccatactagaatagaaataatagaacaaattaatagtgaatcccatgcaatgcaaatgacaaattgaatttagttccatagtttaatcatgcgag

SEQ ID NO: 28332 - DNA, 354 bp, Zea Mays
aaaggctgagcgtgtgattttgtgttttttttcttttgtttttcttttcttaatttggatgtgtgcgttcgtctctcttttatttatttatttatttcgaaatttatttttttttaattactatatttttatttttactaggttcgtgcccgtgcgttgccacgggagtaaaaaattagtatgaaacatatatacgaaataacaaacatcacttgggtggtaaggtggaacctcgacgtcaacctcatctgggcatcacggggagactcactgttggtcggcgactccatcgctagtgatggtgccttgtggtcgggaacaacggtggctactgctactgttgcgggtccaaat

SEQ ID NO: 28333 - DNA, 378 bp, Zea Mays
gttgctggtcgcattgtgtttttttcaccatccttctttcttccaccattcaaaccctagcgcgctgccaccatctctcgtttgatcacgccacaaaccgagtcaacgccgcttccttgtttttctccttcagttacgtaaaaaaacagaaacaaaaaaagaaaagaaaaaaagaaaaaaaagaaaaagaaagagaaagagaaaggatagaactagagaacaaacaaaaataaagaaaggggaaaggatacaaagcagttgtctcatctcggtcgttttcgttcaaaaattcccgccgattcggacgtcctatagtaaaacgcccataactttcgctcggaactccgatttcagtgctcttttttcggaaagctctcg

SEQ ID NO: 28334 - DNA, 4089 bp, Zea Mays
gcataggatttaggttcttggcaatttgaagataaatttgacacacttgcacatataggaagggtatgggttcaaatatctttgatatgtcttaatgtctttgaagtgcagatgaaataattttaccctccttattcctttacggtgatgtggtaagttgtttatgacttaatgcatgatataattcatttctaaattttgatattgttttattaatgcgattgatatcgctggtcttttgtgaggttgaagttgctattatgctggtgatatacatgtatgcctatgttgttttcaacatgtttttcatggttgagttttattacaataatattgttatatatgcttgattgaggatgtttataagaggagtgtgaattgcgtgttttgggttacaaggtaaccattaatttgaatttaagttgttgggcggtgggtggatagctccaactatctttgcaaagaatgattgtttatgtcgagaaaccagttctgaaagaaatgaatattggtacttttatatggattttgggggaagtatttacatagctagaatggcttacatgtctctcttctatcatgtgttttagtagccacaaagcctagatgtggtttaaagtggttgcatgttagtcatgctaattgtagaataaaatctttgattttcttgatccattgattatgtattaatacgttgaggatctaatggttctctccctgatgcatgtttgtggagccattgttgcaccacttatctattggtttgaatgaagtcattgcctagcctagagttggttgtgtgtggttagtcacctattcctaaatgatgtggtttttacatcagcttgagatgtttgccaaatgtgtgaaggattacggggttagtattgaccctttaggtctggtactttgagtgcatcatatgatagaatgaaatgtaagtttctgaactacagtagatgaagacttatattatgtgtaggttaaccttactagttcgatatttttattagttgagatgttgaatgaagtatagtggcctgggttaagcaagtattgtgttgttgttgggctatcagtgctctatgtagagtttttggcattttttcgatgaactatgccgcacaagatgttattggcttcttttggctttattgctccattagttctatagattttctcccttttggtggggtgcaaagtatgttagattacatgattatcttttcattatggcaagaacaatgtttaggaagattaggagttttgtttcaacagaattacttgtttcgtggtgctatgaggtgaggagtttgatcttcttatacattcatctggtgtggatgtttcaccattgaattaaaatgaattgttaaagttggtaaaggttgtgcttagtgtgtattatcccttcataaaagagtgttgttttaagacattgatgttgatgtatggctgcatccaaattcaatgttgtgaaatcgtagtgtttattgcatctatgacttggtttgagcttcattacatgttggttcatgcttgatgtcaggtggtgtagtttccttagacagttagtcgatgtagaagttcttgtgttaattaagaccaataatggacccatgttttgaatggtggtgctatatggggtaccttgggtgttttgcttggagtggccgaattcgaggtcgaattctttttaaaggggggtagagtgtaatatcccaaaaaaatgttgaccaaaagttaatctttggtgcgtggatgaggtaaagggttgtgggccattggatgcaaagatagaagtcatctgaggcgtcgtttctttctcccacaaaaaaccctaggtggccaccccttttttccccttcacccccctcttggccgccaccccctttctcccccttggctggacgccccctccccctatggcagccatcctccattgcttcctcccccaagatctccccctacgcagcaaggatcgagaagaggaggagcacgttgaattgaagagaagagaggatcaaggaggtgttcttccccatctcttcttgcatatttgcttggggaaaccctaggtatggatgggatccttgttcctccctgtaattatgtgcttttggaggtggtggatcatggggattaaaggattagaggttggattagatgtgggttaagttttgatatcgaatttagttttctgcagaatggcagatttgacagtttctgttcattctagttttacgtggtcttagtggcctcaaaaaaataaaaagtctatgtatgagtcgtagataatttgtagatctttccgtggccgcgaagaacatctcaatcggacatctgaccagaaagttattgcagttttactatagcagtttttcagtctcataactctgtgcagaatcagttctcttaagatttaggcaattttatcaacagaattaaactgtgggttggtaaaataagttgtagataatttcataagctttccagattgttaaagagtgcattcatatgatttgtgaaactccagttatgtttgttttactgtggctgttcctgtttacctgacaaaaatgagtgggtctgttcactggtgggtttcatctagtaaatggccgaattggctcttccaactatggagacttttgtagagggataaaagttcttacttccagcagaatttcataatttttggttcagtagtttgggagatatcgaattttaaagttaaccataatgctgtctaaaacagattcagtcagttatcttgttagatgttttagaacatgtagatggcagaatttaattatctattgaatactgaagttgtagagtattttgtgtagatactcctagagtatttgtttgatatcaccgctgttttaattttaaagatataaaattaacaaacagcgttgctgctgtatggcatgtggttcagggtgggagtctttccactgggtcttggtttcaagtgtaggagtgttttgttgattgatggcaaatgtttgtgaaatatttgtactaagttttatgcccactagcaggtggctacactctagatcatgtctagtacatttcttcttcttcgatgaaggcaagtgaatgtagcggtggttgtttccgttttgacctgttatttctattgcctacactctaatattcagaagtattggattctttcataattggacactatggtgatgctttacttgcttgcattatactgatgctcaatcatatattgatgatgattatgattcgagtatgattcatgagattaattcacacccctgaaggtaaatgaagtattatttgaggttggtattgtatctgaaggtaaataaagtattatttgaggtttgtattgtatctgaaggaagtgaagtttattgataaatgcagcatgccatatacattgcatgactcatttgcatctgaagttttatcgtgacctatggtccgaccgtaccggtacaatttagcatcgtacgttgcccgagaaggggtacgatgcggcttcatacccttagaggtatgaaggcagaggacatatgcattgcattcatatgcattcattgaagtgatatttgcagatgatgtggttttatacccccagaggtatgaagatagagtacctacacattgcattcctatgcatacattgaagtgatatttgcaggtattgttgacgcagggaagtgttatagaacctattgtggttgttcgaggaaatgagatgatattggttatagtgggactactgagttctatatgtacaagtatttctgatttttaattgtgactcttttaaaatgttgatgaattcaatttgtggtttaaatatctcgtcagaacaattagcttgctgagatgtttcatctcactcttgcattactcaatgcaggtgcttgttgcttatcaaggggagtgggaagtagcagcacatccaccttcactctcataataatgctgcccaaacacagccatgatttaattagaaacttcttgtcaaaggatgtttgtttttaactagtcgtgcgcactgattaattcagttcatgttgttatggttgtcttccc

SEQ ID NO: 28335 - DNA, 2536 bp, Zea Mays
gggttgtgggccgttggatgcaaaggcagaagtcatctggggcgtcggttcttttctcccacaaaaccctagggggccaccccttttccctccaccccctctcttggccgccaccctcccccatttttcccttggttggccgtcccctctcctcccatggcagccgcccaccatttcttcctcctccatagatcttcccctcccccacacagcaaggatcgagaagaggaggagcaagatggattgaagaggaagagaggatcaaggagatgttctacccccccatctattgcagattttcttggggaaactctaggtaaggatgggatccttgttcctccatataattatgtgtttttggaggttgtggatcatgtggattgaagaattagatgttggattagatgtggggttaggttttgatctcgaatttaatttctgcagaatggcagattcgacagtttctgttcatgccagttttccgtggtcttagtggcctcaaaaaaataaaaagtttatatatgagtcgtagataatttgtagatctttccgtggccgcaaagaacacctcaatcgaacatcagaacagaaagttatgacagtttgattatagcagtttttcagtctcataattctgtgcagaatctgttctcttaagagttaggcaattttatcaacagaattaaactgtgagttggtaaaagaagttgtagataatttcataagctttccatattgttaaagagtgcattcatatgatttgtgaaactccagttatgtttgttttactgtggctgttcctgttaacctgacaaaaatgagtgggtctgttcactggtgggtttcatctagtaaatggtcgaattggctcttccaactatggagacttttgtagagggataaaagttcttacttccagcagaatttcataatttttggttccgtagtttgggagatatcgaattttaaagttaaccatactgctgtctaaaacagattcggtcagttatcttgtcagatgttttagaacttgtagaatgcagaatttaattatctattgaatactgaagttgtagagtattttgtgtagatactcttagagtatttgtttgatatcaccgctgttttaattttaaagatacaaaattaacaaacagcgttgctgctgtatggcatgtggttcagggtgggagtctttccactgggtcttggtttcaagtgcaggggtgttttgttgattgatggcaaatgtttgtgaaatatttgtactaagttttatgcccgctagcaggtggctacactccagatcatgcctagtacatttcttcttcttcgatgaaggcaagtgaatgtagcagtggttgcttccgttctgacctgttatttctattgcctacactctaatattcaaaaatattggattctttcataattgaactctatggtgatgctttacttgcttgcattatactgatgttcaatcatatattgatgatgattatgattcgagtatgactcgtgagattaattcacacccttgaaggtaaatgaagtattatctgaggttgtattgtctgaaggtaaatgaagtattatttgaggttgtattgtatgtgaaggaagtgaaatatattgataaatgtagcatgccatatacattgcatgattcacttgcatctgaagttttgtcgtgacctatggtccgaccgtaccggtacaacttagcatcgtacgttgcccgaggaggggtacgatgcggcttcatacccttagaggtatgaaggcagaggacatatgcattgcattcatatgcattcattgaagtggtatttgcagatggtgtggttttatactctaagaggtatgaaggcagaggacttacacattgcattactatgcatacattgaagtgatatttgcaggtattgttgatgcaggaaagtgttatacaacctattgtggttgttcgaggaaatgagatggcattggttattttgggactattgagttctatatctacaagtatttctgatctcaattgtgatccctttaaaatgttgattaattcaatttttttttggtttaaatatctcgtcgaaacaattcacttgctgagatgtttcatctcactcttgcattactcaatgcaggtacttgattcatgttgggaatgaggggagtagcagcacatccaccttcactctcataataacgctgcccagacacatccatgatttaattagaaacttcttgtcaaaggatgtttgtctttaactagtcatgcacactagttaattcaattcatgtcgttatggttatcttcccattgctagccgattattaatgtctagtatgttttcttatcatgatatctgcttatactctgttgcttccacgattatgcaaattttcaaaggagatgctgtcaaaattttatatatgaatgttagttgtgtagtttagtagcatttcaggatgtttgtggatcctggggtgttacagtcttggagtggagtcttttgctcttgtattgaat

SEQ ID NO: 28336 - DNA, 1771 bp, Zea Mays
aaccaaaaccaaagttgtgaatcttaatgagatctgcaactttatagttggtgacttatcattgaaaataatttatggtcccaaaattgtatttgaggttttcgcattattttgaaatttaaaactttcaacgaaaaatgctcattagtaatgttataggtctcaacgagatctaaaattttgcaaatgaaactttttctctaaatttgttttggacctctaaattttattacattatctaacaaattccatccaaaagcaaaatatcatatatttttaagtcataggtttttggtacggagcccttaaggttttaacgtccaaacccagtgaaacttgcgaactattgtactgggtgattctaaggctcaaccgctgaaacccctacaggtaggcatacacatccaccacatcctagacacatgtcccgttggtccacaaccgcgtcggcgacaaaatccgcttccgtcgtgttcttgtgacagtcggtgtcttcatgtgttagccaccatagctagttacctagctacttcagtctctcggtcaagactaagcgcttcctttgccaattccggtccatctgcacatgaacccgtatggccttcggcttcactgtcgaccaccgtcttcgtcggtttccacacccgcgcgtcatagaccaagagacatgttgcacaaatgcactaatgtcccagctagttagtccacacgactcaacccaatacgctatacttattgacaatcactcgtcagaacccgaaatataagaccgttctttgaattgttgcttctgtggggtggatgaatctatcgatcacctgttttttaagtgccccattgctcaatatatgtggagagtaattcaagttgccttgaatttgaggttgatcccgaaaaatatcaaagatctgtatgacaattggttttgtaaaccaaaagacaagatggctcatctagtgttatttggttgtggtgctttattctgggctatttggcgcactagaaatgattggtgctttggaaaaaaatcatttactcgatccgtctaacatcatttttctttgctgcttctggctggactcttgggtgattcgtcagaaaaagaaggagcaaagaatggtggtgctaggaagcaagctaatacgaaagacggcaagtgaagctttcggaagggccttggggtggtgccctctcgacaggcgtatttctggttgatccgaagctggaactgggaattgatgtggatagttgtctatcttttgttggctagactgttcagttccttttgtggcttctgcctgtcttgttgggatgtaaataagaaagtcttatgtagtccttcgtaggccaaaacttttcctgctatcgtaggctcttcactgatctcgtgatagtggttagagtcttgatagggtattggccgtggtcagtcttttggatgttttaccgcgaggtggcggttgtttcaaactttcctatttcttaatgaaatagggggtgtttggcaacaaaaagagccaagcggatggtccagccctggagccggacggtccgtggtccggacagtccacgcctgtgggccggacggtccgcgcctgcgcagaacagattagggttccgagttttgtgctatgtttgttagctatattcgcgggtttagctcagaatctggtcgtgtaaagggtccagcccccctcctctataaaaagagaggtctacggccgatttgtaaggatcaatcgaatcaatacaacttctatttgcatttatt

SEQ ID NO: 28337 - DNA, 248 bp, Zea Mays
aagcaccagtgagcgtcgattgctcggatttaggtgggggatcaggggtgttcatcggagtacattgtacttggggctagtttttttcaagcgtctggaacaagcagtgaaggcccgatgtttggtttgggaaggcccccttccgtgacaatggaattagtgcatgctactagcgttcgtctggagtcccatatacaatggtgggttctggaaactgaggtaaatctttgactgacctagtttctaat

SEQ ID NO: 28338 - DNA, 1499 bp, Zea Mays
gtttgttcttgtgatacatgtctaatttggatctttgattgagtgcgatgagttgtggagtaatgtccacaattaacatgtgcatatacatataggcataaatataaataaatgaaattcataagataactaaacaacctagattatccattggaatatatctagcttaatagatccatcttatcttaaaagactctctcttattccaatagattcatcttatcatgaaagatttgttttatcttaaccactatatttatctcatcctaaagtaacaaccatgacctaatccaaaataatgagatcttaactagtttaatcaagttgtaccaacctaatctagattctatctaatctattatgatctaatctagagtaagttacttaatattggtacaaaggataaagccatactccaaatccacttaagcttaaactggtgacctagatcaactcggccatacccaacaacttgacctacataacagatctatcttagcctcttgtcccaaacccggatggagacaccagagagcaagactggaaaaggacaagatcaaccttgtcaaggaaggagagaagtcaaactcgatcttcagatgcattaccacccaacaaggagtcctttctcaccgtaaactttcttacttaggctattcttgccctaacctatccatctcttatatcatgcataataagtagctggatacctatgctctctcaatcactcacccaccattgactacataaaaaaaacaagaccctggatttttaaaccaattatagactaaaagccgaattacagaaatgcttctgtatccctttcttgcaaatctcgaggacgagatttctgttaaggggggtaggatttgtaacgaccaaaatcctattctaagatttacaaatattttttataaggtttagggttaaaaggtattttaatataagaatcctcatttttaaatgttattctaaaaaaactaaaagcttggaaccataaacacaagaatgttatttatttattattctctttatgaactacatatacaaatgcactccttcaaaaaataataacttatgggaaaaatattgtgtgggttgcataattggatcatttttttatttttttatttgcatgaataaatgaataaattaattattataaattatacctgcatcatgttgggtttgtttgtgcatttattttgaattttaaaactaagaactgatttgaatttggaattgaaataaaaaaaacagaataaaaagcaaaagaaatagattgcttacctgagaaatgggccgaatttcccctcccttagcccagtctggtgccctctcagactaccacgcgcttgctggcgagtctctgacatcgtgggccaacccgtcagcgttgtcttccccgagtaggactccaacagaccgcgtgattccaggcaacaaaaacatacccgacgccgctgctatcccataatattcgggggggtgcaccggcc

SEQ ID NO: 28339 - DNA, 1389 bp, Zea Mays
ctctttggtaagccttacacttcacgtgagctcccacctttggcgagttcatgcacattattccccacaacttgttgagcgatgaatgtatgtgagctcactcttgctgtctcacaccccccccacaggtcaagaacaggtaccgcaggatgaggcgcttgaaggatgtggctatgtgttcgtgagaggtctaggtcgccgtctcccagtcaactttgggttgctggaccgttgtctccttataatgtaattatttattttgtgcaaagttcctgttatgtagtaaagatgtgacattcgatcctgtgccatgattcatcatatgtgtgagacttggtcccagcacacctagtgattatgttcgcccccgggtcttggtgccccgaaacccgggtgtgatagtatgttgtcctaggaagcctcaaaagggtatgttgtcctaggaagcatcaatagggtatgttatcttagggtatttacatttttaggactcgagaagacagtcctagggtatgttgtcctaggaagcctcaaaagggtaagacttacaaagatggtagtttaggctattgctatggagttattcttaaaaatgtaaatagctaggctagtttaaatatgcttcatgcaaataagcgtgcaagcctcatcctgagcagcttcaactatgttcttaggatggcaagctagtacaggccttactaagaggccttcacaactagcatgcaagatgatgaatacctaacacacatgctattaagggtataatgagtgtattgttgtattcccctctataaggaaaatggaccgcgacccatttgcttaagtgattttggtgtttgatgagtgatgaccaacatgacttgtggactaatgtgtttgttagtgtttatgtttatagttcataggatgaaacatggacttaaggaattgagggagcaacacctcaaggaagacattagcagactcattgaagacttaccaacatcaagcaaagtccaagacacaagacaagaaaagcccaagtgaaaacaacttgaagaatagaagattgggttgtttatgagtgcaccagaccgtctagaggttcaccagaatgagacactaaaccaaacactcatagagcatgtaaacaacacccaagccttctcacacactgttggtacaccggaccttataggctcaatgattggcaatagctagttgcaacggacaactgacatggcaggcactagactgtctgatgtgcgctattggcacattagacctctagtgtacagatgaaaagttgtcatatttccaatggttagctaaagtggaagggcaccagacgggtttgttgtgactcataaaagtttgcttccttccaatgactcttttgggcttggg

SEQ ID NO: 28340 - DNA, 158 bp, Zea Mays
ctaattgatcacgtgatgtggaggacaagagctggatttgtctcatggtgatgctgatgaataaacctgaagattgatgatctgatcgagtgctagaatgggagatgtcgccaagcaagcatcgtctaacaacactgacttagtggtatcccaggcaa

SEQ ID NO: 28341 - DNA, 110 bp, Zea Mays
aagcattcccgacgagggctcgaggcgatgcgtgatggccgcaagcccccgagtgtatctcttgcatgagttcctgaccttcggcgatggagatgcatcgttggaggatg

SEQ ID NO: 28342 - DNA, 1614 bp, Zea Mays
ctaagactaacatgggctggctctggcatcgccgactagcacatgttgggatgaagaatcttcacaagcttctaaagggagaacacattttaggactaaccaatgttcattttgagaaagacaggatttgtagcgcatgccaggcaggaaagcaagttggaactcatcatccacacaagaacatcatgacgaccgacaggccgcttgagttactccacatggatctattcggcccgattgcttacataagcatcggcgagagtaagtactgtctagttattgtggatgattattctcgcttcacttgggtattctttttataggaaaaatgtcaaacccaagagaccttaaaaggattcttgagacgggctcaaaatgagttcggcttaaggatcaagaaaattagaagcgacaacgggacggagttcaagaactctcaaatcgaaggctttcttgaggagggcatcaagcatgagttctcttctccctacacacctcaacaaaatggtgtagtggagaggaagaatcgaactctattggacatggcaagaaccatgcttgatgagtacaagacttcggatcggttttgggccgaggcagtcaacaccgcttgctacgccatcaaccggttatatcttcaccgaatcctcaagaagacatcctatgaactcctaaccggtaaaaagcccaacatttcatattttagagtttttggtagcaaatgctttattcttgttaaaagaggtagaagatctaaatttgctcctaaaactgtagaaggctttttacttggttatgactcaaacacaagggcatatagggtctttaacaagtccactggactagttgaagtctcatgtgacgttgtgtttgatgaaactaacggctctcaagtagagcaagttgatcttgatgagataggtgatgaagaggctccgtgcatcacgctaaggaacatgtccatcggggatgtgtgtcctaaggaatccgaagagcctccaaaggcacaagatcaaccgtcctcctccatgcaagcatctccaccaactcaaaatgaggaagaggctcaagttgatgaagaagaagatcaatcaaatgagccacctcaagatgacggcatagatcaagggggagatgcaaatgatcaaaacaaggaggatgaagagcaaaggccgccacacccaagagtccaccaagcaattcaacgagatcaccccgttgacaccatcctcggcgacattcataagggggtaaccactagatctcgtgttgcccatttttgtgaacattactcgtttgtttcctctattgagccacacaaggtagaggaagcacttcaagattcggattgggtggtggcgatgcaagaggagctcaacaacttcactaggaatgaggtatggcatttagttccacgtcctaatcaaaatgttgtaggaaccaaatgggtcttccgcaacaagcaaaatgagcatggtgtggtgacaaggaacaaagctcgacttgtggccaagggtgtaacgccctgaatttgggggtagaattttttcttcttttctctcaccaaattcgggcgttactctcttttctctttccccgtttgctccttcttcc

SEQ ID NO: 28343 - DNA, 334 bp, Zea Mays
gatgctgctgaggtggacgctggttctgcctgaactgttgaggttgattgcctgagaaacgaggacgattgctgcttccaggcttgggtccactattcttgcgcttacgatcctccatctccttacgcttcctctctgtcatgattgctctgtcaatcaggtgctggaatgtcgggaaggtgtgattcatcagctgatactgcagagggtcaaccaagcctctcaggaaacggtactgtcgcttggcgtcagtgttgacatcttcaggagcataacgagacagctgcagaaatctgtcccggtattcactgatagacgatggcccttgcttgag

SEQ ID NO: 28344 - DNA, 376 bp, Zea Mays
atggaatgttatgaatatgggatgatttgattaggtgaattttacaaagtttgtactaataatgggttatatatagaaaggttgggtatagataatgaagaataacgcgcgcgcatcacacatgcatatatcgtcgcgtgcaacggtaaatcgaactcaacaggaggaataacaatatagcattagatttatatgaggtggtagatgcgcgttaaatttaggattgaccatcgagcaacatggatctgaacgtctgtgaaccgcatgcatggcgtcctgctgggtgtgtgtggcgcgtcgacgtacggggagcatgcatgacatactgtgaactgctttttattggcctagagacagagagccggttcccttcatg

SEQ ID NO: 28345 - DNA, 298 bp, Zea Mays
cggcgaacagcgagacagtgaattagcgactcgagagcagcagggccggcggcacccctcggccagagatagctgcagccgcgcggccctattcacagctcaatttttttcgctgcggttgaattaaaaccgtttacactgctacagccgtaatccataaataaataccaaatattgtagaaaaaataataaatttaagccgcagcgaacagacatttgtttgcaagatccattgtccgattcttttattgcactgtatgtttaatttcaattcttgttgagattttgcagataaaat

SEQ ID NO: 28346 - DNA, 548 bp, Zea Mays
atttcccaccgcccctcctcttctgcttctcccactgcagctccctccaccttgctccccatggccgagcgccctcccggcttcctgctcgccaagtccatcttcctttcttgctcgccctaggtcctactccctgcgccgcttctctaccggctgagcccctctgcagctccagtgccgaccatccatctccctgctgccgttctgccctcgacgcgctgctcggattgggcgctggccccctcgggtccggccatggctggccgctgctgctccatcgggtcgtccagtccccatctccatggccgtgcccgctgctcgctctcgcacttctctctctccctggatgcgcgaacgctccgtcttcccctgtcgcgaccccgccgtggagttcccatgcacgcgcgccctaatttctgctcgctcggtctcaagcttcggcgcctggccgagctctctggccgtcgtcgagcttccggctcgtgcctatctccctcgtgtgcacgcccatcttccttccatgcgcaagcgaagctccctgctcgccg

SEQ ID NO: 28347 - DNA, 520 bp, Zea Mays
tttggagcttgtttgtgattgatccaaggggtttaagcctaaggtccctgtggaggaatggtagagggtcatttggtcgacaagttttgttaaacttgatctccctattgctatgtaaaactgggagtaagttgtgtccgaaagttccctgtcaagttgaggttgtgctgttcagtaactgaaaattggaggtttcagtgatcttttgctgtgtttggggcatcataacttttgatccctgcatttttggtcttggactgctgcaacaaactaatagagctatagttggagaataatcttggttaaaagggatgggtgtgttgtcgaggggatttgggtgatagaggggcttaaacagggaggtatgcagagggagcaccaggactgatggagtaaattcagagttggatttagtaaactgaagaagctttattcctccttgttgtgcccatctgatgctatggatcgtgatatggatggatataaggatgtatggtctaactcaggttctagagttttt

SEQ ID NO: 28348 - DNA, 1208 bp, Zea Mays
tatagagataaatgtcacaagtatcattattacatagcggaagtgttacaaaaataaatgataacaataaaacaaactaaataattattcattggcgctatcaagctgactgggagacgccacctagataagctcacattccttattgtagggctcctcttggaccacctgctcttcacctctggggggtttatatatcccaagagtgagctcacaaaagatcatagctcaacaagttatggggaataatgtgcatgaactcacaaaaggtgagagctcatgtgaagtgtaaggctgatcaacaaataatgattaaagctgagcattgcttttaataagttggtcaaattttattagcagttactatatgtaagtatataccaaaccagagtgataatagatcaaaattaataataaaccacaatgcgaagcaaatgaccaaataaatttaattccataagttactcatgtgagggtccgagtcgctcatgaccgtgagcacagctgatatagcagttttacactctgtagaggttgcgcatatttacccacaagtcatgttacccatctgcctagggtcatgaatcccatacacctctaccaaggaagcgaggcagggtaacactacgaggcctttacaatgttccactagcttcagaaaacccgctacagtctaggaagcgcaatgcagggatcccccgtctgaccgccgtcgcagcaaaatcaacccgaggacctccctacaccgaccactcccctaccgcccttgcccattttgggtaatgtagtcctccactagctttcctaattagtcagccaagggcgtcccataccaccattgtggtagcactgttttctcgggtggtcgcctcatcttctaattaacataatgatcttatcatgaacaataaataacaaactgataatagaagcaagatcatgaaataatttgtatctcaatacccaaaaccacataaagcaatagcaggtactacccaaaaagtttagtggtaaacaaaggtataaagatagccaaactaggatgacatattaggtcccatcaaaattaacctatgcagttcataatgattaacatgaacattattgggtaaatataagtgataaagggcacaacttgccttcaacgagctcctgcttagcagtctccacctcctgaacacctgagtcctcagtggcttgctcgtcta

SEQ ID NO: 28349 - DNA, 390 bp, Zea Mays
agccccagcgatgacgcgcggcggctccggcgtgcaataacaatgccgacgagaaattgcgcccaaaccgaactcttaggtcacccgacgttggcgcaaaagtcaccactgcgcacccgcgacaccctgcgggcacttgaacaggcctagtgtcggcgcaccggggttttggacggcggctgctattctcaccctcgcaataacggcgacacaaaactctctgcacatgcggctcacgcaagggacacgaaggcgactaggctaacggcgcgagggccaggggtttattatatgcctgctgaagtcggtctccgggggttcgcccatgccgggaagctcgccattccattgcggcgcgatgccgacagagggggagatcctggctcgccg

SEQ ID NO: 28350 - DNA, 173 bp, Zea Mays
ctttagtcgggtaagtcttgctgagtaattctgtactcagggttttattccctgttgtttttcaggtcctaactttgtgatgttgttgatggtgttaagtgctggtgggctcggccttcttataagtctaagtaacccttctatacttcttattgaggatggtcacttgagct

SEQ ID NO: 28351 - DNA, 293 bp, Zea Mays
gtgtgatttgtgttacttaatcttgcggttctggttgaaagtggtttatccgatgtccttggggcaatcggacagatcctgttaagttatctggtgcacatgcatagccgtctgaagtctttgggacaaggacaggtgcatgtgggcccaataacttggaggttctgccacactgggtagcttgagttgggatgggcgataaatccataacaaccgaagttgttgtgatactgttcttttccagtggccttcgtttcatacataagttcgtgcatgttgcagaagcattttgc

SEQ ID NO: 28352 - DNA, 398 bp, Zea Mays
cctttccctgagttgggtgtgcttaatgaactgttgggctccgagcaaccctaatttgttgggcctcggccaaccccacctgggctgggtgtatcatttgaagccaaagcaaggcagaagcagccgaagcaggtcctgcatactgcttcgtgctattctccataaattccagagtatgtgggcaaccagcagcccacaacatcggttgcttcggcaagtcactctaaggctgcatgggccccattaccaccaccaccaccacccgtggcaccaactttgattcacaatcagcagccagaagggcaccgccaagcgcagcaatagcgtgacacacatggagagtccaaagcacgcacaataaacaatattgtgcctgagtcaagacatatttattgaag

SEQ ID NO: 28353 - DNA, 350 bp, Zea Mays
ctagtttgtctagatattatttatctcatgtacatatggttcaacaaaaaccaagaaagaaatcttgttagggaaataataaaaagtggagcaaaggacttgagtctgctggtttttggcgcaccggacagtgtccggtgcatcaaggccatactactccagaccagccactctcgggaatttgaagacgcgctccgctataatgcaccggactgtccggtgagccagcggagcaacagctccctgcgcaccaacggtcgtttagtcagaaggaacagtgatgaatagtgccgcacagaagtcagatcgtagaagtcagaaggcaccggactgtccagtgcaactagaag

SEQ ID NO: 28354 - DNA, 292 bp, Zea Mays
gcctaaatttgttttgtaggtttatgcatcgcgactcaagttggataatcgatagcgggtgcacaaaccacatgacaggggagaaaagaatgttctcctcctatgagaaaaatgatgattcccaaagagctatcacattcggagatcgaaatcaaggtttggtcaaaggtttgggtaaaatagctatatctcctgaccattccatttccaatgtttgtcttgtagattcattagactacaatttgctttcagtttctcaattatgcaaaatgggctacaactgtctttttac

SEQ ID NO: 28355 - DNA, 471 bp, Zea Mays
atgttcattttgagaaagacatgatttgtagtgcatgccaagcaggaaagcaagttggagtccatcatccacacatgacaggtcgcttgaggtactccacatggatctattcggcccgatcgcttacataagcatcagcgggagtaagtactatcttgttattgtggatgattattctcgcttcacttgggtattctttttgcaggaaaaatctcaaacccaagagactttaaagagattcttaagacggactcaaaatgagtttgaattaaggatcaaaaagataagaagcgataatgggaaggatttcttgaggaggagggtatcaagcatgagttctcttctccctacacacctcaacaaaatggtgtagtggagaggaagaatagaactctacaagacatggcaaggaccatgcttgatgagtacaagacaccggaccggttttgggcggaaacaatcaacaccgct

SEQ ID NO: 28356 - DNA, 439 bp, Zea Mays
aagatcaaccatcatcttccatgcaagcatctccactaattcaagacgaggatcaggctcaagaagatgaaaatgaagatcaagaagatgagccacctcaagaagaggacatggatcaagggggagataaagatgatcaagacaaggaaaatgatcaagaaataagggatcaaagaccaccacacccaagagtccaccaaccaattcaaagagatcaccccgtcaactccattcttagtgacatgtaatcgaagcaagagacacctaagtgtgtggtggtccttgcggggtctaagtgacccgagagattaaggaaaagactcactcggtctaagtgatcgtttgagagagggaaaaggttgaaatagacccggtctttgtgacctactcaacggggactaggttctttggaacagaacctaggtaaaacaaatcatcg

SEQ ID NO: 28357 - DNA, 162 bp, Zea Mays
aaggcacgccaaaacccacgagatcggcgtggcaggttcggtgttaggaggttgaaggaggttctgacgaagttggctcgtgcatcattggcacatggcgaagggctgacaacccgagtcagtgcgcggacgtggaggagggaagaagagggactgaccggg

SEQ ID NO: 28358 - DNA, 431 bp, Zea Mays
attttatggtgttacattatgatatgtggtactttcctatctgaggatgtgctttcttttgggaatatcaacttgtgttttatgataaaacttagcttctactaatgatatatacctgaccaactaaaagcaactgctttgagcttacccccacatacaactagttcacttcaaccaaaagggaaaattgctgagtacgtcgatgggtactcacccttgcttaaacactaaacaccatgttgtgcctatttcaaccatttctcaggagaacatgaaggaaatttggagtatttctaggagtttctagacttcaaggaattctaaactagactagcgtcaaacccccaacgactgcctgtgaaggccttatcttactacgtttcgttcagcactttgatttatgtttaagtttatgactatgtggatgtttc

SEQ ID NO: 28359 - DNA, 693 bp, Zea Mays
ggcggctgttatggggaagggaaagaaacaacggctgctccactagtgggcgtcgtggggagccagagagccggtcggctgctataatcccttcggcgaaatgtttgatgtccatgcggtgtgcggctgagaagaaaggactgtgcgatgggccccactgtgcagagagaataggactataggagagggagcacggttcggcaagggaaaaaactgagcaagagctcggcaagggaattcatcatttttttcttttttttagaatagatgtgtgtgcgtgagtgtgtttgcgttttgttttttttttcttttcaaattccctaaacgttttccttcttttcttttttttgactaatagataaatgttagtatatatatttacatattttaaaatttataataaatttaaaagataatattttataaataagaacacccaaattttaaagaataaatctttttagtcaaaattctattatttaaatagattgggttccacaaaaagtaaatcgataaaataaaatacatacaaacaaaaattattaccctatgtatattattttaacaatttcatcattatcgttttgtaaaaatgagattttattcacaagatcaaatccataaattggatttacaaatcgattcaaagaaaatatatgcttcgacatgagtgcatcaaacacttggtaagat

SEQ ID NO: 28360 - DNA, 786 bp, Zea Mays
gtattaaatgtgttaatcattgaattctatgatgaagtttatttgttcgaaagtattaattcttaattgtctaatattgcagatgatcatgatttgggaatgatatatgtggttgattcccatcttggatgaagttgaagtatcttttgaatcacgttatatgaagtgttgtaggcatgtcatgcacatcgcatcatccatcttgcatgttgaagttatgtcgtgatcttatggtccgaccgtaccggtacacttttagcatcgtacgttgcccgaggaggggtacgatgcggcttcatatccttagaggtatgaaggcagaagtcatccttgcatttgcagacatttgcactcatgaggtatatatgaagtgtgacattattgtgttactattgtggtttctacctgcgaggtgtggtaactaggcgtgttgtacgttgtattcatgctgcaccttcgtaataagaaggttgtgagattaagtggtggtaaaacaatgttcttatgtggttaaacagtttgttattattttacttgctgagatgtgtcatctcactcttgcattactcaatgcaggtacttgatacatgttgggaatgaggggagtagcagcacgtccactttcactctcataataacgctgcctaggcgcagccatgatttaattagaaacttgttgtcaaaggatgtttgtttttttaactagtcgtgcacactggttaattcagttcatgtcgtatgtttaaattccctttgctagccgattaataatacttagtatgtttt

SEQ ID NO: 28361 - DNA, 2808 bp, Zea Mays
aaaatgttgaccaaaagttgatcttcggtgcgtggatgtgggaaagggttgtgggccgttggatgcaaaggcagaagtcatctggggcgtcggttcttttctcccacaaaaccctagggggccaccccttttccctccaccccccctctcttggccgccaccctcccccatttttcccttggttggtcgtcccctctcctcccatggcagccgcccaccatttcttcctcctccatagatctccccctcccccacgcagcaaggatcgagaagaggaggagcaagatggattgaagaggaagagaggatgaaggagatgttctaccccccccatctattgcagattttcttggggaaactctaggtaaggatgggatccttgtttctccatataattatgtgttttttggaggttgtggatcatgtggattgaagaattagaggttggattagatgtggggttaggttttgatctcgaatttaatttctgcagaatggcagattcgacagtttctgttcatgccagttttccgtggtcttagtggcctcaaaaaaataaaaagtctatatatgagtcgtagataatttgtagatctttccgtggccgcgaagaacacctcaatcggacatcagaacagaaagttatggcagtttgattatagcagtttttcagtctcataattctgtgcagaatctgttctcttaagagttaggcaattttatcaacagaattaaactgtgagttggtaaaagaagttgtagataatttcataagctttccagattgttaaagagtgcattcatatgatttgtgaaactccagttatgtttgttttactgtggctgttcctgttaacctgacaaaaatgagtgggtctgttcactggtgggtttcatctagtaaatggccgaattggctcttccaactatggagaattttgtagaggaataaaagttcttacatccagcagaatttcataatttttggttcagtagtttgggagatatcaaattttaaagttaaccatactgctgtctaaaacagattcagtcagttatcttgtcagatgttttagaacttgtagatggcagaatttaattatctattgaatactgaagttgtagagtattttgtgtagatactcctagagtatttgtttgatatcaccgctgttttaattttaaagatacaaaattaacaaacagcgttgctgctgtatggcatgtggttcagggtgggagtccttccactgggtcttggtttcaagtgcagaggtgttttgttgattgatggcaaatgtttatgaaatatttgtaataagttctatgcccgctagcaggtggctacactccagaccatgcctagtacatttcttcttcttcgatgaaggcaagtgaatgtagcagtggttgcttccgttctgacctgttatttctattgcctacactctaatattcaaaagtattggattctttcataattgaactctatggtgatgctttacttgcttgcattatactgatgctcaatcatatattgatgatgattatgattcgagtatgactcgtgagattaattcacacccctgaaggtaaatgaagtattatttgaggttgtattgtatctgaaggtaaatgaagtattatttgaggttgtattgtatctgaagataaatgaagtattatttgaggttgtattgtatgtgaaggaagtgaaatatattgataaatgtagcatgccatatacattgcatgattcgtaaataaattctgccatctacaagttctaaaacatctgacaagataactgactgaatctgttttagacagcagtatggttaactttaaaatttgatatctcccaaactactgaaccaaaaattatgaaattctgctggaagtaagaacttttattcctctacaaaagtctccatagttggaagagccaattcggccatttactagatgaaacccaccagtgaacagacccactcatttttgtcaggttaacaggaacagccacagtaaaacaaacataactggagtttcacaaatcatatgaatgcactctttaacaatctggaaagcttatgaaattatctacaacttcttttaccaactcacagtttaattctgttgataaaattgcctaactcttaagagaacagattctgcacagaattatgagactgaaaaactgctataatcaaactgccataactttctgttctgatgtccgattgaggtgttcttcgcggccacggaaagatctacaaattatctacgactcatatattcctttgacaagaagtttctaattaaatcaatgttgtgcctaggcagcgttattatgagagtgaaggtggacgtgctgctactcccctcattcccaacatgaatcaagtacctgcattgagtaatgcaagagtgagatgaaacatctcagcaagtgaattgtttcgacgagatatttaaaccaaaaaaatttgaattaatcaacattttaaagggatcacaattgagatcagaaatacttgtagatatagaactcaatagtcccaaaataaccaatgccatctcatttcctcgaacaaccacaataggttgtataacactttcctgcatcaacaatacctgcaaatatcacttcaatgtatgcatagtaatgcaatgtgtaagtcctctgccttcatacctcttagagtataaaaccacaccatctgcaaataccacttcaatgaatgcatatgaatgcaatgcatatgtcctctgccttcatacctctaagggtatgaagccgcatcgtac

SEQ ID NO: 28362 - DNA, 262 bp, Zea Mays
aaagaactaaactttatttactttaaacttattattttattttgggtgagtattatctctcaagtattttaaaatgttttctagaatttcaaacaatgtgttcatctctccaagaaaagaatttagaaaaagaaaaggatttgaaaaaaataaaaaaaataaaaaggaaaaccttttccctcggacgacccattgttcaaattggcccagccagtccatcagttgtgtgcgcgccctgttcaccctgtcccttggaactgac

SEQ ID NO: 28363 - DNA, 161 bp, Zea Mays
gccagttttttgtttccatttttcatccttaaaatactgacacgagcgatgctcctctcattcatctaatagtctttccgacgctgacataagtgtatctgtctagaacagttctatctctataaaaagtaaatctgaatctagatttcactgcagagtaa

SEQ ID NO: 28364 - DNA, 2863 bp, Zea Mays
gtagtttagtagcattctggggtgtttgtggattccggggtgttacagttggtatcaaagcataggctttagattcttggcaatttgaagataaatttgacacacttgcacatataggaagggtatgggttcaaatatctttgatatatattaatgtctttggagtgcagatgacaatagtttcacccctccctattcctttacggtgatgtggtaagttgtttatggcttaatgcttgatataatttatttctgaaattttgatattgttttattaatgcggtagatatcgctggtcattggtgagaatgaagttgttattatgcttgtgatatacaagtatgcctatgttgttttcaccatgtttttcatggttgagttttattacaataatattgttatatatgcttgattgtggatgtttctaagaggagtgtcaattgcgtgttttggggtacaaggtaatcatcaatttgaatttaagttgttgagcggttggtggatagctccaactatcattgcaaagaatgattgtttatgttgagaaaccagttttgaaagaaatgaatattggtactttatatggatttttgggggaagtcttttcatagccagaatggcttacatgtctctctcatattgtgtgttttagttgccacaaagcctagatgtggtttaaagtggttgcctgttagtcatactaattgtagaataaatctttgattctcttgatccattgattatgtattgatacattgtggatctgatggttcccttttcgatgcatgcttgtggagccattttttttagaccacctatctattggtttgaaggaagtccttgcctagcctagagttggttgggtgtggctagtcacctattcctagatcatgtggtgtttacatcagcttaatatgtttgtcaaatgtgtgaaggattaggggttattattattgactttgtatgtctggtactttgagtgcatcatatgatagaatgaaatgtaagtttctgaactacagtagatgaagacttatattatgtgtaggttatccttactagttggatatttttcttagttgagatgttgaatgaagtatagtgacatgggttaagcaagtattgtgttgttgttgggctatcagtgctctatgtagagtttttggcatttcttcgatgaactatgccgcacaagatgttattggcttcttttggctttattgctccattagttctatagattttctcccttttggtggggtgcaaggaatgttagattacatgattatcttttcatgatggcaagaataaggtttaggaagattaggagttttgttccaatagaactacttgtttcatagtgctttaaggtgaggtgtttgatcttcttatacattcgtcgggtgtagatgtttcaccatttaattaaaattaatggttgaagttggtaagggttgtgcttggtgcatattaccccttcataaaagagtgttgtcttaagacattgatgttgatgtatagctgcatccaaatttgatggtgtgaaattggagtgttgattgcaactatgacatgctttgagcttcattacatgttgtttcatgcttgatgtcaggtcgtgtagtttccttagacaattagtccaaggtagaagttcttgtgttaattaagaccaataatggacccatgttttgaattgtggtgctatatggggtaccttgggtgttttgcttggagtggccgaattcgaggtcgaattctttttaaggggggtagagtgtaatatcccaaaaaaaatgttgaccaaaagttaatctctggtgcgtggatgaggtaaagggttgtgggccattggatgcaaagatagaagtcatctgaggcgtcgtttctttctcccacaaaaaccctaggtggccacccctttttttcccttcacccccccctcttggccgccaccccctttttctcccccttggctggacgccccctccccctatggcagccatcctccattgcttcctcccccaagatctccccctacgcagcaaggatcgagaaaaggaggggcacgttgaattgaaggggaagagaggatcaaggagatgttcttccccatctcctcttgaagatttcttggggaaaccctaggtatggatgagatccttgtttctccctgtaattataggcttttggaggttgtggatcatgggaattaaaggataagaggttggatttgatgtggggttaggttttgatctcgaatttagttttctgcagaatggcagattcgacagtttatgttcatgccagttttccgtggtcttagtggcctccaaaaaataaaaagtctatgtatgagtcgtagataatttgtagatctttccgtggccgcgaagaacacctcaatcggacatccgaccagaaagttattgcagttttactatagcagtttttcagtctcataattctgtgcagaatctgttctcttaagatttaggcaattttatcaacagaattaaactgtgggttggtaaaagatgttgtagataattttataagctttccagattgttaaagagtgcattcatatgatttgtgaaactccagttatgtttgttttactgtggctgttcctgtttacctgacaaaaatgagtgggtctgttcactggtgggtttcatctagtaaatggccgaattggctcttccaactatggagacttttgtagagggataaaagttcttacttccagcagaatttcataatttttggttcagcagttttggagatatcgaattttaaagttaaccatactgctgtctaaaacagattcagtcagttatcttgtcaaatgttttagaac

SEQ ID NO: 28365 - DNA, 792 bp, Zea Mays
atgttttagaacttgtagatggcagaatttaattatctattgaatactgaagttgtagagtattttgtgtagatactccaagagtatttgtttgatatcaccgctgttttaattttaaagatacaaaattaacaaacagcgttgctgctgtatggcatgtggttcagggtgggagtctttccactgggtcttggtttcaagtgtaggagtgttttgttgattgatggcaaatgtttgtgaaatatttgtactaagttttatgcccactagcaggtggctacactccagatcatgtctagtacatttcttcttcttcgatgaaggcaagtgaatgtagcggtggttgcttccgttctgacctgttatttctatcgcctacactctaatattcagaagtatcagattctttcataattggactctatggtgatgctttacttgcttgcattatactgatgctcaatcatatattgatgatgattatgatttgagtatgactaatgagattaattcacacccctgaaggtaaatgaagtattatttgaggttggtattgtatctgaaggtaaatgaagtattatttgaggttggtattgtatctgaaggtaaatgaagtattatttgaggtttgtgttgtatctgaaggaagtgaagtttattgataaatgtagcatgccatatatacattgcatgactcatttgcatatgaagttttgtcgtgacctatggtccgaccgtaccggtacaacttagcatcgtacgttgcccgagaaggggtacgatgcggcttca

SEQ ID NO: 28366 - DNA, 2315 bp, Zea Mays
tctgggcagcattattatgagaatgaaggtggatgtgctgctacttcccactccccttgatgagcaacaagcacctgcattgagtaatgcaagagtgagatgaaacatctcagcaagctaattgttctgacgagatatttaaaccacaaattgaattcatcaacattttaaaagagtcacaattaaaaatcagaaatgcttgtagatatagaactcagtagtcccactataaccaataccatctcatttcctcgaacaaccacaataggttctataacacttccctgcgtcaacaatacctgcaaatatcacttcaatgtatgcataggaatgcaatgtgtaggtactctatcttcatacctctgggggtataaaaccacatcatctgcaaatatcacttcaatgaatgcatatgaatgcaatgcatatgtcctctgccttcatacctctaagggtatgaagccgcatcgtaccccttctcgggcaacgtacgatgctaagttgtaccggtacggtcggaccataggtcacgacaaaacttcatatgcaaatgagtcatgcaatgtatatggcatgctacatttatcaataaacttcacttccttcagatacaacacaaaccttaaataatacttcatttaccttcagatacaataccaacctcaaataatacttcatttaccttcaggggtgtgaattaatctcatgagtcatactcaaatcataatcatcatcaatatatgattgagcatcagtataatgcaagcaagtaaagcatcaccatagagtccaattatgaaagaatttgatacttctgaatattagagtgtaggcgatagaaataacaggtcagaacggaagcaaccaccgctacattcacttgccttcatcgaagaagaagaaatgtactagacatgatctggagtgtagccacctgctagtgggcataaaacttagtacaaatatttcacaaacatttaccatcaatcaacaaaacactcctacacttgaaaccaagacccagtggaaagactcccaccctgaaccacatgccatacagcagcaacgctgtttgttaattttgtatctttaaaattaaaacagcggtgatatcaaacaaatactctaggagtatctacacaaaatactctacaacttcagtattcaatagataattaaattctgccatctacaagttctaaaacatctgacaagataactgactgaatctgttttagacagcagtatggttaactttaaaattcgatatctccaaaactgctaaaccaaaaattatgaaattctgctggaagtaagaacttttatccctgtacaaaagtctccacagttggaagagccaattcggccatttactagatgaaacccaccagtgaacagacccactcatttttgtcaggtaaacaggaacagccacagtaaaacaaacataactggagtttcacaaatcatatgaatgcactctttaacaatctggaaagcttataaaattatctacaacttcttttaccaacccacagtttaattctgttgataaaattgcctaaatcttaagagaacagattctgcacagaattatgagactgaaaaactgctatagtaaaattgcaataactttctggtcggatgtccgattgaggtgttcttcgcggccacggaaagatctacaaattatctacgactcatacatagactttttatttttttgaggccactaagaccacggaaaactggcatgaacagaaactgtcgaatctgccattctgcagaaaactaaattcgagatcaaaacctaaccccacatcaaatccaacctctaatcctttaattcccatgatccacaacctccaaaagcctataattacagggaggaacaaggatctcatccatacctagggtttccccaagaaatcttcaagaggagatggggaagaacatctccttgatcctctcttcctcttcaattcaacatgcccctccttttctcgatccttgctgcgtagggggagatcttgggggaggaagcaatggaggatggctgccataggggaagggagcgtccagccaagggggagaaaaagggggtggcggccaagagggggggtgaagggaaaaaaaggggtggccacctagggtttttgtgggagaaagaaacgacgtctcagatgacttctatctttgcatccaatggcccacaaccctttacctcatccacgcaccatagattaacttttggtcaacattttttttgggatattacaccccctttggcattaattgccaaaagcgaagaatct

SEQ ID NO: 28367 - DNA, 2287 bp, Zea Mays
agttcatgttgttatggttgtcttcccattgctagcagattattaatgtcttatatgttttcttatcatgatatctatttatactttgttgcttcccccatttatgcaattttcaaaggagatgctgtcgaaattttatatatgaatattagatgtgtagtttagtagcattctggggtgtttgtggatcccggggtgttacagttggtatcaaagcataggctttagattcttggcaatttgaagataaatttgacacacttgcacatataggaagggtatgggttcaaatatctttgatatatattaatgtctttggagtgcagatgacaatagtttcacccctccctattcctttacggtgatgtggtaagttgtttatggcttaatgcttgatataatttatttctgaaattttgatattgttttattaatgcggtagatatcgctggtcattggtgagaatgaagttgttattatgcttgtgatatacaagtatgcctatgttgttttcaccatgtttttcatggttgagttttattacaataatattgttatatatgcttgattgtggatgtttctaagaggagtgtgaattgcgtgttttggggtacaaggtaatcatcaatttgaatttaagttgttgagcggttggtggatagctccaactatcattgcaaagaatgattgtttatgttgagaaaccagttttgaaagaaatgaatattggtactttatatggatttttgggggaagtcttttcatagccagaatggcttacatgtctctctcatattgtgtgttttagttgccacaaagcctagatgtggtttaaagtggttgcctgttagtcatactaattgtagaataaatctttgattctcttgatccattgattatgtattgatacattgaggatctgatggttcccttttcgatgcatgcttgtggagccattttttttagaccacctatctattggtttgaaggaagtccttgcctagcctagagttggttgggtgtggctagtcacctattcctagatcatgtggtgtttacatcagcttaatatgtttgtcaaatgtgtgaaggattaggggttattattattgactttgtatgtctggtactttgagtgcatcgtatgatagaatgaaatgtaagtttctgaactacagtagatgaagacttatattatgtgtaggttatccttactagttggatatttttcttagttgagatgttgaatgaagtatagtgacatgggttaagcaagtattgtgttgttgttgggctatcagtgctctatgtagagtttttggcatttcttcgatgaactatgccgcacaagatgttattggcttcttttggctttattgctccattagttctatagattttctcccttttggtggggtgcaaggaatgttagattacatgattatcttttcatgatggcaataataaggtttaggaagattaggagttttgttccaatagaactacttgtttcatagtgctttaaggtgaggtgtttgatcttcttatacattcgtcgggtgtagatgtttcaccatttaattaaaattaatggttgaagttggtaagggttgtgcttggtgcatattaccccttcataaaagagtgttgtcttaagacattgatgttgatgtatagctgcatccaaatttgatggtgtgaaattggagtgttgattgcaactatgacatgctttgagcttcattacatgttgtttcatgcttgatgtcaggtcttgtagtttccttagacaattagtccaaggtagaagttcttgtgttaattaagaccaataatggacccatgttttgaattgtggtgctatatggggtaccttgggtgttttgcttggagtggccgaattcgaggtcgaattctttttaaggggggtagagtgtaatatcccaaaaaaatgttgaccaaaagttaatctatggtgcgtggatgaggtaaagggttgtgggccattggatgcaaagatagaagtcatctgagacgtcgtttctttctcccacaaaaaccctaggtggccacccctttttttcccttcacccccccctcttggccgccaccccctttttctcccccttggctggacgcccccttcccctatggcagccatcctccattgcttcctcccccaagatctccccctacgcaggaaggatcgagaaaaggaggggcatgttgaattgaagaggaagagaggatcaaggagatgttcttccccatctcctcttgaaggttt

SEQ ID NO: 28368 - DNA, 730 bp, Zea Mays
ctcagatgtgttgtatttattatcataaaagtcatcaagtttgcgcataaaataatggtagatgtatcgcaactgttattcccgtagaaatacctaagccacgtgagagacaacatattcatcatcataaaaatcctcaaatggaatgcataaaatttgcagtggctgacataaaaatatcatgaaatacataacacatggatcagatgaggatgtcgtcaaaggatgccccaaagccgctggatcggaggagtcgtcatcgaacgatgcatgctatcgcagcggcgtccgactcgttggagctcaaagaatagttggaggtaggagggcctcgccgtcacacgcacatcagggggtgccgctgctcgtgcatgcctctggtcgacaccaccgctcgcgcctcctgaggccatcgcctcgctcgccccttgggagctcctgctgcgcttgcctcgagaaccgttgcctccgcgtgcctaggggagccactgccaccgcgtggccctcagggagccgtcgcgcgccttggaaccacctccatcacgtgcttaggggagccaccgccacaacgcgcccctcgagaaccgcccccatgcaccttgagaactgccaccatcgcgcacctcttgggaaccgtctccgcttgtgcatcagggtggtgcgtcaaaaccgaaccctagcgacctggggctcctttatagatgcctggaaccttgtgcggctgaaccag

SEQ ID NO: 28369 - DNA, 295 bp, Zea Mays
atacacgtgtatcttttttttcattttttgttttactgctacctaccatgcaatattggttatttggtatattgttgcatgcatttttctgcaattcggttatttcggggaaacccgaacccgtacccgaattcggttatttcggggaaacccgaacccgtacccgaattttcgggtaccaaagtttcgggtacccgcttatttcgggtatacttcgggtaacggttcttaaaacccgaattttagaaaacccgaattacccgacccgaatttatcgggtaacccgaatgcccag

SEQ ID NO: 28370 - DNA, 6482 bp, Zea Mays
aaaaccacatcatgaaagcttcatttatttagaagtaaagagtgaaaaccttacctttaggctattgtaggacaagtaatctacaaactgatcctttggcatcgtagaatgtccacattcaagcttcagatagctgatattatccatcataacacggcacacatcaatcacagtaactgtagtcatcttcatcatttctgtcgtaaacaagtgcgcttgatcgatagttagcataattctttacttcggcgatttgctcaacaatccactatcctccggaggtgtgcaagatgatgtattctagcagcctagttggttcctctttggctggtgcaactgcctcctcttcggagccttcaacatgttcttcttccttatcctaggatttatcgagaatagtataaaccttctaagcaacaattttatctgcagtggtgtcgctttttgaagtatcgtccatcttttgcactggttaggtcgcggtattcttgccaattggagcgctatctttggagaggttggagcaacctttgcctgggaggattccttagcctttgcgggcttaaggatcactttccaaatgttggccatcctcttacctttccgaggtgtcccctcaagagtcgtctttggcttcaacttcggttttggccctagcgcaggctataagctggctaaaggaacttcgtcatggatggatagctcgattacctctttcatatccatcttctcctcctgtgttggaaataaatctattttaaaatacttcaaaaataaacccgcatgatttagaaaaaggactagaagggagtttttactttcgttaagaaagaagagccaaccctcggcttagtaactagtgtgggtttgatggcagtctcctcgataagagtaattgccatgggaaatgttggctcaataatagccgccctttcttcatagtaagccttcagctgcttcgctgaaatctctaccctcttctgcttcgggggtatccactagcagtttcaaggcgctcttccttttctttcccctgctttgtgaaagtcgcctaagggggtgaataggtggaaactgaaatttacaaattttaagcacaactacaagtcgggattagcgttagaaataaaactgagtccgaaagagagagtgaaaaacaaatcaaggcaaatgaagccgatgacacggtgatttgttttaccgaggttcggttcttgcaaacctagtccccgttgaggtggtcacaaagaccgggtctctttcaaccctttctctctctcaaatggtcacttagaccgagtgagctttctcctaaatcaaatgggtcacttagacacctcacaaggaccaccacaacttggtgtctcttgctttgattacaagtgtcttgagaacaagaatgaggaagaagaaagcgatccaagcgacaagaactcaaatgaacacaaaaatctctctctcacaagtcactaagtgtttggagtggttctggactttggagaggatttgatctcttgtttgtgtcttggagtgaagtctagagctctgtattgaatgcaatatgctggaaacttggatgccttgaatagaggtggttgggggtatttatagccccaaccaccaaaacagccgttggggagggctgctgtcgatgggcgccggtgcgccagccacgtcacccaaccattagggttctgacggtttcgaccgttggagctctgacagcctgggccaccggacagcccggtgtcgcactggacagtcactgttcactgtccggtgcgccttctggcgctgatctgactctgcgcgaactgtccgcgcactattcacgttgcaggcgaccgttgcgcttggcagccgttgctccgctggcacaccggacagtccggtgacccaccggacagtccgatgaattatagcggagcgtggtctaagaacccaaaggtgaagagtttgaagtcaatccaccctggtgcaccggacactctccggtggtgcaccggaaagtccggtgcgccagaccagggttctcttcggtttcttttgctcatttcttttgaaccctaactttaatcttttattggtttgtgctgatcctttgacacctgtagaacatataaactagagcaaactagttagtccaataattgtgttggacaattcaaccaccaaaatatttataggaaaaggtttgaccctatttccctttcaatctccccctttttggtgattgatgccaacacaaaccaaaacaaatatatgagtgcagaattgaactagtttgtataaggtaagtgcaaaggttgcttggaaataaaccaatttttacttatactagatatgcatggattgctttctttctttttaacattttggaccacgcttgcaccattttttttgtttttgcaaatttctttttggaaaatcttttcaaagtccttttgcaaatagtcaaaggtatatgaataaaattgcaagaagcattttcaagatttgaaattttctccccctgtttcaaatgcttttcctttgacttaaacaaaacttcccctggatgaaattctcctcttagtgttcaagagggttttaccatttgaaagaagatcaaatattttagatatcaatttgaaatatactaaccagttgaaaaatcctcctttaaatatttcatcataagatacccattgaaaacttcattttaaactttgaaatttgtggtgtggtgcggtccttttgctttgggcttaatatttctccccctttggcattaatcgccaaaaacggagtctttagagccctctttacgttctccccaatggtacaaataaatatgagtgaagattataccaaagtggagagcggtgcggagtgacggcgaaagggtaaaataataccgatagagtggagtggaagccttgtctttgccgaagactccattcccctttcaatctatgacttaatagaaattcactttgaaaactcattagtcatatgtataaaagagatatgatcaaaggtacataaatgagctatgtgtgcaaagtattaatcaaagttccgagaatcaagaatgtttagctcattcctaagtttggtaaaggttttttcatctagtggtttggtaaagatatcggctaattgatctttggtgctaacataagcaatctcgatatctccattttgttggtgatccctcaaaaagtgataccgaatggctatgtgcttagtgcggctgtgttcaacgggattatccgccatgcggattgcactctcattatcacataggagagagactttgctaaatttgtagccatagtccctaagggtttgcctcatccaaagaaattgcgcgcaacaatggcctgcggcaatgtactcggcttcgacggtagaaagagctactgaattttgtttcttcgaagcccaagacaccagggatcttcccaagaactgacaagtccctgatgtgctctttctatcaattttacaccctgcccaatcagcatctgcataacctattaaatcaaaagtggatcccttggggtaccaaagaccaaatttaggtgtgtgaactaaatatctcaagattcttttcacggccctaagatgaacttccttaggatcggcttggaatcttgcacacatgcatacggaaagcataatatccggtcgagatgcacataagtagagtaaagatcctatcatcgaccaatataccttttgatctacggatttacctcccgtgtcgaggtcgagatgcccattggttcccatgggtgtcttgatgggcttggcatccttcatcccaaacatggtgagtatgtcttgaatatacttggtttggctgatgaaggtgccctcttggagttgcttcacttgaaatcctaggaaatacttcaactcccccatcatagacatctcgaatttttgaatcattatcctactaaactcttcacaagtagatttgttagtagacccaaatatgatatcatcaacgtaaatttggcatacaaacaaatcatttgcaatggttttagtaaagagtgtaggatcggctttaccgactttgaagccattagtgataagaaaatctcttaggcattcataccatgctcttggtgcttgcttgagcccataaatcgtcttagagagtttgtaaacatgattagggtactcactatcttcaaagccaggaggttgctcaacatagacctcttccttgattggtccattgaggaaggcacttttcacgtccatttggtaaagcttaaagccatggtaagtagcataggcaagtaatatacgaattgattcaagcctagctacgggtgcataggtttcaccgaaatccaaaccttcgacttgtgaatatcccttggccacaagtcgggctttgttccttgtcaccacaccatgctcatcttgcttgttacagaatacccacttggttcctacaacattttggttaggacgtggaacaagatgccatacctcattcctcgtgaagttgttgagctcctcttccattgccaacacctaatccgaatctcttaatgcatcttccaccctgtatggctcaatagatgacacaaaagagtaatgttcacaaaaatgagcgacacgagatcgagtgattacccccttatgaatatcaccgaggatggagttcacggggtgatctctttgaatcgcttgatggactcttgggtgaggtggcctttgaccctgttcttcttgatcattatcatctccccctttaccattgtcctcctcttgaggtggctcatctcttgatcttcttcttcattatcttgagcctgttcctcatcttgggttggtggagatgcttgcatggaagatgacagttgatcttgtgcttgtggaggctcttcggattccttaggacacacatccccaatggacatgttccttagcgtgacgcatggagcctcttcatcatctagctcatcaagatcaacttgctctacttgagagccattagtctcatcaaacacaatgtcacaagaaacctcaactagtccagtggatttgttgaagactctatatgcccttgtgtttgagtcataaccaagtaaaaatccttctacagccttaggagcaaatttagattttctacctcttttaacaagaataaagcatttgctactaaagactctaaaatatgaaacattgggctttttaccggtgaggagttcatatgatgtcttcttgaggattcggtgaagatataaccggttgatggagtagcaggcggtgttaatcgcctcagcccaaaaccggtccggagtcttgtactcatcaagcatggtcctctccatgtctagtagagttctattcttcatctctactacaccatctcgttgaggtgtgtagggagaagagaactcgtgcttgatgccctcgtcctcaagaaagccttcaatttgagagttcttgaactccgtcccgttgtcgcttcttattttcttgatccttaatctgaactcattttgagttcgtctcaagaatccctttaaggtttcttgggtttgagatttttcctgcaaaaagaataccctagtgaagcaagaataatcatccacaactacaagacaatacttactcccgctgatgcgtatgtaggcaatcgggtcgaatagatccatgtggagtagctcaagcggcctgtaacactccaggttccacaaacaacccggtatgctactgtactacacttccgacgtccatatataaaatttcggcagcatcccctttgcaagattgcataaaagagggagcaacggagtataaacatatatcatgactaaaacatactaagtattattactcggctagcaaggaaagataaacatacgacctgaactgaattaaccagtgcacacgaccatataaaaaaataaacaaacttcatttgacaataagtttctaataaaatcatggctgcgcctgggcagcgttattgtgagagtgaaagtggacgtgctgctactcccctcattcccaacatgtatcaagtacctgcattgagtaatgcaagagtgagatgacacatctcagtaagtaaaataatatcaaacagtttaaccacataagaacattgttttaccaccacttaattccacaaccttcttattacgaaggtgcagcacgtatacaacgtacaacgcacctagttaccacacctcgcaggtagaaaccacaatagtaacatagtaatgtcacacttcatatattcctcatgagtgcaaatgtctgcaaatgcaaggatgacttctgccttcatacctctaaggatatgaagccgcatcgtacccctcctcgggcaacgtacgatgctaaaaatgtaccggtacggtcggaccataagatcacgacataacttcaaaatgcaagatggatgatgcgatgtgcatgtcatgcctacaacacttcatataacatgattcaaaaagacactt

SEQ ID NO: 28371 - DNA, 166 bp, Zea Mays
ttctccccctttccttcctcccttcttccctccaccaaaacgattgaagactcgcaccacgacgacgatgatccgagcggcaaggattggcaccttgggaggaggggattgagagggggggggggctagggtttggtggctgcaagaattgagagaggaggagatg

SEQ ID NO: 28372 - DNA, 144 bp, Zea Mays
ggcgacggtgaggaggagcaggatgatgaggattgaagagtacatgctgggggcggtggcctatatctgtagttgacgggagacgacgacatgagcaacagtagtgtcggctgctgtgacggcgttgacgaagagcaatagaac

SEQ ID NO: 28373 - DNA, 238 bp, Zea Mays
cctcctttggccgtcaccctccccccctcttccctcttctctcttccccaagtgctgcagccgccccctctccattcttaagttttttgcagcagccatctcctcaaccctagccgccaccccacatctcctcttctccaagtgtcgttcttcctcgtcggatcttcttcgtgtgggtgcaagtttcaattggagaattggtgggaggaaggaaggaggaaaaaggtggaactcaagg

SEQ ID NO: 28374 - DNA, 546 bp, Zea Mays
ctgcgagttgtggtgactaggtgtgttgtacgttgtatacgtgctgcaccgtcgtaataagaaagttgtggaatcaagtggtggtaaaacaatgttcttatgtggttaaacagtttgatattattttacttgctgagatgtgtcatctcactcttccattactcaatgcaggtacttgatacatgttgggaatgaggggagtagcagcacgtccactttcactctcacaataacgcagcccaggcgcagccatgatttaattagaaacttattgtcaaaggaagtttgtttcttttaactagtcgtgtgcactagttaattcagttcatgtcgtatgtttaacttctctttgctagccgattaataatacttagtatgtttttgtcatgatatatgtttatacactgttgccccccctcatttatgcaattttgcaaagggggtgctgccgaaattttatatatagatgtcagaagtgttgttcagtagcattccggggtgtttgtggaccccggggtgttacatctgaatagtcttttccttttt

SEQ ID NO: 28375 - DNA, 403 bp, Zea Mays
aggatttaagacctaatttggaatttagaaattgaaaataacatagaaaggaaaaaaaggaaaagagaataacttataaagaaacctatataaaaataaatatatctttttcaaactggtacccttaatttatacctttaacttgagtacaaaattcacaacaatatttgaattcaaattgagattcaaaaaataaaaataaaaaaaatgaaaaaggaaaagaaaaaaacatggcgtctgggccgctttacctctttttggcccaccagagaattccaccacacgacccacacctctcttcgcacccgcgcgccgacaaccatggcccactggtcagccgccatctatccattcggtcgcgtgccgacatgtggggccagcgcgtcagccgccccgtgtcgtc

SEQ ID NO: 28376 - DNA, 517 bp, Zea Mays
cgaaaaagactacaccaaactgtccgcggaaagaccgactacatgcgcaccagaccaacataacaaatacaccagaccaagtacgtaacgccttcgtgagcatagccgaatgtgcgaaggcacccaacctcatcatacaagccattacatatgtacaagcgagggcatcaaactttacatcggctcaaccttcggaataattcccatctccctatagttaaatagcattatcctccgttcctcacccgcaaaaagacttcgcagctccccctcacctgcactcacagcggccggcaaggacaacagttcctgcctgccagccctgctcacacgaagccgaccgccgtccgcctcactcactctacgcttcgcaatcgcccttcgccgcctacgcccaacactcggaccaggcacaacttcagcatccgcagcacgcgacgaagcctccgccgctgccacatccaaggccggaaagtagtccaagtcctcatccgacgactcttcagtccactcaacc

SEQ ID NO: 28377 - DNA, 153 bp, Zea Mays
cacaaagtttcctgtaatcagttaccgaagcaaatgggcagcaggctgaaagtcggaatggttctatgtcaaggttgatgatgacaaggagaagcttgtgcaaagtccacttgaattaatcttcggagaaacccgacctcgttgcaacatgac

SEQ ID NO: 28378 - DNA, 90 bp, Zea Mays
cgaaggttgttctcgtgcagagtatgctgttgagcaaagctttgagaatgcagcaagatttggaagacaagaaacacgaagttataattg

SEQ ID NO: 28379 - DNA, 1334 bp, Zea Mays
ttcggaatcacattaaggagcttgagcatcagctaactaatgctcattctaaatcagaagttctaagtcagcaacaagaagaaattcacttgtatgttgttgctgttagagaagaccttaaggaaaccctaagattcataagccatcaggatcaggcgatcaaggaattgaattgtgctcatccaatggaatttcaagcagcgcagcgactggtcaaccatctgcaacaaacggtgcatatgctcaatggcgccttttattctgccccaacaccaacggactaaaaggtacctatggagcatggaaacaaacatctggcagatgtgataactggagaagatatagcaggcaagttaatcctcgtgaggtaatataactatgtaaattagttttgaagggtgggtgtaaggtaaacccatatggcaatgttagctagtaaaaaaaaaacaggttaaactttgttgtaaagagtttatcctgtttcacctggatcatgtaacctgtgagcttttctatgactatggtgtaagaaacgactgcctgtttcagaggcaacttttaatatctatagtagtttgtcaaacttcaagagttatgatggctattcctttggatattccatgcgaatgcgcgtgtgcggataaatgacttagcacacgctgagaccataatttttaattatgttttgtgatgaaatggtatcacctgatttcccatgtgagtttggacaaatggatagactttatccaaattagatgcaacatcttggataaaacacagaaagatatcaagtcttacagggtacagtggaactacccccacagaagatgaaaccatgtagatggtcagagggatatttagaagacaaagtccttgccctaagttttgagtttttggaaaaccttagggtttgtgaattttaaaccaacagtggcacacccctgtttggtaggagaaattgggaaataagtttgtgacacatttccttttccgttactgagcctagacttttaaatctcgggacgagatttcttttaggggggaaggctgtaacacccctggtgttacgtaaactaaaactctgacatgtcatcataagcatctgcattaatgtgcttgttacacctagaatgcattcactaggtcaaaaattttcaatgaatgtggtgttgtgtataagagtatagggctcagattaagaactttgcttaagacatgggaagagaagtcgtctcttgagcaagtagtaagctggcttaggatttaaagtattaaaggcaagtcctagagtctatagcaaccttgttttcaaagttagatcaagtggaagaaat

SEQ ID NO: 28380 - DNA, 50 bp, Zea Mays
ctcgacgccttcttctttacctcagcatagattgcaccaaaggcaacatg

SEQ ID NO: 28381 - DNA, 558 bp, Zea Mays
ctcagattaaaaactttgcttaagacatgggaagagaagtcgtctcttgagcaagtgttaagttggcttggagtcttaagtactcaaggcaagtcatagagactagagcaactttaccttgaagtgataatcaagtggaagaaacacttgagttgctagatcaacttcaaactctagattaagaccaaaggtgaaatggtgtttaaataaagcaaatcctaaactaaggacactttggacctaagttctatatataccaaagttgtagaccatggaaagggaacaactttcatatttggagatttccaagtggtgtagagaaatttggagttaagtgtaaaaattcagattggtttcagtttgggattagctgaaaacagtttcatttatctatttttggaacactgtaactattaaactatgaacttttggtaaggagtggctataataaacttgtagagtaacggttggagaacaatacttattgagtgtactagcccaaaaaccatatgctaccaggtgaaaaggtggtccaaagatgtgatgtcaggtattgtg

SEQ ID NO: 28382 - DNA, 600 bp, Zea Mays
tcgaggttattactgaatgttacacatattactgatcggtaataactaagaatgcatgtatattacattacttaaaaaaatatactacgtacatgataatatgcctacaaaaatcattgctaacaaaaatatattgcgaataaataaaaatcatagtatcgtcaacctcaccacaacatattgttttctgaaaacaaatcaaaaaacctcgatataaatcttttcaactagaaatgtacagtatgcataatccagtaataacttgcaccccaaacctcgtatacaaaaacagaaaaatctagagaaactgcattgaaaaaccaaaacgatgacggtggagagaaagtgggaaaccctgcctgtagggacccgcgatgagaagtccgcaagaagaactgatcttatttaatttctggatcggtgcagtcgaaaaatgcgaaaaccctaggagcgatttggggcgacgctggacatcggtgcgaaaataggattggatttctaaattggaaagcggcgaaaccctcgactgggaaaaaaattgttccccctaatttgttgggtccatactgtaatggtgacactggcccaatttaagcccac

SEQ ID NO: 28383 - DNA, 633 bp, Zea Mays
tttatgtctgtgatgatatttgtgatgtatatatgtgatatatatgtgatatcttctgtttgtgtggatggaaaacaaaaaacaaataaaaaaggtacatactggtcactttgccgagtgtaacactcggcaaagaggctctttgccgagtgtctgggtcataacactcggcaaagagcacagacctgggcaccggcttaggttctttgccgagtgttatgtcgctggcactcggcaaagaggtcggcgttgccgagtgcctcacagaacactcggcaaagagcctgacatggagaccctccctggcgggctctttgccgagtgtcccaactggcactcggcaaagaaggcgtctttgccgagtgctgccaggaggacactcggcaaagatatcttcgttgccgagtgtcaccgttgacactcggcaaagccgccgtctccgtcaaccggcgccgtaacggtcgcttttctttgccgagtgctccctgacactcggcaaagatatttgccgagtgcccgagaaaaagtactcggcaaagaagtctttgccgatgcactgtttgccgagccttctttgccgagtgtaacactcggcaaagcctttgccgagtgtttttaaggcttcgccgagtg

SEQ ID NO: 28384 - DNA, 201 bp, Zea Mays
ctcttccttgcttgccccccccctctatccctctcctcccaagtgtttgcaaccacaccacctaaccctagccgccccccatctcctcctctccaaggtgccattccttgccgcttggatctacgtcgcgtggtgcaagtcccgaattggttttggtggagggaagaagggaggaagaaaagggagagaattcaaggtgat

SEQ ID NO: 28385 - DNA, 595 bp, Zea Mays
cttctcgtgacaatcttgacagattgtaccgtgattctagcaactcgctgaccatcttggagaggagtcaccgttttacaatggaggaattggacaatcaacgttgtaggctgcaggaatccgcggacgaagtgacccgcctcaagcagttgatatcagcaaaggatgccaccatcaaagaactccgagcttccaagaaatccactgcccaggagttagagactgctcgactggctgctaaagttgccgaagaaacttctgttactctcaaagcccagcgtgacagagccatggacaaggctatttgggcgggacgaatcttgatgaggagacctggcgtggttgttcctgaagacataagggctgacgtgaatgctgcccccgattcctcgagtcgcccttcttcgtcggtcgcccctgagaaagacattgcgaaatagagaaacattttgcgtgctttgagcgcgcggttagcatgatcgagtatttgttagaggacatcagttcagcattcgaatgatataattactctcttattgtatcagaattcatcagtttgtaaatttgcagtaatgaaacgacgcacgatgattat

SEQ ID NO: 28386 - DNA, 943 bp, Zea Mays
atcgttcagtcgttcttcgatcgttcgtccatctgttcttagtttattcgttcgttcgtccgatcgttcgatcattcgtccgatcgttcatggttcgttcatccgttcgtccgatcgttcaatcgttcatccgttcgttcgttcaaataatctttgttcagccgttatgctgccgaaattccgatcgttcgttcgttcgatcaatcgatcgttcatcgttcgttcatagttcctattcatcgttcatcgttcgttcatagtctctattcatcgttcatccagataatctttgtcctgccgttatgctgccgaaatttcgatcgttcgtccgttcattcatagttcctattcatcgttcatcgttcgttcataggcactattcatcgttcatcgttcgttaatgcgaactatttaacattactattcatcatcgttactattcatcattgttactattcattgatgatatctataattactttttcgtcgctactattcatcgttactatacatcgatcatccgatcaccccaaattttaacaactcatccatcatgctatccagtccacctaagaccagccagacctatattccagtcatacgaactccggtaactgtgattttccttccagtaagaactttccatctggtcacccatctcaggtttctccaagttgagcatgcttaactttgagattccttcgaaccaggcttccaaactccgattctaataattcttatttctaaattcttatcaaactattccttatccaaccatgtcatcccttaagcatggttcatgttccagaaaactcccaaaatactcttgtcccatattctgcctataatctccctgttcagactaagtcggttgattcactcgtcactattctcaccaacagtgaacttcactgtgctacaccagatacacccagctataaat

SEQ ID NO: 28387 - DNA, 3393 bp, Zea Mays
tgatatacttgctggtttgtatgtttgcttattcatgttgcatagttagtggagcgttcctgccgtctcgtggaggccagatctgcaagtctacgccaggcagtggagctagaagccagttcagcgagcttcccttcccccttcaccggataagcacaataagctcactggaaccctttgatgcataaattacctatgatttttcaaccacaaccctcaacctgttattttatgaatgatatgattttgagacaagttattatggcctcccagccgcttgccgcaatcaatccttgatatatttgttacaaatgatttgagaaaaggtgtgagctttcaaaaaaaatgcttttcaaaatggatatgatgaagggttttcacccttatcacctttaagtatggatgatcagggactccctgggtaaggggagggcctctggtgttggctcagccgggttaggtgtgagcagaaggattgtcctctcatataaggaccggtttatcatccttcactacctgtactcatgacaagtacaaccactcgagactgtatgggcagtcactcaatctgaactcgtacggtccaaacccccagggttatgatggctggggagcaccgggaggataagaatgttttgtccggtttggacatggcggtggcctgactccttccggtataaccgttaaggtaaggacgtgcgatgaaagaaagagattcggattcgggtctcaatggcatgagaatgcagagccggactagtgggtaaagtttaccccctctgcgcagagttcaaacctattcgaatagtccacgtccacggatatggatgagtctggtgtggtatgacaattagtgttttgttttcaaaaaataggtgcttttgaaaagtggttttaaaaggtccagcggttgagccgtgaggtatgatggacgggaagttcagtagctgtttttgaaaatgaaaaccagtgggaaactactgagatacctggatggtttagtccaggggattttgttctatactgaaaaacttcctgctcctttgggagaggatgcgctttgaaaaatacaaaatgttttacaaaacaaccctgcatcaaatattgttgtttctgcaaaatatcctgagctccacatattccatgcattatatctgatttccccattccgcgggtgaaggtgggctactgagtacattagtactcacccttgcttatttgttgtttttcagagaaggagatcgtgatcgggtaagagttacgtctgttcccaaccttgactgtggctgttggaccgctgatttccttcgctgcgtatatcgggctgcttcagccccactctgatgatatgtcccgagttgtggaccaactcttaaagttgttcgccacctttataggtttgtctcgtttaagcagatctggaactatctgatgtataaatgtgtttactagcctcctgggactagtaattgtatcacatttgagtcccagaggatctggggcgcttcaggtggtatcagagctgttaggttggccgcaggacgtaacccttaacctgatccaaaagtttttgagtcaaaactattttcttaaaaaaaatcttgctcgcatcccttcatttcaaaaatgctttccccctttccttctctcagaagtcagatggaggtccattgccaaaccagcttttgtcagaattaagatggtttccccaagttgctgagagcatgcacagttcacctcggaatcagaagccagccagagtatgatggtcgtgaattcgtcgagcatggcatagagaagtgtgtcatgactgtatacattggattcagtccgcaccatgtggaatggagtgttactgctgcggggcacagattcaaaaacacctgccaagtcgtcgctcgcaaggaattgagggccctgtgtcaaatttatgaagaagaagtggccgacaccccgctaagattctttccgccctttcagagaaaccgtccagtttggcaccccctcagtcgtgtacctcactgcatacctgctcatccttgatgcccagtatgatttcttggctcggcaccaccgtcagatgattgcccaagcagaagatgcagagaagcacaaccgtaagctccatgtggatctcaccacagctcaagcccgtgtagctgctttggaaagtcgtgaagccattgctgttgaagccctgaagcaagccaaggatgagcatgtctagaagttgatggaggcctacttggtcacccataaccaatgtagagctctgcgaatccaagagcccacttcatccaacccagttcaacccaagagagttgaagatccccagattcttgaaggtcacccggtctctaccagaggagaaaagaaggcttgggaactcccggaaggagccatagtcttggaaggaatgccagtcttccctcaggctatgaataagcaagagcaccccgagtcctcccaagatcccccgtcagagttgtttgagcccctcaccatgaagaagattccagcaccgtcccgtgagatcaaagaagaagttgcaagcaccctgccagcaccgccaccctctgaggagctacaagagccagtcccgcttgaagaagagttcaaccccgttctgccatctcagtcgccgccagaagaagtcatcaacatcagctccctcttgacccatctaggagatttcttagattgaagttgtgtgccagccttgccagaagagaagctgtcaggtctgaagttagttatgcccagtcctctgcatgcattgggtagtgaagtttttcttcactttgtctagagccctgcatgtatgagaggtaatcgtgtagactcatgttttgcaaaactctaattgtgtggccccctagggcatttcaaaatgaattttgcttgatgttttctcccctttgtagtgcatatgtgatgctttaacattagtgctcataagttgcatttagcatagttctcagtttaggagccgagcaatagtagttatgcttagcccccgaatctgagtagttcgtgctttggaaaaactctattcttcccctattcaaaacatttgatttgtttgtgcttatcatagctgagcttgtgtgttttctttctttttaagaaaggttttctctaaaaacatagataacaaattagagctagtcctcaccttatgcttccattctcatcttaacccatctcaagagaaagcaccttgcccaagaagataccgagaagcttacccttgaagcatggaataagctacagaagaaacctatccagccgctcagtcaaaaggaccgaccatgagaatcaaagcagtgcccctgagtcaaagtaaacaggaaaagaggacagaagaagttattaccatacagagaggcaaag

SEQ ID NO: 28388 - DNA, 2325 bp, Zea Mays
cagttcccatcccaagcaaagcacacacctgataaaaacccctctaccaaatcacaagcaactccattttccactccctcgcccctaagatcacaatgtttggtgattcttgggttgaagagtgttgtatatggttcatagtctttggtttcctcctctgtatgatggtaatactctttgatagaatcctccagtgggaagggcaaagagaaagaaagaggcagtgaaaagtgagaagagaaaagaagatagcgaagagcaggtagagagaccatggactcagttcgacataaaagttcatccaaatgctgaagctctctttcgggcctcggatcactcttctgtgggggatggtgacacaaccctcttttggatggataaatggattcaaggacaatctattgcattttttaccccttacctattcagtcgtattccgagtagggtcaggacaggccgtacggtgcaggaggctcttgctgataatagttggattcaggatatctctggggtctgactgctgttgtcatcagggagttccttctggtttgggatctagttcaggatgttcatttacagacaggagttcctgatgtccacatttgggtgccttgcgcttctggcctttattcctctaagacggcttataacagcttttggaacggtacaacatcttttgaaccggccaaaagaatttggaagagttgggctcctccaaaatgtaaattcttcatatggctagcctctctcaaccggtgctggacggctgacagattggcccggcgaggtatggatcatcatgacaaatgcctcttttgcgatcaacatgaagaaacagtccagtatattttgctctcttgtgtgttctccagaaacatttggtggcaggtgtggtgtaaagtggggctgcaatacctggcgcctgggcccgaggacatgattttccaagattggtggagcaacgccgaaggccaggtttctaaagagaagagaaaaggttttaacacgttggtaatccttgtggcttggtggctgtggaaacatcgaaacacctgtgtcttcgagggagcttccccgaacactagagatatcctgcagcacatcccaggaggatgctacgctgtggggtatggccgaggctagaggggctcaggggcatttggccttaagactaggagggcctgctgttgtgtcatagataagggatgagtgtgtttctgtatttgttgtttttcgacctccgtaaggagtcgtttgtaccctggtctattctcagacctatctctttcttaatataaattatacgcagctctcctgcgtgtttcgagaaaaaaaagagagaaaaaagttctcccaaaatcaacccggtgtcggtcatctctttgcagcctgctcaagcagcaacaacataagaaggcaccgtaacacccgtgttatgaggtacttcaaggagttcaaatccccaagattcaagagttctaccctcattctttttaagtggggtagtgttccagtaaggttcctgctatggagaaaaagaagaaggcctgtagcaagcttgtggaggaccagatcatcaaagtatataagtttctagatgagaagtggtcacccaagttccgttgatgaagcactagaagaccaatcaaggaaggaatctatgtgggagttcgcaagagaaatgtttgtgtgttggcatcgatgcttcttcaataagctagttgccaagcgaaagctagaagcctgaagatgacctttgagtagccagaatcagcgtttgcaatcggcaaccagatgctcctcaaggccagattttgttgaagctccatctcctcgaaaagtctgcaaagtgaagatatgtagctgaagtaaagctacacccataatccttgaagccgaatctcgaggacaagattcattttaagtggggtagatttgtagcatcccaaaaattcaaatcttgaaattttctcaaactcgccctaaattcaaaatgaatttcaaatttcatttcaaaatgtttgtttgcgagttgacatcaacaaataaaatatagtggtctatattctgtccaaaatcctcctcaaaatatcctacaaatatttcccaagtgatcccctctgcttctttccacaaatactgcccagatatttccccagtgaccccctcaaattcttttcagaaatattgtccaaatttacactgataattctccaaatattttcctcctcaaaaataccttcagaataatttttcaagtccctacaaatattttcttcataactttcctcatgctcatacgtatacgtacccctccggtgtcat

SEQ ID NO: 28389 - DNA, 534 bp, Zea Mays
gtcgttcttcgatcgttcgtccacctgttcttagtttgttcgttcgttcgtccgatcgttcgatcgttcgtccgttcgttcgatcgttcgatcgttcatccgttcgttcgtccaaataatctttgttcagccgttatgctgccgaaattccgatagttcgttcgtttgatcattcgatcgttcatcgttcgttcatagttcctattcatcgttcgttcatagtccctattcattgttcatccagataatctttgtcctgccgttatgctgccgaaattctgatcgttcgttcgtccgattattcgatcgttcgtccattcgttcatagtttctattcatcgtacattgttcgttcataggcactattcatcgttcatcgttcgttcatgcgactattcatcatcgttactatctggcaacgctattcatcatcgttactattcattgatgatatctataattactttttcgtcgttactattcaatgatcatccgatcaccccaaatttcaactactcatccatcatgctgtcc

SEQ ID NO: 28390 - DNA, 327 bp, Zea Mays
agaacctttgttgaccagcccaaccacatctcaactcgagcacactagagaaaccagcagggagaggagatcttttcttcaccgccaaatctgattcaaggttcagttaactgaattactctctccactatccccaaatcagtccaaaagtggatatttcagtgggaaaaaaactctagaacctgagttagaccatacatccttatatccatccatatcacgatccatagcatcagatgggcacaacagggagggataaagcttcttcagtttactaaatacaactctgaatttactccatcagtcctgctgctccctctgcatacc

SEQ ID NO: 28391 - DNA, 1733 bp, Zea Mays
atttggttctcatcataattttgtgtttttcaaaatctttttacaagttttccctttttgcacttaaatggcctacttagggttatttagggtttgtgaattcttctcaccttgaggtgcatgatatgattaaggcacaatacttaagatgaaaaagacttagttaacctttgttcctaattttttatgtccttttctcaatttggttcacatgtgataatggtcttgagttacacatttgccttggcatgctcagatcagtttggaaagatttgttttatttgacaaaaatgtattacaaccaccaaagtcccaacaattatttgaggtgattattaataatatacttcagagatacaacaaaaatattattgaaacgatccaatgtttattatctcttgttgaaaggtcaaatgatacaagggtgcaaaacctccttttaggaagccttatatttgcgctttatgtaaaaaataaagtgaaattatgtataagtgcgtgtttgaaccttagttattggctacacattcacacccacctaatcaatgggaaacaaaatattattttgtgctttattaaaacaaaatttatctaatgtcatatataaaatttatagtaatgcacgagcatatgactagtatgtatttaatttgtagtttacagtataaaaaggtatttggagaaagagaaagaacaccatagatgtaaggtaagaggatatatccataatttaaagtatttttagaggtaactgctatggttttatggtgcttgtaaagcttttagaaagttgcagccgacgaggaagaccacggcacatgtgcgctcgtttgggagcggcaggcaataggcggtggcgcaacaccggcactagggggagggcatagacgggcaacgcgttgcgtatgagacgattgggtgatagtgcaccgcgctgaggtgcggtgcggcgggacgggacgccaccagacagaaacagcacggcagccgctagatggcgggcttggcggcgctagggtgagggcgagaacaggcggcgctgggaggaagaggaattgatgtgagtggtgtcagcaaatactccagccgcaggacacggcatctcagcccatgagccgaaacgcaccgatcgggctcgtagtccaagcatagaaacctcctacccagaatgggctagattcaccctagaagaccggctcatctccagcaggccgtttatagttatagggtcatgtaaagtactattttgtactatagattacattgtttctagaataaaatttaaaatagagagtaaaatagggagtctgttggagatagtctaaagctttacgagcaccctaaaaccacatcggttacctctaaaaatactctaaatttagagacatatcttcttagtcctacctttatggtattctttctctttctccatatacctttttatactctaaacacgaattaaacacataattaatatttacatacccttttagaatatgacaaatacatatgtgaaaaaatctaatttaaaatatgttaggaatataggtgtcgtttggttcacgaaatgtaacataaattgtaatggtaacgattcacactcgaataccgacggtaacaaatttaaataaagaggtatccatttgtagtgtagtatcgattatggttggacttaaacaaacatgatctaacgttattggttacccattacgttaccaatatgtgaaccaaac

SEQ ID NO: 28392 - DNA, 803 bp, Zea Mays
gtttggttctgttgactaaagcttagtttgtgtcatataaaatattttaatatttgaaagggaaatgtgccattgcgccatttctatattattttggtgattagatggtcaacacattttgtttagaccaacataagaaatgagcataggtacattaagtaaattaagctcggaagaggacttagtgcaaatctatatggaccaagcaaaaaggtaagctctagacacttagttagttgttttgtgtgctaattatatttgtctaagtgatagggactttgtgaagtcaagtcaaaaggagcatatgagaacaagaaaaaaagaagaaagtgtgatgggatgcgtagcaccgcacagtctgctgccacccaccggacagtccggtgtgcaccgtaccgtacggtgtgcacggaccgtacggtgctgaaagtcgcttagaggggggtgaataggcaaaacctgaaatttataactttaaacacacgctacaaaccagggttagcgttagaattaaattcaagtccaaagagaggggaaaacaaatcaaacaagaatcaagccgagtgaacacgatgattttgttttaccaaggttcagttccaaagaacatagtccccactgaggaggtcacaaagactgggtctatttcaaccctttccctctcccaaacgtcacttaggccgagtgagccttcttccttaatctcatgggtcactaagaccccgcaaggaccaccacacacttggtgtctcttgcttcgcttacaaatcacttgagaataagaatgggaaaagaaaaaggcc

SEQ ID NO: 28393 - DNA, 1237 bp, Zea Mays
ctggcgatgggcgcaccggacagttcggtgcgccactggacacccactgtttattgtaagttctccgccacgtcagcaaactgttagggtttggagctaatcgaccgttggaacctttgtcttcttgcggcaccagacagtctggtgcaacaccgaacaatttggtgccctctgacttctgcgctctaacttctggcttgcactgttcatcgtggcaggtgcttttgcagtcgaccgttggcgcgtgagagtcgttgctccgctggctcaccggacagtccggtggcacaccggatagttcggtgaattatagcggagcgtgccctagaatttcctgagagtggttggtttggaattgtatggcctggtgcatcggacactgtccagtggcacaccggacagtccggtgcgccattttttcagcacactcaagtccatttgctccaaatgaattgtgaccccctaactgatttctttcttggtttgtgttgaaccttatgcacctgtaatacatgaattctagacaaactagttagtccacttgtttgcgttggtcgtcaaccaccaaaattaattataggaaatggttaacccaatttccctttcaatctccccctttttggtgattgatgccaacacaaaccaaagcaaatgtaaagtgcagaaatgtaactagtttgcaattgagatgacttgtgcataggttacttagaattgaaccaattgaaagtatcactaagaatgagtaagagtgaatggattggctttcttttatttattatttcggaccacatttgcaccactagttttgtttttgcaaatcttttggaaatcttttcaaaaactttgcaaatagtcaaaggtataggaatatgattgcaagaagcatttttaggatttgaaattcctccccctgtttcaaatgcttttcctttgactacataaatgctcccctagaaattctccccttagctttcaagagggtttttgaaatagacacccaatgaaatttataccaattgaaattttgcctactaatgtgaagttttgaagatatcagtttggaaataccaaatgatatattaattgagagttttcttcacatacttcacataccaattgaaaaaattcatgcttctttgaaatttttttgaaaatatggtggtgcagtccttttgctttgggattaatactttctccccctttggcattaattgccaaaaacgaagaacttgag

SEQ ID NO: 28394 - DNA, 1686 bp, Zea Mays
gtctccttgaccttctcccatgcactcggtacctcgaagctcttcttgcctccaaccttggcttgatcagttgtctccgacttacacacaccaagtctcacttaatcaatgtccatcttacttgtgatgtccattatctatagatattccagtctttggaccatcacacttgttcatttgtgttgaaccctgttagctttgcattaagcacctgttcaacacttagcacacatgttagttctttgattgggttgtcatccaaactaccaaaacccacaagcgagctttcacattatcacataggagtgggactttgctcagattgtagccaaagtcccgaagggtttgcctcatccaaagtagttgcacgtaacactggtctacgacaacatactcagcctaagcagtggatagggcaacaaatgtttgtttcttagagctccaagacactagggaccttcccagaaactgacaggtccctgatgtgctcttcctatcaaccttacacccaacatagtcagaatcggaatatctgattaagtcaaaagtagacccttttggataccagattccgaaagaagacatatgaactaaatatctaagaatttgcttcactgccacaagatgacattccttggggtcggattgaaatctagcacatatgcatatgctaagcattatatccggtttactagcacaaagataaagtaatgaacctataatagactggtatgccttttgatcaacggacttacctcccttgtcgacgtccaagtgcccatcggttcccattggcgtcttggtgggctttgtgtccttcatcccaaacctttttagtaagtcttgagtatactttgtttggaatatgaatgttccttccttgagttgcttcacatgaaatccaaggaagtagttcaactcgcccatcatcgacatctcgaatttctgcatcattaccctgttaaactcttcacaagacttttgattagtagaaccaaatattatgtcatcgacatatatttggcatacaaacaaatcatcattacaagtcttagtaaaaagagtaggatccgctttcccaaccttgaaagcattagaaatgagaaaatctctaaggcattcataccatgctcttggagcttggttaagtccatagagcgccttagagagcttataaacatggttgggatacctatcatcctcgaagccaggggttgttccacgtccacctcctccttgattggtccattgaggaaggtactcttcacgtccatttgaaacaacttaaacgaatggtgagcatcataggccaataatatgtgaattgactaaagcctagctacagaagcaaaaaagtctcctcaaaatcgaaacctgcaacttgggcatagccttttgccacaagtcgagccttgtttcttgtcaccaccccgtgctcatcttccttgttgcagaacacccacatggttcccacaacattttgctttggacgtggcaccaggctccacacttcatttctcttgaagttgttgagctcttcatgcatggccaacacccagtctggatcctgcaaggcttcttctaccctgaaaggctcaatagaagaaacaaacgagtaatgctcacaaaaattagctaatcgtgaacgagtagttagtcccttgctgatgtcacccagaatctgat

SEQ ID NO: 28395 - DNA, 370 bp, Zea Mays
aaaagtttgttgttgccccgaagcctgtgaggagcactgcggtctgttctgctgaccccttatcatcattctgagtagagttgtggatggacctgacatgcctcggataagatcttcctccgaagcccctggtcatttcagaaaatctgaaggcctcctcccttctttggcgaaagtcattgtcagcacgaatgtactcgtccatcttttggagcagcttctccagggtctgaggaggcttcctagcaaagtattgagctggttggggtccagcggttgccgtgctgcagccccagtcgctgaagttttcttcagcgccatagcgagggtctatagcttccgaaggtgttcaaaaaaaaaaaaaaaaaaa

SEQ ID NO: 28396 - DNA, 247 bp, Zea Mays
tttataaataattatggtttaattattatgaattttaaggttatttaaaaatatattttgaatttagaaaaaaggaaataaaaaacaaaaagaaaaacaaaaaaataaaacctaacctaatcactgtttggcccactagggcccaacaaggaccggtgccctgctccgtgaccaaatcctcccagccgcactcccctggtctccaagccgccaccgccaggatccccttcgtcttccctgctcagcc

SEQ ID NO: 28397 - DNA, 228 bp, Zea Mays
agctctgttccggccagcacaaaatagtagagttaaaaattccaagttgatgagcttcaccgaccttaagtgactacagaacgagcgccacacggtcgaggaaaccttcgaggatccctggccatggtgaggtaagaatctggaggctgtggtcaccagacagaggagtggatgcacacacttttgaagtagatcacgctaggtggttgggagagaactcaaactggc

SEQ ID NO: 28398 - DNA, 224 bp, Zea Mays
ccgaaatcggagctaggcacggagaacaaagaagtacatcgtcggcggtgccgaagggaagatgggccgccatctccggtccaccttcggactttagctagggagctccactgcgacgcgcagtgcgtggtggtattgagcccgagcgcggtggactgcaggagtgaccggaatccctaaccagaattggagatccaccaaggatctgcgtgctgccacaggtg

SEQ ID NO: 28399 - DNA, 128 bp, Zea Mays
gaggaatacctcgccgaagaagacggacggcggctacgaattacgtagccgcggtccagctacccgagggtacatagcccttgacaacctggtatcgcgatcccggcgatcctcatctccaccaccag

SEQ ID NO: 28400 - DNA, 573 bp, Zea Mays
ccccaagacgccactgcaacccctgctccttggccagtgctctccttcaccaggcggccatggcgccctcctcctccatctcattccccagcacccgcctcctgcagctccctggttgagagccccattagctcgccggcgtgctcccctgcgcacgccctgccctgctcacagtcacgaggcacggcagatcgggcagccgacgtcaagcacccagatagcctccctgttctgtacgtcaagaggtagaagtagtctggtctcaatgacacgcgggtccatgtggcatgttcttgtgctgaaaatttcaggtttttgcgcgtgttccaaaatccatatctctagtttggaagctcctaaaaatcatggaacttgtttggtcggttttcttataaaattctctacctattagatgtataatatgtcatgttttagaagaaaatttctgcggtagaaatttatatttaaaactggtttagtaaataaacgaacttacttctccccatattttgagttttatgtgtccaaaaggaatgtgacttgttttgctagttagacggtatcatactctag

SEQ ID NO: 28401 - DNA, 1538 bp, Zea Mays
caacaatttgaaactgaacctgggccttcagagcccaccaaggtaaagcctttggaagccgaagaaacaaaaattacaaaggcagccttggaagccgaaaaaataaaaatgtcagagccaattttggttgaagaaattgacactgctacccccgaagcaccttccaaaatatgcgattatattgtgcgacatgcttcggggaagaaattatctgaagaagagatttttgaagctaaccactatgccagagaactcaaatatccgaagggggcactagtgttcaatgggacagacgaagacgacttcctatactgtctccctgacaacaaagaattatctgtctgccgggagatggctagaagtatgggatttccgaagcttgaagctggactttgcgctatgacaaaggacgatcttgcgggtagccttgcgtataatagtctgaaggtgtgagaattgtgtatttggaaatttacaatttttgaatcattcttttgttcttatactaattcttttttcatatagggtttaatactgagcaacgctttgagaacacaaaagaatgccgaagacgagagctataatattgctttcaacaacctacgaggagaggttatcaagctgaggaacgaagctttggaaaaagataaaattctgcttacactagtggataaaataaaggaagacaaagctacctctaaggctcaagctgaagcccaaaaacgtgaaatttaggatcttcagaaacaactggccagagctaaagaagaacgcatactagaagaaacaaaatgagaacttagtgatcaatgagcaaatcatttggaaataaatgttgaagagcttcgtgcttccaagaaaagatactatgataaatccatagagtgtgttaagaagataaaatctagcttcgccagcgttggcgcattttctagcgaagaagatttcacaagggggaatccagaaggcccgattgaatggatcagtcacaaagctgaggccttcgaggaaatcttgaatagccgcggagacatatgtgctttttcaggcgccagggggattgctactgttttggaaagaaaaggctgtaatcatgtgaaatctttagcgcaatccgaaaccgccttgtcttccgaagatataaaggacccctcggctgaagcaagcctggtaggtggaaaaattttcaccgacatttgggacaatggcggccgagaaatgtctcaagaaatcattcaaagaagcgagaaacgcatccatgatgctaggaagataacagaggctgctgagaaaagcgcagagcccgaagggcaaataggtattaactagtgatttttattctgttgtaatttttgatttcagactttgttcgcggtttgtaatagtaatatagccgtatcttctcctccctcagaacctgctgaggcatctcggggcccccacccgaagggggacgacgaaattagaaaaatggccgaagccatcatggacaaagttgtcgatcagctactgaacgaagctgcagaagtagttcttag

SEQ ID NO: 28402 - DNA, 331 bp, Zea Mays
cgcatgtcgccgggcgcacctgtcaatcgcacgagcgtcgcccactgttcatcttctcaaactgctccatccgccaaacatgcccccacgcccgcactattccaccttctcccccctctctcccttgtttctccctcgccggttccattgggggaccttgcgagcttggcgcagtggctggcggccagggcgcgacggccggcggtgtggcccagccagctgcccctgctccaccccaggcgtggccagccaacgcggcagcacgcccggcgtggccagccggcgcgagttgctcttctcggcacagccagtgcggtggccagccaacgcg

SEQ ID NO: 28403 - DNA, 621 bp, Zea Mays
gatcttcctccatgtttcctcgcggcggtaacaactcgcccgagctactagccgaccttcacgccagctgggttctgaaacccccttccctacccctgcgccgataaaacccgagtcgttgttccccttcttcccccagtgcgcatcgatttggagaaagctgggaggaagcgccaccgttgtggatctcctacgccatgaatcctcagcgcggaagtgtaccagggtcaccgcaggagcctcgcagagagatttcgagactcggctgcgtgagtactcccgtgggtgcctcagaatttcttgccgaacctggttgtcgccgctggagccgctctgcgttgtggaccggcttcaactcgtggtcttagacagtaataaccctcccctgctgtttgtatcatcttgtgcttcgtttagcacaaattggattgggtctggggtgccagaatggccaacgggcgcggctccggcagtgcaccgccgcatgagtcgcgcgctccgccgtggcctgccggcggggtttgaagacggattcataaccgttgatcccggtggcaacagtcacgattcgacctgggtatcgattcgcattagggcatgttcgtttcttcaggaatgaac

SEQ ID NO: 28404 - DNA, 381 bp, Zea Mays
ttccagtcttccctcaggctatggataagcaagagtaccccaagtcctcctaggattccccgccagagttgtttgagcccctcaccatgaaaaagattccagcaccatcccttgaagtcaaggaagaagctgcaagcaccccactagcactgccgccctctgaggagctacaagagccagtccagactgaagaagagttcgaccctgtcttgccatctcagttgccgccagaagaagtcatcaacatcagctccctcttgacccatcaaggagatgtctcagattgaagttgtgcgccagccttgccagaagagaagctgtcagatttgaagttagttatgcccagtcctctgcatgcattgggtagtggagtttttcttc

SEQ ID NO: 28405 - DNA, 524 bp, Zea Mays
tcccttttgcagcgcacccaccgccgccatcatcgccggcaacaccaggcccccctccccttgtcgcacccgttgccacgtagcacctactccatcaccactactccgcacccgagcaccacctcgcatactactcgcctataaaacttctgcaccagctccatcagttcccatcccaagcaaaacacaccagataaaatcccctctgccaaatcgcaagcaactccattttccacccactcacccctaagatcacaatgcttggtgattcttgggttgaagactgttgtacatggttcatagtccttggtttcctcctctgtatgatggtaatactctttgatagaatcctccagtgggaagagcaaagagaaagaaagggtcagtgaaaagtgaaaagaagacagtgaagataagataagaaaaaggttctcccagaatcaaccctgtgttagtcatttctcctcagcctgctcaagcagcaacagcagaagaaggacctttaacacccgtattatgaggta

SEQ ID NO: 28406 - DNA, 909 bp, Zea Mays
gctccccttcccccttcgacgaataagcacggcaagctcactagatcccttgaaagtttatggtaaggaagaactccgtgtttgatggtaaagcatctgaagattgagtttgacttccttgacgaggttgatcccctccttctggctctttggtgtctccatccgagttttagaaggtttagatacgtagatggttgtgaaacgggatataggttaaacatggtttactttgcttacgagttaggataggtggattagacaacttatcaagtaggtcaggtggttctacatggccaagttggtctaaggtactaattttaggtcaacacatatttataggattagggtctaatatatttcaccagcattaactaacttatttaacaactcaccttagattagatcaaattaaattagatagattggcatgactagattagactagataagatctaattaattttggactagatcatggtggttactctaggatgagataagcaaaggggttaggataagatgaatccttcgagataagatgaatctattaagataagagagaatcttttaagacaagatggatccattaggcttgatatattttaaatagggaatattctgtgttgtctattttataaatattttcccttatgtctaagtgtatatgcagatgcaattgtggacattactccacaacccatcacactcaatcaaagatcccaaatcaggcaagtatcatcagaacaaacattcaagtgcatagatataaataatagttttgtttttgttcctaagattaggtctcctatccctaaagatctctttaggcacaggattccaaagtgtgaaatccacatttgtctttagaaaagaaaagatatgaataatcagagtaaagcagaaatagat

SEQ ID NO: 28407 - DNA, 205 bp, Zea Mays
ctttgtttagcaaatattacatcaatattccgaatgtttttacaacaatagctattcttcttttaaaactgcttctgcagctttgtttagtagttgagtcacagcttcatccataatagcttcggccatctttgtaatttcatcttccttttttgcttcgggatcggccaatgactcgaaaggctccggggaaggagatagttca

SEQ ID NO: 28408 - DNA, 3132 bp, Zea Mays
cgcctttcaagttctgcagttttttcagctgcctttgctgcttctctagcatcgtgagtatctttttcacttttctttataatttcgtgagccatccctcggccaccattttcccagatgtcggtgaaaaactttccgccaactaagcttgcctcggccgaggggtcttttgtatcttcaatagagaacgcagcttcggcttgggccagaatcttcacatgctcgcatcgtgccttctccaaaatagccgcaattcccctggcacctgagaaggcgcagacatctccacgaccactcaaaacttcctcaaaagcttcggcttcactgttgatccagtcgattggaccttcgggatcgcccagtacgaagttatcttcacacgaatatgcaccaatattggcgatgctggtttttatcctttgtacacatgctacagatttttcatagcatcttttttttgaggaacgaagctccacaactgttttttcccagtaatttttccagtagtcactggcgtctcggtcagcttcggcaatagcacattttaacttcgcttcagccagttgtttctgaagatcttcaatttcgcacttctgggcttcaggtttggctttggaagtagcttcgtcttcttttattttattcagcaatgattttaatattttatctttctcaagaccttcgttccttagttcaattacttcggaacgaaggttgttcaaagctataatgcatccttcgtcttcggcacttttttgtgccctgagggcgttgctaagaatcagaccctacaaaaagaagtatggtattaagtataagcaaataaaacaaatcttggttttttaatacaaaaaattcattttcatacctttaagctattatatgctaagctgtcagccagttcatctttcgatagcaccgaaagcccatcttctagcgtcgggaatccgaagcttttgctcatctcccggcagacagaaatttccttgctgtctgggagacaatacaagaaatctccttctccgctgccgttgaatattaatgccccctttggatattttaatttttgggcataatattgagcttctcgcttttcctcttcagatagccttttgcccaaagcatgtcgtacaatataatcaggtactctggaagatgcttcgggagttgaagagagagttttttcaggcagaatttgctttgtagcctcttttttcgtttcttctccgatttccaaggatttctccttggcgagctccgaaggcccagcttcggcctcggtctggctctttgcagcttcgtctttggatgtttttgtctcaatttgcgtttttgacgcttcggtagttttcttcggagtggtgcttgaagactttattgtttccagcacatctagtacattgaccatcctttttctcttgggagtcgccgtgagatctttttgtgccttcgacactatcattcctgctgaagggcttgtaacttctaatatctttgttttctcggcctctattcctttaatattattagccttcagcatcatagccggctcttcattcttctgtgtaagagcaggtcctttggcttcagtagccgtagaggtctcaccaccaaattcgggcactgtggtcggttcaatgaagcgcggttggtgagtaaggaccttcacctttttcctctttggcgcggactcacatagagcaactgaagcatcacctttcccagaagttgcactttttctcttttgccctttcagcgggtaacggtaatcagggtacataaacccaatagcatcaaaaactctattcagcctcttcttcttccggcctccgaaggccgcagataacgtgttatcttctgcctttgaatatggtccaagcagttcatcgcttgtagcttcgatgcacttcagccaatcatcatctagctcagtaaatttaccttcatatctgaaggtgtatttcaacctaaccagcccaccttcgtcagacttgctgatagtttcctttgacatttcccattgctttacaagcggccacactttgaaggctatgtgctcctggaccaaatctctcatcccgatgaaagagtagactatgccaaaggccttttggcattcttcggctgcttcatcaatttccaccttcggtttccgaaggccgaagcactgccagataggacgcatgataatatctttaatgtcttctcgtgcctttagatcgtttttcacgtaaaaccattccttcatccagtccccaggtcatcttttccggaaggttggcatgggatagctcgagccagagcgagcgacgaagctatagcagccaaagttgttatgatattgctctttgccccagggtttcgtctcatataacagttcgtgcatactgcagaaactttttgcatttggctccaagccctggctcctcatggcccatacgaagattcccattcttatgatcgcttcgggagtaatttgatgaaggtagacctgatagatctttaaaacctcaaccacaaatctgtttaaggggaaccgaagcccagctttgaaaaagcttcgaaagatcatgacttcatcctcttcgggagtaggcacagtcttctctccgtcatctgccctcacagtagacatatcacgaaaatatcttcccctcatattgtcaaggtgactctgcttaatagttgattttctgaagactgtgtgacttggtcgccacggtcgatattcggagtcttcgcctccactttccacatcataactatcactctcaccggtgtcttcagataaaccttctaaaatctccctagtgattttctctgtattcgtctttgctatcgattcaagaaacccaagattcttctcctcagaaaggctaagcttcgtctcggcaacagcttttttatcttgagtcatcttcgaaaatgttgaaaatgtgctcttaaggccgaagctaaaaaatctcaaaagccaggaaagtgttggtatgcaagagctaaaaagttgggaaagcaagagcagatggcaagaaagcgtgccaaatgtgctcgcggtatgctcttatttatacgcctagtgcgttgcaagtgggagggccccgcttgtcattgactgttgctattctagcaaag

SEQ ID NO: 28409 - DNA, 231 bp, Zea Mays
gcttatgttatttcctatactttatatgaatccttcttcattatttgttgtacttatgaaggtatgtccttcataaccttcgtccgaaactcattatatcctaagggaaataatgctttgaaggacgaaggactttaacgtttaacaatttctgtgttgccttgttcttaattcatagcattgcaggacaagtccccaagagtgccctaagggagaatcagttctatggca

SEQ ID NO: 28410 - DNA, 509 bp, Zea Mays
cgaattgattaaagattatgatttgtctattcattatcacccgaggaaggcaaatgtggaggctgatgcccttagcaggtctggggtttcaaaagtggccttgcagttgattgctaatctggaccgtttggggatcgctttgtgctatgtcggcactgctagtgaggagactcatatgcttattcaatcttccctcatggagagagtgcgtgcggctcagcagcaggattgtttattgcaggaagctcgattgagggttgacgtttctaagtacgtggccgcctgtgaagtatgtcagcgcgtgaaggccgagcataagaggcctgcaggtttactgaagccattggagattccagagtggaagtgggagcatatcaccatggattttgtggtgggcttacctcgttctcctcggggcagggatgctatttgggtggtagtggatcgcttgactaagtctgcgcactttattcccatgaagaccaccaattcagcttcagaattggtcc

SEQ ID NO: 28411 - DNA, 839 bp, Zea Mays
tttgcttataacaacagctaccaggctagcatcaagatggaaccatttgaggctttgtatggcaggcggtgtatctcccctttgtgctgggagaccttgggagagagagatccctggttggtcctgattgggttcagcagacttctgaaaaggttcgggaaattcatcagaatattttggccgctcagagccgtcagaagagttatgctgatgtgaggaggcgggatttggaatttgcagtgggtgacctagtccttctcagggtatcacccactaaaggagttgttcggttcggtgtctccggaaagcttagcccaagatatattggaccgttcactatcttggcccgggtgggcagcttggcttatcgcttgcaactgccggattccatggcaggggtacacccagtttttcatgtctctatgctgagaaagttcttgtgggatccggaccatcagattgagatggaaacaattgcggtgcagcagaatctgacattggagtgtcgtccggtgcgtatcttggaatcctcgaagcgtgttttgaggaagagatcaattaagtatgtcaaggtcttatggactaatcagtctgagcgcgaggctacgtgggaacttgaggagctgatgcggcagaaatatccggaactttttgttgtgggtaagtgttgttgagtcattaatttttttccttttgtcgttctgatagaagcgttagaattcgagatcgaattctttttaaggggggtagagtgtgatacccgatttgcaaagaggagaagtggaggttattctttttgttctttttcctcattcgggtgatgcgctttgggaatttgg

SEQ ID NO: 28412 - DNA, 294 bp, Zea Mays
tggctctcccttttaaagtggcttcctcctcccaagttaagcgaggtgggataattctgatgctcacacggtcaccgtctgactacaattgggccaactgggccaattgcgtctttgccaacgggtaatagtggaggatgtcctcatcattcccaccttcttaaaatgggcccaagctctgataccagatgatacactcagcctaggtggggttggccgaggcccaacaatttagggttgcccgaagcccaatagttcattaagcacacccaactcaggaaaggcccaatcgcc

SEQ ID NO: 28413 - DNA, 416 bp, Zea Mays
gtttcatcggaatggccggttattatcagcgtttcattgaaggtttctccaagattgtcaggccaatgacagccttgttggcaaagaaggttgagttcaagtggaccctagcatgtcagaagtcctttgagacattgaagaagaagttgacaatggcaccagtactgattataccagatgttcacaggccattctcagtatattgcgatgcttcgtataccggactgggatgtgtgttgatgcaggaagggagagtagtagcatactcatcccgccagctgaagattcatgagaagaattatcctactcatgatttggaattagcagccgtggttcatgcattgaagacctggaggcattatctttatgggcagaagtgtgatatttacacggatcacaagagcctcaagtacata

SEQ ID NO: 28414 - DNA, 870 bp, Zea Mays
gaatgtggttgcagatgctcttagtagaaagagtcaagtcaatatgttggccgcttacccgatgccgtatgagctagcaaaggagttcgacagattgagtctcgggtttttgaacaacacccaaggggtgacaattgagttggaacccactctagagcaagacatcaggaaaggccagaaggtgatgagaagatcaacgagatccggcagctgatcatggatgggaaaggcaaggatttctgtgaagatgcagaaggagtggtatggttcaaggacagactgtgtgttcccgacatcaaatcgatccgagaactaattctcaaggaagctcatgagacagcatactctatacaccctgctagtgagaagatgtaccaggacctaaagaaaagattctggtggtacgggatgaaaagagagatagcagagtatgtggctgtatgtgacaattgtcaagggattaaagcagaacatcagagaccggtaggttggttgcaaccgttgcaaattcctcagtggaagtgggatgagatcgaaatggatttcatagtcggtttgcctcgcactcttactggttatgactctatctgggtagtagtggaccatttgacaaaggcaacccatttcattccagtcaagaccacctataacagtgcggtgttggccaaactgtacatgtctcggattgtgtgcttgcatggcgttccaaagaagatagtatcagatagaggcacccacttcacctctcattttttgcagcagttgcatgaagctttgggcacacacttgaagttcagctctgcttaccacctgcagacagatggtcaaacagagagaaccaatcagattctagaggatatgttgagggct

SEQ ID NO: 28415 - DNA, 607 bp, Zea Mays
aggagttgtgtgctaaacaattgatgcattcctttccttggaaaactggttaccattccttgttacctgatttattcaaacaagttttctgatgcttagccttgctttagaaaacaaaatgttttattttaaacaaaaggtgatgcttcacactggatgggggatttttacaaagaaaagaattatgatagtgaatccatcatagccgtgatggattcaacatatgaaaaagagtacctctgtcaggtaccaaactttgggttttaaatgataaaaatgagaccgggcggctgacttgcacgagaacggagtctcaatgtagtgtctccgtctgagttgtttaaggaccgagacgatgtacgcttgatgattgaggaccttttaactggccacatgcctcgtcatgggtaagctttgcctcgatcagaccaataccagaaaggctaccacacaatgggagtggagagatggtgagagtagcgtgtaccctccgtggcaagaggctggacggtggagtatctgtgctctcggttggcgtgaacccattctggtctttgagaaactcaggtgcgagttgatatatgcaagggttaagtgctacatatgt

SEQ ID NO: 28416 - DNA, 585 bp, Zea Mays
atctttggttgtaaaggatgcagtttcgtaaagctccatattgtgtaataatgctctacttgttaacttaaaaatgaacgtgatgctttattatttggtatagtatacaagtcaattcaaagaaaatggttgagagatttaatttaaaaactgctattcttattccgaatttttagtgtcctaggttggagaatctaagtattgttagttttttaatgctatcttttagctaaggataacatagcgtgtatttatagtttattgttgcttgatgtttgaactaaatccgataaagctagataaacatgtatgttgtgcttggtgtgtatactttgttgtttcgtgatgtttgcattagattcagttaatctagagaaacatgattattgtggttagtcatatatatgtcgataactagtgtttgctgatgaagtgttataatgcctcatcagtaagtacttaattttatattgcgaagcatcataatttcttgtgttactcttccttgttttcattcatgtgcattatgtgtatcatttaggtatgttaagtgatcatgtaatgtggaggactagagctaagtcg

SEQ ID NO: 28417 - DNA, 375 bp, Zea Mays
ctcaaaaccaatttaaacaagaaggaatacatcacataatattggattaatcttctttgaatgctgaatggcacattccatgtgagaaacacattctcatgttgtgagactacataaacacttagatagaaacattagtctcacaactctagtcatatagagaattccccttttgataagtgctttaagaatttgaatttcttagcactctatcaatttaagaattcgggataatactctttacgtctaagtcatggcaataatacgataattcatttgaaatatgccacgaattaattatcatcaattaaagtatgtagatttccacattaacaataacaaacatgcaatctaccatatgattggaacttttcc

SEQ ID NO: 28418 - DNA, 385 bp, Zea Mays
gacaaaccatgaatagattacctttttcacggcaattgtagcaaatgtggtgcttgtcctttcaatgcatttgccttttgctttcatctttcttgatggtcatctttcttgatcgtgcaaggtcttggttctttatgtggaggcatgaaccaatttcatgacccttctccttgcatccatagcacctcctatggctttgttgggggccttcggctttcgaaggtcctcaaaaacatgatttaacaatgtttctagagtatgatacatgaacagttatcttcggactcatatcagaaccacagtgtgaagcgcaaagaacacgaaggttggcgcagagccgaagctatgtgcaggagagcttcggcatgatagcagaaaaggaaac

SEQ ID NO: 28419 - DNA, 1568 bp, Zea Mays
ctctgatattttcctccccactgccttatctccgcgcgcaggcttcttcccccaaaccaccgtagcttgttggttcctgctcctgcttgcttgttggacgctgaatctccccaagactttggctgcgaatctcgcttccggcacctggcagcagcgccgaccgctcctcttcttcaatgtgtcgcgcccttcctctgctcgctgtaaacagtcgacctccctcggctccctccttgcttctctctccctcagatttgtctgcgccgttggtgcttcgtcttgcccaaccgccctggcctctgctcgaattttgcagcgccgagctcccatgattcccatggtgctcgccctcaagctcgctctctggcgcccctgtgctcgacgcccagcggaggccccttccctgcgccgctctttctctcctggtgttttcttcctgctcgcgcctatctccctcgtgtgagcgcccaaccgtgctccccatgcgcagccgcgctcttctgtccggactaccagcatccaactccagtcttctcaccactgaagaacagtcgccgcgccctgcgtcctcaccgcgtctgtgaagctgtcgtcgtggagttgcggtcgtttctctttgcgtcatgtgcgcagcacgccatcgtcttcatgttttggcaagccccggtgtgcgctcacgctcaccatccccgggtcgacctcgtcgtcgagcttcgccttgccggtcgtcgttcttggctcagcaagcatccttggcggacacgcaccctttgtgtcgtgtctgctcgtccatgctgtcgacctgtacagacacagagtctcgcttgagtcgcgctgtcgtcgatgcaacgtggggttggctctttgctcagcccagctcgtcaagtcccaggaatctggacgcacgtcatagtcggtgttcaacatcttcgtgttgccattcgtgtgttgtgacaccccttgctcctcgtcgtcaatccaccttgctcctcgtcgtcaatccatgttgtgtccacgacgtgctcgtcgactccgatgatctgtcttccaattgcgtgctgcctacgtgaaagggaaatgtgctcttgggccatttttaatatattttggtaattaaatgtccaacacattttgagtgagtaattatatgccaaatgatgaatgaagtgcaaatcgacaagaatgtatgattctagacttagtatattggtttttatatactaatgaagtttgtctaagtgctagaattagagaaaagagaaagagaaaaggaattggctggagcagccaagactcagctcggtctggcacaccggactgtctggtggtgcaccgacagtgtccggtggtgcaccggatagtgtccggtgcgccaggccagctctggcgaactggccattctcgggaattcgtcggcagcgtacaactataattcaccaaactgtccggtggtgcaccggactgtccggtgagccaatggccgccagcgcaacggtcggccgccaaatccgtgggcgatgcttggcccgctccaacggtcggcaggggcaccggattgtccggtgtgc

SEQ ID NO: 28420 - DNA, 160 bp, Zea Mays
cccaagcatactttgagcattctaagtcttccacactctatcaccgtgcaattgattgactttcttagtgatttgagctctgttctagtggtgaacttattgcgatttatttgagctcaagtcttggctgtgtgtgtgcgtattgctgcggatttgtgtg

SEQ ID NO: 28421 - DNA, 280 bp, Zea Mays
cgctcgatgaagtgtagatagctaatgctaacgtgtggtggtttacggtgtcttctcaattaatgttagttcgctattgtgtcttggtataccttgtgctatttttatgctatttccattatattcatacatatgcatcttgcacctcatataggaccgagagaggatgatcgagccagtgatgtggtggcaacaacaagtgcaattggtggacgaccggaagaaggatggacttaaccagtggatgctcgccaagcgaataccttccccagcaaacgct

SEQ ID NO: 28422 - DNA, 2212 bp, Zea Mays
gtctgagaagacgactagaatgagcatgcatcatgattgtcgcattataattgtctcttgtgcacaaacctgcttctctcacctttattccaataataaaaacttgtgaataatgtgatgtcctgctatgttagaaatgccttaccccgtgtcagattggtaagtcttgttagttcgtgctatgtgtttgtcttgtcttgctagctatgtggtattgtaattgttcaaccctccttgcccaaaaaaaaaaattgttgcctgttttgcccataaagaccccctctccaaacaaccttgagtttagcaagtgaaaccttcttaaaaaaaatcctacttgtgttggtattttctagcccccttgagtgttttacctttgaagttacacctgcacaacttatagacccccacagcttgaccgctagaccaacgcaagtctccttgtgcacttgtgtcaaaaaaaaatttgtttggtgtctagttgcgcaaaccacgtccaagccatgtttctttccataaatccttgccccaaaaacttcctagcagatcttgttttcctacctttcctttcgcctggatctggtaatcctttttcttgtgaatcatgttggctttatcatccgaatctctggatcccttaatgattctgccccgttatctggttgtctgctataacctgttctcatgtatcgggtgttgatcttgcctaaatctctcatttctgatcattctcatactctttctctaaggatcatgacgcttgttttatcaacttatctctaaatggcatatccattggttaaatggatttgattcttgtctttagttctctcatgtctctacaagctcttcaatcttgatctcatggttggttcgtcctcatatcaaatctcatgctaatctctgatctgataatctccatgttgatcatcaaatggttctctgggttaaagaaaattctcatgtgatgctcttttgtcagcaatctctgcttcaactccggacacattcttattttctgagccatactctcatgggctccatctatctgtgctatgtggatttctcattggttgcgtttggtaatggtattatggctaacaactgatggtgccgcgacgaaaccgagagcctactatggtgcacacatggttgagttgctcggtacgcgctggtatcgcggttaatagttgtgatccattataagactacaccgatgtgctatcttttgtggacactctcagaatgatcgctgcattttgtctcgatatgtcgcgatattctaatcaaatctgtcttcagtatcttgtcagataccctctcatgaatttgcatctatcttcagtctgggagttacatgcttctccacccttaaatatcctcattcgaatctcgggacgagattctttttaagggggaaggctgtgacaccccaggtgtctatttcgcgttatatcgggagatttatcctaatctcggatgctcagtaaaaattttcatttctcgctcgcgtatgtccctgattatccagattattcattcacgtttcaccgaattcagagttactcagtctcacagaaggccaattttggagcctgttaaaacttttatcctcagcacgaatgtaaactcgaagatcattctcgaattataaatctcatctgaagctcattaaatcaaactctcgatgactgttatctgatctgagcccgagtctaattcctcgaaccctgatcgatgtccgattattttgatccgagtccgtactctcacacggaacactcagtacgtcgtcctctaattatttcttactcgactcggctaaatatcccatgtttgaaccgaactcaaaaccccgtatcggcaacgattttaaaatgtcacaatctgatttctccgactaaaaatccgaagccgattagaagtttgagagaaacatttattttttaaaatagtgtgcgaggaattatttccgagcgaaatcaaatccaactctcggccgaattaattgctcaatcgtccgttcgccgaaatatatttcgctttgttctgtgtacaaacaaattccgcgggaacattttattccgggaaatgtttagcgcagcccgataacgtgtttgggccagcccaacccagcccatttggcccatttaaaaccctaaccctagggccttctataaatagaacccctctccccttgcaaattggattttat

SEQ ID NO: 28423 - DNA, 314 bp, Zea Mays
ggcccccgacgccacgcggtcagcgaagtcagccgcctaaaagacacacataagacaacaatcccaacgaaaccggtaaaaaccgaagtctagctcaacttacctgacttagccgctgcgacgcctccttcagccggcgggacacagcgcccgcctcgtccttgacggcagcgagcgccgaaatctcaccgtcagcgctgagagcgccacccttcgccacaggcactgtggcagacaccgttgtcgccgccgcaggcggaaaaacaaccagttgcccctcgcccgatcctgcgacgcatcaatagtaaaaaaaa

SEQ ID NO: 28424 - DNA, 1118 bp, Zea Mays
atttcttgcgaggaattttagttgtgcagtgaagacagtgctatgcattcatgtgcataatgcatttcattcaggtacgtgaattaactacgtgatgcggagaaccagaactaagttgacctcaagatggtgcaaggagtggtcttcttcgtacaacgatgtcgtcagttagaccaacctgaagggcaaacaaaacaagtgtcagaacaaaggctgatcatcaagtgatcaacgtctaacaatactaacctagttttatccaggcaagccccggtgcatgcaacccctttccttgtgtttttcaatgatttttacacactttaagtctagcgaaatgtgcattaagtttataggagttgcttggaaaccctttgatgcattgtctaccttgatatccatacctttatagatacttctgatgaagtatcaaaatatgatttacaaaaatgcttatcccttcttagatcttgtggataaaggttgtcctttgcgttaatgcctagctcaggggttatcctaaggaaggatggcttctgcctgcaataatattttcattgggagcaatggtgggatcttactgcaaagttccctataatgctcttttcatccttaggaacacaaagaatcctaaggatggaagtacttaaatcgagacttgggctaggaacaggtgatgatccgcccaggttaattaaggattggatgcgtatgtaggcctgtatgatcaaggactatcttaactggccacatgccctagatatgggacagggtaagcttgaacccgtctattccatacgtgaaaagacaaccgcgcactgggcgtgggagatggtgggagtagcgtgtaccctcctagctagagactggatggaggagtactgtgctcttgggtagcgtggaccagttcacgttgtggaggatatatgggaacgattgacatatgcaagggttaagtgctacatatgtcgtgtggttagagattctcagctgagtaaatcgattcggatcgccgttatatccccagagagtggagacttggtcactgacctgcaacctaagtcaagatgtgaacattatgaatagaaatgatgttgtattgatgagatggtgaaattaga

SEQ ID NO: 28425 - DNA, 103 bp, Zea Mays
aggtggttcccaagcaggaggaagaaccgaaaatagaattgtgttgctgtggatggtgctaagtgccggtgggctcgaccttcttataagtctaagtacctct

SEQ ID NO: 28426 - DNA, 184 bp, Zea Mays
ggcggcttgggctggattcggcccagccgaggggggagggatttcctttttttctttttctatttctatttcttttttctctttttctcctttttcttttgaacaaatatttatctatgtttcttgggtgccaaaaaaaattctatgtgaggtgctattaacaaccatggtgtctgcatatgat

SEQ ID NO: 28427 - DNA, 1196 bp, Zea Mays
aatcgattcggatcgccgtaccttcgcggttatgaagacttggtcacttccctgcaacctaaagtcaggatgtgaacactatggataaaaatgatgttgtcttgatgtgatgtgaaattagactagatgcaaatagagtctattaatacttaatatggcgttaaaagattgaaagtaaggactcactttagtaagctatttctgcaaaagtataagttgatttttgctaaagcctctccttgactcctatttatccagcatacccttgagagtcttttccttagtcgggtaagacttgctgagtattccatactcagggtttatccctttgttgtttttaggtgaggaagcgacaaatttttgttgcttttgctccaaggtggtaccaaatgaggaaaaacaagactgaagtgcgggaggactcggtcctccacttaggatcttttgcttaagaacttatcgggaggagtttgtgcctcccctggtttgtataatgttactactctgcactcacttttagtctggtctgtaataaaataactcaagcttgcttttgaaataaatgtaagttatgtaattcgcttccgcatttctttatctctgatgttctgtaatgtctgcaagacgggtcaaacgttcctggtaaggtaaggaaagataccgaacttgtcaagtagttcaggggcacctacagggttgtctgaagtccgttggacaaggacaactgtaggtgggcctaattacttgggaggttccgtcacatgtttagtgcggctatgctcgacgggattatccgccatcttgattgcactctcattatcacatagcaaagggactttggttaatttgtaaccgtagtcccgcagggtttgcctcatccaaagcaattgcgcacaacaatggcctgcggcaatgtactcggcttcggcggtggaaagagcgaccgaattttgcttctttgaagcccaagacactaaggatcttaccaagaactggcaagtccccgatgtgctcttcctattgattttacaccccgcccaatcggcatccgaataaccaatcaaatcaaatggggatcccctaggataccaaagcccaaacttaagagtgtaagccaaatatctcaagattcgttttacggccgtaaggtgagcttccttagggtcggcttggaatcttgcacacatgcatacgga

SEQ ID NO: 28428 - DNA, 2152 bp, Zea Mays
gtgcaaagaatgttagattacatgattatcttttcatgatggcaagaataaggtttaggaagattaggatttttgtttcaatagaactacttgtttcatggtgctttaaggtgaggtgtttgatcttcttatacattcgtcgggtgtagatgtttcaccatttaattaaaattaattgttgaagttggtaagggttgtgcttggtgcatattaccccttcataaaagagtgttgtcttaagacattgatgttgatgtatagctgcatccaaatttgatggtgtgaaattgtagtgttgattgcaactatgaattgctttgagcttcattgcatgttgtttcatgcttgatgtcaggtcgtgtagtttccttagacaattagtccaaggtagaagctcttctgttaattaagaccaataatggactcatgttttgaatggtggtgctatatggggtaccttgggtgttttgcttggagtggccgaattcgaggtcaaattctttttaaggggggtagagtgtaatatcccaaaaaaaatgttgaccaaaagttaatctttggtgcgtggatgaggtaaagggttgtgggccattggatgcaaagatagaagtcatctgaggcgtcgtttctttctcccacaaaaaccctaggtggccacccctttttttcccttcaccccccctcttggccgccaccccctttctcccccttggctggccgccccctccccctatggcagccatcctccattgcttcctcccccaagatctccccctacgcagcaaggatcgagaagaggaggagcacgtcgaattgaagaggaagagaggatcaaggaggtgttcttccccatctcttcttgcatattttcttggggaaaccctagatatggatgggatccttgttcctccctgtaattatgtgcttttggaggtggtggatcatggggattaaaggattagaggttgtatagatgtgggggggttaggttttgatctcgaatttagttttctgcagcatagcagattcgacagtttctgttcataccagtttttcgtgatcttagtggcctcaaaaaaattaaaagtctatatatgagtcgtagataatttatagatctttccgtggccgcgaagaacacctcaatcggacatcagaacagaaagttatgacagtttgattatagcagtttttcagtctcataattctgtgcagaatctgttctcttaagagttaggcaattttatcaacagaattaaactgtgggttggtaaaagaagttgtagataattttataagctttccagattgttaaagagtgcattcatatgatttgtgaaactccagttatgtttgttttactgtggctgttcctgtttgcctgacaaaaatgagtgggtctgttcactggtgggtttcatctagtaaattgccgaattggctcttccaattatggagacttttgtagagggattaaagttcttacttccagcagaatttcataatttttggttctgtagtttgggagatatcgaattttaaagtgaaccatactgctgtctaaaacagattcagtcagttatcttgtgagatgctttagaacttgtagatggcagaatttaattatccattgaatactgaagttgtagagtattttgtgtagatactcctagagtatttgtttgatctcaccgctgttttaattttaaagatacaaaattaacaaacagcgctgctgctgtatggcatgtggttcagggtgggagtctttccactgggtcttggtttcaagtgtaggagtgttttgttgattgatggcaaatgtttgtgaaatatttgtactaagttttatgcccgctagcaggtggctacactccagatcatgtctagtacatttcttcttcttcgatgaaggcaagtgaatgtagcggtggttgcttccgttctgacctgttatttctattgcctacactctaatattcagaagtattggattctttcataattggactctatggtgatgctttacttgcttgcattatactgatgctcaatcatatattgatgatgattatgattcgagtatgattcatgagattaattcacacccctgaaggtaaatgaagtattatttgaggttggtattgtatct

SEQ ID NO: 28429 - DNA, 633 bp, Zea Mays
catacccttagaggtatgaaggcagaggacatatgcattgcattcatatgcattcattgaagtgatatttgcagatgatgtggttttatactctcagaggtatgaagatagagtacctacacattgcattcctatgcatacattgaagtgatatttgcaggtattgttgacgcggggaagtgttatagaacctattgtggttgttcgaggaaatgagatgatattggttatattgggactactaagttctatatctacaagtatttctgatcttgattgtgattcttttaaaatgttgattaattcaatttgtggtttaaatatctcgtcagaacaattcgcttgctgagatgtttcatctcactcttgcatcactcaatgcaggtgcttgttgctcatcaaggggagtgggaagtagcagcacatccaccttcactctcataataatgctgcccagacacagtcatgatttaattagaaactttttgtcaaaggatgtttgtttttaactagtcgtgcacactgattaattcagttcatgttgttatggttgtcttcccattgctagcagattattaatgtcttttatgttttcttatcatgatatctatttatactttgttgcatccccgt

SEQ ID NO: 28430 - DNA, 1121 bp, Zea Mays
ctatgatttttttcttcccccatgcggcagctgtactcaagctcatcctttcgttgatctttttcatcagccgctcaagcactgggataaaatcctgcacgccgtgcgctcgtcgtcttccacctctgctcctcccgcgcttagctcttggtgcggatctcctgttcggttcataacttctagctcgtcaagctcgtccccatggcgccccagttcggatttccctccttggcactcggccttgccccctgctcacccctgcaaccctgccgagccctaaccccatccagccgagctcaggcgcccaatctatggcgcacccagccgcgcccttgtccatctgcttggccacgagcttccctgctcccatggttatcgaagctctaggtgcgcacatacgcactgaagcctttggggtccgtgacgatgtcgtggagagccgcagcgttgtcgctcgcgtgcctcgtcaacgtgacagcggcgctggtggacggcgcactgctccccgaactcgctctgcgctcggcttcttctctgtggagctctcctctgcgcctgactcctgctcgtcgaatctccatcctcgttgaagaagccttcttggtgaagctccctatgttgaagccttcgctgttgttcgtcttggacaagatggcatacttcttcagtggcttcgtcgatctgcctttaaagatcggctagtcgagtcatcttcttcttcttcctttgtacttgttgatgaaggatctccatgtttctgatttataggtccaacccctcctccttgagtgttggacttgtggctttcgtcttctggcttcgggcctcttgaagagaaagggtctcctggtttgggtccagtggctgcagagcggtagcccctgtcgctgaagctttcttcggtgacatgacgaaggtcagtgcttgccgaaggtggtagaaaaggattcaccggaggtgggcgccaatgttggtgacttgttctcaaatgctgtgaatcaagaacaagacaacataaaatgttaaatataaacgtccttcgtccttcgaaacattatttctcttaggatataatgatcttcagatgaaggtcataaaggacataccttcgaatatcaaag

SEQ ID NO: 28431 - DNA, 500 bp, Zea Mays
aacacttgacctttggttacaaaaatcatggaatggtgttgctgcagtattatttatgctattaggcccaccaacatgttttggaaatgtcgtataaatatttctctactgtgagaagccaacttttataaatgcatcatggcaaaatttatcatctattcgatcgtgcttaaaaaaggtaacaatagaaacaatggagcagtcacgcagaggcagcgcggacagcagactagctgctgcctgctagtgtctagtgtcaagcggattagcgaagcactggggcaggcactaggcagcagactagcagagtagcagactagcagagctgtagaggcacgcgaccaggcagccagcgcccagccacagccggccagcccgcagatcctgtaggctgtagtccgcaggcctgctgcctgcagcgcggacccatggaggtggagcggcggagcgcgcggcagcgcagtgcgcggtgcggcctgcggcgctatgctggagcggag

SEQ ID NO: 28432 - DNA, 418 bp, Zea Mays
attgaatctagcacatacttttgaccgggcgatcagtagccgtgggatctcagcggatggttcagattaagtccttgggataccctttcggtggtttgatcggcgtcgtagatcggtgatccaatggccgtgatgtcgtaccggttcacatatataactctctaatctagaccgtgtggtttagatctggcggtcacaattcaacgataccctttcgcgtggcttatttcctaaagagacccccagattattttagaaccaacccgcagtccactacgctgggtgatcttagtcataggaattcttgggcagaagaccctgtgctttcctgtatttgaggcgcagtccaagcagttaattaaacagggaaatcaatttagaaaatgttttttataccaaattaattgcaagaacttgt

SEQ ID NO: 28433 - DNA, 143 bp, Zea Mays
cgaggagttcgattcgatctatgtggcgtctcccagttgactgtctggcgccaaggatggattttagatccttttatatttatcttttatttttagtaagacttcctctatgaaataagtactctgattttattaggacattt

SEQ ID NO: 28434 - DNA, 1020 bp, Zea Mays
gtcttgctggggcattgactgctggctgttgctgggctgctttctttggacaattcttcgccgagtgattttgttctccatagtagaagcatgcacgacctactacttgtgctggggctgcttggccattctggatggttacgggtgcaggaaggcgagctgcctggtggctctgacgttggtactgatttcctcccggctgagtgttctaacggtactgctgttgttgttgctgaggaaactgcctctggtactagtgctggtgctgacgctgatgctggtgctggtgctggtgctggtgctggtgaccttgtttgaattgctgaggtgggttgcctgagtagcgaggacgactgctactcccggtctgaggtccaccgatcttgcgcttcctatcctccatctcccgacgcttcctttcagtcatgattgctctatcgatcagatgctggaaggtagggaaggtgtggttcatcaactgataatggagaggatcaaccaatcctctcaggaagcggtactaccttttggcatctgtgttgacatcctctgggtcataacgcgtcagctgcagaaacttgtccctatattcgctgacggacaggggaccttgcttcagggcgagaaactcctccttccttactatcatcagtccctcgggcacatggtagcgatggaagttatccctgaactcctcccaagtaatggcttcagggttggcatgagtggcgaggtaggactcccaccaagactgtgctgctcccctcagctgtcggggaccatacaacaccttctcgcggtcgttgcactgggcagtgtgcaactcacgctccatggtacacaaccaatcttccgcatccatgggatctgtagagtgggaaaagacagagggatggcccctcatgaattctgcctgcttgtccttgggtacttgtggtatctggacttgcactggatgctgaggtggtggtggctgctgctgagcctactgcatcgctgctaatgtctgaccaattgtct

SEQ ID NO: 28435 - DNA, 328 bp, Zea Mays
ataacccgtcagtccctcggatctagtccgataaagccacttatccaggatcgaataccactagctcactcgaaggtgaggcacagagaaatacaataaagcataataccataaattaagaaagtatgattagtgattacattatcggagtttcataaataataacaataagttttaatgcagcagaaataactaacgaagaaaaccgagtaacatggcgaagcctggccacgctactcctcctggttctctcctgcggaagcagtaaccctctcgatcgtctatcccggtggcagggatgaaggccaagtcacaccatcaaccaaat

SEQ ID NO: 28436 - DNA, 141 bp, Zea Mays
gaaattcaacacttaggtagtgtctgctagatgacactcgcttggcgagcatccactggttaagttcattcttctttgggtcgtccaccaactgcatcttgtggttggcaccacatcacttgcacgatcatcatctctcgg

SEQ ID NO: 28437 - DNA, 538 bp, Zea Mays
ctaagaacctacaaataaaccatgtatctcctttgctttcgtgctagcctttccttaatctcgaggacgagattctttttaagaggggtagatttgtgacactatgaaaatcattaaataaaaataatacatttagttaataatgatatttatgataattaattttctcttaagtgttcattatttatttgcctttggaatgatttttgattgcttataattgatttttgaatacttaatagcatttcttcttaattaaaaatccaaacaaataatataattagtccaaaaataaaatattttatttataataattttagtttaattattataagttttagagttatttgaataggtatttcgaaatttgaaaagaaaaaaaaaacaaaaaaaacaaacctaaactaaaccctaaagccttttggcccactaggagcccaacatcacccctaaccagtcgcgccccctgcctccttctcccagcacgccgctccttcttcccatgcacagcgccgccaccttctctctcttctctccc

SEQ ID NO: 28438 - DNA, 1115 bp, Zea Mays
ggcgggtagatagttactgctcaaggtcattgtttcaccatatgccacgacgggcaggcctcggtagtaatatctcgcagccgccgtgaactcaaccttgtccaaattcatgatactgggggccgatcagtataaattgagtattcccctcattccacccttttgttacgaacctagtccaccctcagccatcccctctcgtccaccgtagctcgagttcatcggatttccctgaaatcggtcaccatcgccgccgtgagaagccgccccgtggccataccatctcaggttagttcatctccctctgatccccgttttagaacctctctaacctctagatgcttacggtcttgaccaattgaacgctaccgtagtatagtcctaggaacgtcgtgttgtcacacgggaacgtcgctgtggacacccctcacatcgaccgactcttccatgccttctccgtccaaactcgtgcgagcaccatgaccctagtgagccactagtactttccaagtcgatagattgaattctaccacattctgtaacccggaacaggctcgccggtgtctcggctccgccgtcgtcgcggacagacacgaacctggggtagactaactagattacccgtggggtatgctcggatggcctccaagagggtgtccctgtactcgctaccaccagaataggtcgccggagatgagtccgggcgactccggccaggtgctcgaccggcgcacggtctaggacctggagttgtaaaggttagggaagagaaggacttcggtgaaattgtcagtgacatagtaaaatagtgccatgggctcttcactagttgtttgaaacatcatgggcctttgtgcaaagtcgccagggcgggcgcaggcgcgtttccctgttcgtgggctgatttgggctgaactcagcctagtcctgttaattattttctcttttctttttcctggtagcttgtgaaatccattaaaaatagtaaaaaagtgataaaaacatgggaccaattttactaggctcctaaaattagttagcatttaaaaaaattattccaagatttttatttcaaaccataaattatgtagcatttaaaggtacttatgtagagc

SEQ ID NO: 28439 - DNA, 303 bp, Zea Mays
cttaatatgtttgttttaaactttgattgaagtttgaacttttttagacactgtttggccaggaaatcaatagtcagtctaaataattaagcccttttactacccagtgagttcaagggtagttttgcaagtgaaacttgcaaatcatgaacttgctaaaacttggtatcctaagaagattagttgagttaatctttaagggttatctaactaggaagtcctgatcgttgataaacattgtgaaggaaagctatattcaagacactgctttctatattcttgcatatccatgacatagcatca

SEQ ID NO: 28440 - DNA, 389 bp, Zea Mays
gtgggccggagtcaaggtgagttctcttattttttccttttgtttttatttttattattttttttcttttaagcttaatccttttggatccaaattttgaattcaacttatgtgcaattcttgaattcctattaaatatacaatttgctcatatcctcatgtgatgaaattatttagttataatattattttatatggacacaatatttctctctcttttctaaattcttgaaatttcctttttggattcaaattccactttgagctttaatatatttcttgtcacatttattattttattttctcacaatgtgcacacaaaaataatcccagcatgatgcataacttagttaagtgtcttttattgattatttattggtgtaagtgag

SEQ ID NO: 28441 - DNA, 438 bp, Zea Mays
cggaaagtatgtatattaataattttagtttataatggtaattatggtaatgaattttctttcaagtgttcgatttttgtttacatttggaatgatttttggattgctcataatcgattttagatatcgaatagcatttcctcttaaatgaaaattcacataactaatataataattattagtccaaaaattaatattttatttataaataattttggtttaactattataaattttagagttatttaaaatatgtatttcaaaattagaaaaggaaatagaaaaaaaagaaaaaaaagaaaaaaaacactaacctagccggcccattaaggcccaactccctaaccctaggagccggccgcgccgcccctggctcctcctgcacagcgctgccaccctccctgtgcttctcccacacgttctctctctctcccttcc

SEQ ID NO: 28442 - DNA, 244 bp, Zea Mays
cgaaaatcaccttggcttcctcctttcctccttcttttcttccttcttcctccctccaaactcccatagaagactcgcacccacacgacggacaccaagcagggaggctccaccttggagaggaagaggtggggggcggctagggttgaggggtggcgctgcaatcacttggggaagaaggagagggattggggcggctgcaagagtggaagagaggaagagagaggggaggcggccaaagggg

SEQ ID NO: 28443 - DNA, 336 bp, Zea Mays
gagcggttggcctagcggcgtcgatcgacgcctaggtgcagggccggtctctggcaagtggctgtggccagagaagagcaaggggaggagagaggaaagcggctgggtgggtagaccagggtggcggctcagggaggatagggcgcgcgacagtgtcttgttgggcctaatgggccgattaggttagggtttcatttttttttctttttttccttttctaaattcgaaaacatattttaaataaccctaaaattcataataattaaaccaaaattatttataaataaaatattaatttttgtactaataattattatattatttatttagtttttc

SEQ ID NO: 28444 - DNA, 374 bp, Zea Mays
accatcctcagtaagaagtatagaagagttacttagacttataagaaggccgtgcccaccggtgcttaacaccatccacagtagcacaagtctagtacctgcaacaacatgggttcgaaaaccctgagtacgaagtgtactttcacaagtcttacccgtctaaggaaaaagactctcaaggatatgctggcttttgggaaccaaggtatggtttaacaagattcaaagactcttttgcagaaaagcttactatgagtggatccttaagaattcattttacttgtcaggttaagtaaatttacctgcatctagagttctttctatcctagttcaagcacttgacctacactagccgtcttttatcatcccttcag

SEQ ID NO: 28445 - DNA, 581 bp, Zea Mays
tctcattccacccttgtggtagcactttatctcaagttaagctccatgtttcaattaacacgataatcttatcatgaacaataattaaatcaacaacaatattggaacatgatcataatttagatataacattaatcccaaaactagttagagcaatagcaagtctacccaatagttcatcggtttgcaaggtatagggtaaacaaaactagggaaacctattaggtcccatccaattaacctgagcatgttatagtgattaacagagaacattattagataaagaagagtgatcaatggcacaacttgcctgtgacttgagattttaggtacttcactaagttggtcttcagatttctcgtgacctcacttctatgcgtagcaatatatacaatcaaacaaataatgggtatagtaacattacaccaaagcatatgaacaaacaatgtaagaatgtcctacgtgccgctacgagattgtaggttcgagaaccattaaaatcggaattaaaacgaaaaagttatgggtaaaaaaatatttttaggcgtaataaatctaatatatgttgcatttaaattaag

SEQ ID NO: 28446 - DNA, 236 bp, Zea Mays
ttcttcttataagaaaatcctagtaataaatataatagttaaataatataatggttattagtctaaaaataaatattttatttataaatagttttggtgaatttttatgaatttttgagctatttaaaaatgcatttcgaaattagaaaaaaaaaagaaaaaaacaaaaacctccctaaccctaaggcccaccagggcccaactactaaccctagccgcgcctggctcattctctc

SEQ ID NO: 28447 - DNA, 547 bp, Zea Mays
cccaggcccgtacctgagtttattttggcctggtgcaaaacacaaagtggaggcctatatttatataatattgcaattaaccatatgtatttagattggagaattaactaacataaactttagttttataagtaaatcatttgcctatcgattgcaatttgcaagcaaaggaaaaaaaacaatggagtgtttcctgatcacatacctgcagtctcgattggcttgttgcgtcgaccttgcaacgtccaggtgcggcaaaggtcaaagcgtcggcaacggcgagatcacggccccatagtagctcggcatcgatggcgtgatgactggcgatggagcgtttgtggtggcggcgcactcccagatcggcgtcgtttcagctagcgagattggcggaactacggaaggaagaaacaaagcctagaatttcaatcgtaatgcacaaatttggaggccaagtatatcctggaccagcatacatggaccacgtgtatatggagaattcataattggaggcctactgatattggtggcctggttccgtcggccc

SEQ ID NO: 28448 - DNA, 144 bp, Zea Mays
cttccctccaccaaaacgattgaagattcgtaccacgtgacgatgatccgagcggcaaggtttggcaccttgggaggaggagattgggggggggctagggtatggtggtgtggctgcaaggattgagaggggaggagatgggag

SEQ ID NO: 28449 - DNA, 157 bp, Zea Mays
ctgtacctgtaaacgagcactcggatgcccgatttcacgagcgatccgacgacgttgatggtcgggatctgcaggttgagcagctcgtactcgagaacgttgtgtagtgtaggagaaccgaaacattgcaatgttagtttcacgttcagagttcaga

SEQ ID NO: 28450 - DNA, 222 bp, Zea Mays
cgcccctcccctctctcttccactcttgcagccgccccaatccctctccttcttccccaagtgattgcagcgccacccctcaaccctagccccccccacctcttcctctccaaggtggagcctccccgcttggtgtccatcgtgtaggtgcgagtcttccatgggagtttggagggaggaagaagaaagaaaagaaggaggaaaggaggaacccaaggtgat

SEQ ID NO: 28451 - DNA, 240 bp, Zea Mays
cctgaccggtgggtcccgatcggcagtgggagcggagagtggatacaggaagactaatacgtgggcccagattgtcatccacagtacccacgcggcatgcagtgctggctgggcgggataaaattttggaaatgggccgaaagctgaggaaagaaacggcccattcgcagttttattttttttctatttttttcttttttgttttaaattccaaatccaaggatttaattccaattcaag

SEQ ID NO: 28452 - DNA, 429 bp, Zea Mays
ctagaaataaggagagttcggtgagctaggggcaagattcccggcgagagaagcggtccaggcgtaaccatccgggaagaagactggcctgaccggtgggtcccgatcggcagtgggagcggagagtggagacaggaagactaatacgtgggcccagattgtcatccacagtacccacgcggcatgcagtgctggctgggcgggataaaattttggaaatgggccgaaagctgaggaaagaaaaggcccattcgcagttttatttttttctatttttttttcttttctgttttaaattccaaatccaaggatttgattccaattcaagtctttatggcacatttattttcaccttaaatgttcagtttgaacatagtttgaattttataaatctttgttttgtattttagagcatttctctctttcaag

SEQ ID NO: 28453 - DNA, 295 bp, Zea Mays
caaaattctatacctcagcctccgacttgactactttataattctaaaaacaatgatattgccacggcaaagcataccaacacaacaacggatctagccataatcttcaagcgcatttatgctaaataaaaggatcacacactaacacactaatttattcaacgatccaactatcatgaataacccatctccttaccaagaccaaaacgatttgataatagcaaatcgacgatgatctatacttcactcattttaacgaacatccggagagtgctacactagagctaatttcacc

SEQ ID NO: 28454 - DNA, 245 bp, Zea Mays
cgagaagtgcagtaatgcgacaaaccactccactgctttatccatgttgattattgtgtaaacactgataaatttgtacaagtaaatcaatatatcatgtgtaaatccttcatacatagtgtttgtttcatgtttgagttcccaaattttgcaaatatattttgtgcggttatctttatataaacaagttctatgatgacacatctcgattctgtgactactgacgttgtaatgaaacaacgaag

SEQ ID NO: 28455 - DNA, 724 bp, Zea Mays
cttgattatgttgtgctattgtgttcgtattcatatttttaattgagtaccatcatttgaagatgttcatgttttatttattttatatgttgagtttcaggtttgatcatgttactcaagtggttattatgtggaatgggtggaagtatatgtctagcacattttatttgggaagaactcttgttgttgccatgcataatgcattcatcatccattgcattgaagtttcatcgtgatcttatggtccgaccgtaccggtacattgagcatcatatgttgcccgagaaggggtatgatgcagcttcatatccttagagatatggaggcaggagtcattattgcatctgtagccatgtgcattcatgggagaggtgtggaatctattatgttgatgtggatgatctggatttttacatggtgattcttctgggtgttaagtaattagttacttgtttacttgcactattttttctctttattacatctcttgtgttgcataagtttagtgggaggagtgttggtaacatccaatgtgtgtgaccagtggggtgttacaaaaagcatacacgacgagaagagtgtgatcgggacgaaagttgtcgttgctccgaagctacgcgcaatggagcttcggctcaatcgcggaaaaaggaaccgacttaaagtggaaaaggctatctagtcctcatagatttttctataagtcaatagtaaatgaaaaggg

SEQ ID NO: 28456 - DNA, 407 bp, Zea Mays
ttaccggtaatcgagttctctggagccggcccacaacgacccgcgacatcacggtgttgaaagtactccaacgagcaattgggggtatcgctggtggatctcctcgcttggaaaggcccgaacaaagtgcgaataatactgttgatccccccatcgcccaccggggaattgacgtcacaaatcaaccggtgacgcgatttgctctcttcctctctctgcttcatggtggcggcctcctcctacgttctcattcacggtctgaggtcgaggaaagctcacggatggattagcggaggggaaaggaggggtcacgatatataggcatgaggaaagatgagctctgcccaatatcgcgattgatttgccgcggcaagcgcggagttcgcgcggcggaagccaggatttgt

SEQ ID NO: 28457 - DNA, 450 bp, Zea Mays
cagctaagaaattagtgaatggtggaaagccaggctagagaaaaatattgaggagcttcgcgaatccaaggaaagatgcttcaaaaaatccttggattgcgtgaaaaatttgaaaaacagctttgcaaaggtaggtgcttactcctctgagaacttcattcgaagccgaagcttttgaggaaattctaaacgatcgtggagatatttgcgctttctccagcgctcgagaattgcaactattttggagaaggctggatgcgatcacgtcaaagctacatcttaggccgaagccgccttctccatagacgacacaaaggacccttcagccgaagcgactttagtgggtggaaagttttattctgatgtatgggtaatcggtggatgagaattggccaacgaaattataaaaaagaatgaaaaagacacccatgatgctcgagaagaagctag

SEQ ID NO: 28458 - DNA, 559 bp, Zea Mays
tttgagcctcgcactttctttcaataatctgcattgttgaatttgtgtgctttcgcgtcatttgttgctggttgcattgtgttcttccaccatttaaaccctagcgccgccaccatctcccgtttgatcacgccacaaaccgagtcaacattgtttccttgtttttctccttcggttacgtcaaaaaaaaacagaaaaaacaaaccgagtcaacggccgtttccttgattttctccttcggttacgaaaaaaaaacagaaaaaaagaaacaaaccgagtcaacgaccgcttacttgtttttctccgtcggttacatcaaaaaaaaaacagaaacaaaaaaaaaggaaaacgaaggagaaaggatacggttgtttcatcccggtcgtttttaaaacataacttgaggtaccttccgtaaaccgggcataacttttcgctcgggtgtccaaaaaatctgaaatttttacaggagctagttgacaacattctgagcccggccaaactgacctttggtctgtttggtttcgacaaaattgtcaaaaaattcaggaaaataaag

SEQ ID NO: 28459 - DNA, 498 bp, Zea Mays
atttttttgacaattttgtcgaacccaaacagaccgaaggtgagtttggccggcctcagaatggtgtcaactagctcctgtaaaaatttcagatttttcggacacccgagcgaaaagttatgcccggtttaaggaaggtacctcaagttatgttttcaaacgaccgggatgaaacaaccgtatcctttctccttcgttgttttttttgtttctgttttttttttgacgtaactgaaggagaaaaacaaggtaacgatgttgcctcggtttttttttctgtttttttttcgtaaccgaaggagaaaaacaaggaaacggccgttgactcggtttgttttttctgttttttttgacgtaaccgaaggagaaaaacaaggaaacaatgttgactcggtttgtggcgtgatcaaaggggagatggtggcggcgctaggatttgaatggtggaagaacacaatgcaaccagcaacaaatgacgcgaaagcacacaaattcaac

SEQ ID NO: 28460 - DNA, 558 bp, Zea Mays
cggcgctctcttcctgcatcgcccggtcgtcctctccctctctgcgtagcgccgtggcttcctcctcccatctccctggtgtttctccaagctccaactcagacctttctccctcgcgctcagcttgaagctccctacccgcgtcatgtccctgtttttctttccctctgcgcgtcctcgcactcccagccgaagcgcgaccctggtcccagcatcgagctcgccgcgcgccatggaactccctgtgtcgagctcgttccctgctccagcctcggctcggcgtttccccggctcggatctccctcgccggtgcgcgtccctctcactgcttgccgcgtccggtcgagcgttccagcgcgccacgatttcttgctcgatgccccctgctctctgcacatcacagacatgggccgctgtgtgcccagctgccctggccctctgctcaaatttttgcagcgccgagctcctcatggcgcgcgtgctccctccctgctcgatcctaagcgcggttttgtcctcagccgagcttcctgtacgcccagcgcgcgcccagccgag

SEQ ID NO: 28461 - DNA, 872 bp, Zea Mays
gctggcgacttgtgtcttctccagccaagccgcgcctagcactgttcgtgtcgccgtcgctcaccgtggaaaccagcttgcccatgctgagctcatgagcgacccgaccgtcgtttctagtgttcggcctcccctgcaagctgctcgcgcctctgttcctggccatggtggtgttgtggcgtagcaacgtcgtgtgtgtcgcggcagccgtcctggcccggagcagtcgatgccgtatagttcgcccgaacgtgacctcgatttactcctcgtgtcgttgctcgtcgagtcctaggcatctgcgcgcacgtcttagttagcgccaaacatattcgtgccgcacacactcatctttgctagctggtcgtgcacctcactccgctgttccgagtccgccagttgccattgctcatccgcgtcaagacatcactcgtcgtggttcatctcgctagttcgtcgttgttccgtcgtctcgatgccagtccctacgtgacatctccaaattgtgatcgcgcagacaaaagaatccccaagaaatatgtccaaagatttgatggtggtgtgcgtgaagttcgtgtggccactgccaagcgctcgacaaattgtttgaatcggaaaatgattaccgatctcgcggattcgagtcagatgttggaatggtatgttgattcgttattccagtcgactaggtataatatttattagattgcctgagtcgtttactgtgatttgatcggtagtcatacatgttgctgatcccttgctttatagtagtcattacattctaagtgatttgcttgggttattcgtttcgagtgaatttaaaattagtgtggtaaacgtgtaatcgacgaaaaacctggattcatatt

SEQ ID NO: 28462 - DNA, 182 bp, Zea Mays
aaaatttgcattgttgaatttgtgtgttgtcgcgtcatttgttgctggttgcattgtgttttagttcgcgatccttctttcttccaattttcaaaccccagtgcgctgccaccatcttccgtttgatcacgccacgtaccgagtcaacaccgcttttacaaaaaaacagaaaaaaggaaaac

SEQ ID NO: 28463 - DNA, 738 bp, Zea Mays
ctcatttgcatctgaagttttgtcgtgacctatggtccgaccgtaccggtacaacttagcatcgtacgttgcccgagaaggggtacgatgcagcttcatacccttagaggtatgaaggcagaggacatatgcattgcattcatatgcatacattgaagtgatatttgcagatgatgtggttttataccctcagaggtatgaagatagatgacctacacattgcattcctatgcatacattgaagtgatatttgcaggtattgttgatgcagggaagtgttatacaacctattgtggttgttcgaggaaatgagatggtattggttatattgtgactactgagttctatatctacaagtatttctgatcttgattgtgattcttttaaaatgttgattaattcaatgtggtttaaatatctcgtcaaaacaattagcttgctgagatgtttcatctcacttttgcattactcaatgcaggtgcttgttgctcatcaaggggagtgggaagtagcagcacatacaccttcactctcataataacgctgcccagacgtagtcatgatttaattagaaacttcttgtcaaaggatgtttgtttttaactagtcgtgcgcactggttaattcagttcatgccgttatggtcgtcttcccattgctagcagattattaatgtctattatgttttcttatcatgatatctatttatactttgttgcttccccgtttatgcaattt

SEQ ID NO: 28464 - DNA, 380 bp, Zea Mays
gagcctaggcacaaaggtagtcactgaaaaagaacaactagcacagcacaaagagaaacaacagatttagagattcagcccccttctttcttcttcttttcctttttttcttttctttttttttcttctttttttgcaggggcctaaacccttttttcactatgacaacccaaacaataaggatattgctaacaacccctttaaatcagatttaacaaatcttgttaatatagaaagtccagaaatctctacgatgattgcggagcgctcagaatgaattatgagacaaggtcagatccgttggaaagaagataagataagctttccagattgtatttaaacttccaaatcggacatgagatgtatccgtggtggcaaaa

SEQ ID NO: 28465 - DNA, 636 bp, Zea Mays
atctcgagtccgtgttctcgctatttaatttgtgacgttttagttgtcatatttccatcttagatcatgcccttgtttgattggcacaagctgatgtcccttatccagtttgcctgttcttaagaatcgccatgttgctttatcaatctaacctaggaagacatgtccaatcattttctttaatttggtgcctttggtttcctcatatctatcgaaggcatgccaacttgattttatgattattttcccccatatctaatcagatactaatccttgaccttgttctgtagcatcccaaaaattcaaatcttgaaattttctcaaactcgctctaaattcaaaatgaatttcaaatttcatttcaaatgtttgtttgtgagttgatatcaacaaataaattatagtggtctatattctctccaaaatcctcctcaaaatatcctacaaatatttcccaagtgatcaccctcaaattcttttctgaaatactgcccagatatttctccagtgatccccctcaaaatcttccagaaataccgcccagatatttctcgagtaatccccttcaagttctttccagaaatactgcccaaatattctaccgatatatctccaaatattttcctcttgagaaat

SEQ ID NO: 28466 - DNA, 223 bp, Zea Mays
cttagatcttgtggatagaggttgtcttttgcattaaggcctagctcaggagttattctgaggaaggatgacttctacctgcaagaatatttttattgggagcatggtaggatcttactgtaaagttccctataatgttcttttcatcctaaggaacacaaaataatcctaaggatggaaatacttaaatcgagacttgggttaggaacaggtgatgttctac

SEQ ID NO: 28467 - DNA, 174 bp, Zea Mays
gtaactcttctatacttcttattgaggatggttaattgagctagcatatatattccaaacttatagataatttataatatttcaaagtttatttctttgaatcacttttgtaatcactctggtaaatataatgtaaacttgatgtaacttgtagaatttggtaataagatttcc

SEQ ID NO: 28468 - DNA, 242 bp, Zea Mays
cttatcccagcacccttttgagcctcgcaccttctttcaataatctgcattgttgaatttgtgtgctttcgcgtcatttgttgctggtcgcattgtgttttttctcaccatccttctttcttccaccattcaaaccctagcgcgccgccaccatctcccgtttgatcacgccacaaaccaagtcaacaccgcttccttgtttttctccttcggttacgtaaaaaaacagaaacaaaaaaaag

SEQ ID NO: 28469 - DNA, 328 bp, Zea Mays
ggcagcgcaaggcatcgccgattgggccggatgggaggagaagaagtgggccgcggcggatgagtatgtgggccgaccggtttcagcccacagagatgaggggatcttttttttttcttttctagtttctattttctttttttatattttatttttattttcaagtttcaatttcagaattctgatttaatacccaatatgcaacattccaaaatatccagcatgaaaatgcaagtcacttttatttgttatttattactttatcccttttgtaaatacttcgcgatgtacacgtttatatatatatatatgaaaatatgtagttcac

SEQ ID NO: 28470 - DNA, 401 bp, Zea Mays
tacgtgatgtgcgccactccaccgtgccccggatatcgtgcttgttatggtcggctctggtggtcggcatcgccaccctgtctgcccccgccaggccctcagacccactatgctccagctgtacggcatcgctagctcttgtgcctttctgcgcgcgtgccactcattaccgcgtcgtcatccagctcgtggtcggctttgtcgtgattgctgtgcattgctcgacaccctgccatcatgtctacaattgtgtctaccatcgtcgtcaagttccttttgtggttgcctcgcctgcgtgtgtgtgggagtgaggatggagctatggttgaagaagaaagtgaagtttgaaagcgacgctcgtcatggacctcgtcgacccacgttgtgtccacgacgtgctc

SEQ ID NO: 28471 - DNA, 347 bp, Zea Mays
cttggccgcccctccccctttccccttggttggtcgtcctctcctcccatggcagcccctctccacggcttcttcctccctctagatctccccccacgcagcaaggatcaagaagagaaggaacacattgaattgaagagggagagaggatcaaggagatgttcttccccatctcttcttgaagatattcttggggaaacctaggtaaggataagatccatgttcctccctgtaattatgtgtttttggaggttgtgaatcacggggattgaaggattagaggttggattagatggggggttagttttttatctcgaaattagtttctgcagaatgacagattcgac

SEQ ID NO: 28472 - DNA, 1509 bp, Zea Mays
aaaagttcttacagccagtagaatttcatgatttgtggctgagtagtttgtgagatatcgaattttgaaattaactatgctgctgtctgaaacagattcagtcagttatcttgtcagatattttagaacttatagatagctgaatttaattatccattgaatactgaagttgtagagtattttgtgtagatactcctagagtatttgtttgatatcaccactgttataattttaaagatacaaaattaacaaacagcgctgctgatgtatggcatgtggttcagggtgggagtctttccaccaggtcttggtttccagtgtagaagcgaattgttgattgttggcaaatgtttgtgaaatatttgtactaagttttatgcgcgctagcaggtggctacactccagatcatgcccagtacatttttcttcttcgatgaaggcaagtgaatgtagcggtggttgctaccgttttgacctgttacttctatcgcctacactctaataatattggattcttttataattgaactatatgataatgttttacttgattgtattatattgatgttctatcatatattaatgatgattatggttcgagtatgacccatgagattaattcacacccctgaaggcagatgaagcattatttgaggttggtattgtatctgaaggcagatgaagtattatttgaggtttgtattgtatctgaaggcagatgaagtattaattgaggtttgtattgtatctgaaggaagtgtagttaattgataaatgcatcatgccatatacattgcatgactcatttgcatctgaagttttgtcgtgacctatggtccgaccgtaccggtacaacttagcatcgtacgttgcccgaggaggggtacgatgcggcttcatactcttagaggtatgaaggcagaggacatatgcattgcattcatatgcattcattgaagcgatatttgcagatgatgtggttttataccctcagaggtatgaagacagagcacctacacattgtgttcctatgcatacattgaagtgatatttgcaggtattgttgacgcagggaagtgttgtacaacctattgtggttgttcgagcaaatgagatggtatttgttatattgggactattgagttctatatctataagtatttctgatcttaattgtgattcttttaaaatgttgattaattcaatttttggtttaaatatctcgttaaaacaattcgcttgctgagatgtttcatctcactcttgcattactcaatgtaggtgcttgttgctcatcaagggaagtgggaagtagcagcacatccaccttcactctcataataacgttgcctaggcgcagtcatgatttaattagaaacttcttctcaaaggatgtttgtttttaactagtcgtgcgcactggttaatttagttcatgttgttatggttgtgttcccattgctagcagattattaatgtctattatgttttcttatcatgatatctatt

SEQ ID NO: 28473 - DNA, 346 bp, Zea Mays
gcaggacagagagggcacaagtcggcagtgcccagtgtactatgtcttcgaagtccccacagcttctaagtgcaacatgactgaactagaaaaaatttcatacgaagttgtcatggcatcgcacaaactgcgacactacttcgaggcattcaaagtacgggtcacttcggacaggggtctgggagaattgttcaggaacccggaggcatccgccagaatcgccaaatgggcagccgaactctctgggtaccacatcaccttcgaaccccgaacaacgatcaaatcacaagtcctggcagacttcatcgtcgactggacaggaccagcatggccacaagaagagtcc

SEQ ID NO: 28474 - DNA, 456 bp, Zea Mays
cgcgaagtccacagcggaacctgcggctctcactcaggacccagggccctcgctgccaaggtgattcatcatagattttactggcccacaataatttgcactgccaatcgagtcacaaggtcatgcgaagcatgccataagttctctcctcgctcaggccaccctttgcaattcaccaagctcatcgcccatacatggccacttcaacgctgggtgctggacatcgttggaccactgcccacagctcaagagaatctcaagttcaccttcgtcgccgttgaatatttcacaaagtggattgagaccagggaactctccacaataacatcagagaccacccaaaaattcttctggcaaaacattgtctgccgcttcggggtcccatctgaactcacagttcaacagccaagacttcagggaattctgttgttccatcggtaccaagcctgtcttcgc

SEQ ID NO: 28475 - DNA, 356 bp, Zea Mays
caggttatgcatagaccggggcttgccttctaaagcagcggcaggcagatcctctggtgcaggctctggtgctggatccggggctacctcctgagcagctccttgctccggcacgaggacattctctccgtcagcgaggttgcagtctatcaaaatgcaatgaatatgtatgtcatgattatgcaggattaaacaacattatgctaaaggaaggaaaactaagttagttagtaacttagggtttcttggtcatacgtggcctttagtggtttatgcttatcattctaggtttaggtttggttgagaataagcatagtggatttgtattttccccttacatatttcagtgggcaatt

SEQ ID NO: 28476 - DNA, 231 bp, Zea Mays
cagccttgcttgtgacacaatttttgcaggtacgctataggacatggttgatggtgtgacttggccttccaccctggcaccgggttggacggtcgagtgggatgctgctccggcagaagaggatcaggaggagtagtgggccaggccttgccctattcctcggcattcgacgttaccgattatgtgctgcactttatgacgaacttgttcccttacatttaaaactccgat

SEQ ID NO: 28477 - DNA, 778 bp, Zea Mays
ccaccccctcccctattcccctttgtggctgccaccccctctctctctctccctctccttcctccccaagtgattgcagcaccacccctcaaccctagccgccccccctcctcctctccatggtgcagtctcccctcttggtaccccgtcgtgtgggtgcgagtcttccattggagtttggagggaggaagaaggaagaaaggaaggaggaaaggaggaacccaaggtgattttaagatcattctttttagtatttgtgctgcaatccaattaattacatgtttacctatgcgaatcggtataggtgctgtccagatttttgtgggaggacgaacagcattagtattagcagattctggggatttttcgtaggaaattagtgataatcaatatgataatcatgtagagctttttcatacctttccaacgagtacttatgcgctcgattcggagttgtaatttaggagataccgctgtttgaatccggttatgttgctgtccaaaaaaaacagatttttcaggtgggtgaacagcaatagtattagcagtttctgggaatttttcgtgggtaattagtgttaaacaatatgataatcatgtagggctttgtcatacctttccaacgagtacttatgcgctcgattcggagttgtaatttaggagataccgctgtttgaatccggttatgttgctgtccaaaaaaacagatttttcaggtgggtgaacagcagtagtattagcagtttctgggaatttttcgtgggtaattagtgttaac

SEQ ID NO: 28478 - DNA, 755 bp, Zea Mays
gaagtatttttttttgaatcgcgttatatgaagtgttgtaggcatgacatgctcatcgcatcatccatcttgcattttgaagttatgtcgtgatcttatggtccgaccgtaccggtacatttttagcatcgtacgttgcccgaggaggggtacgatgcggcttcatacccttagaggtatgaaggcagaagtcatccttgcatttgcagacatttacactcatgaggtatatatgaagtgtgacattactatgttactattgtggtttctacctgcgaggtgtggtgactaggtgtgttgtgcgttgtatacgtgctgcaccttcgtaataagaaggttgtggaatcaagtggtggtaaaacaatgttcttatgttgttaaacagtttgatattattttacttgctgaggtgtgtcatctcactcttgcattactcaatgcaggtacttgatacatgttgggaatgaggggagtagcagcacgtccactttcactctcacaataacgctgcccaggcgcagccatgatttaattagaaacttattgtcaaaggaagtttgtttttttacctagtcgtgcgcactagttaattcacttcatgtcgtatgtttaacttctctttgctagccgattaataatacttagtatgtttttgtcatgatatatgtttatacactgttgccccctcatttatgcaattttgcaaggaggatgctgccgaaattttatatatagatgtcagaagtgttgtttag

SEQ ID NO: 28479 - DNA, 699 bp, Zea Mays
ctccttggcttgatatttttatggactttgttttgggcttgcctagaactaagaaggggagggatagtatttttgtggttgttgatagattctctaaaatggctcactttataccttgtcataaaactgatgatgctagcattgttgctgaattgttctttatagaaattattcgtttacatggtattccaaaaacaatagtctttgatcgcgatgctaagtttctaagccatttttggagatctctttggaataaattgggaactaaattgctgtttagcactacttgccaccctcaaactgatggacaaactgaggtagtaaatagaactttatctaccatgcttagggctattttagacaagaaatttacaagaatttgatggacaaactgatggattgcttgcctcatgttgaatttgcttacaatcatgccacacattcttctacaaagatgtgccctttccagattgtttatggttatatccctagggcacctattgatttgatttcacttaatgctgcgtacgccccacatgtagatgctgctgcacatgttgaacaaatgattaccatatatgaacaaacaaaacagaacattgctgctactaatgcaaaaaatcaggttgctggtagtaaaggaaaaaaacttgttacttttgagccaggtgatatggtttggttgcacttgagaaagga

SEQ ID NO: 28480 - DNA, 324 bp, Zea Mays
cttttcggcactcgatggtgcgttctcagtttttacatttacatcttttgggggattttgctcttatagagctaaaaaaaaggaaattacatgtggtggccccattaaaaacctttctcccccttcagaaaggaaaagggtgccatgaaagaaaaaataaaaaaaaataaaaaattacatcaagttatacgtaatatcgccgaagctcatccgcattccaagatctaggaatgtcgttgccgtccatatccttcaatctgtatgaaccgggtcttgacgaagatactaccaaaaaaggtccctcccatttcaactgcaacttgc

SEQ ID NO: 28481 - DNA, 163 bp, Zea Mays
caagatttacctctagatagggctaagcaatttttgtaaacaatatttgatacttcaccagaagtatctataaaaggaatggatttcaaggtagccaatgcatcaaaaggtttccaagcaactcctataaacctaatgcacatttcgctagacttaaagtgtg

SEQ ID NO: 28482 - DNA, 289 bp, Zea Mays
cgacgtgcgcacagattctagggactcgatgagctgggcagagcagagagccaacccccgtgttatgttaacggcagcgcgactcaaatgagaccccgtgtctgtacatgccgacagcatggacgagcagacataacacggagggtgcgagtctgctaaggacgcgacaggaacagctctgcgggcaggacgcggccaagcatcatggcgtgacggggaaaacacaggcgaggtgctggcgctgacgagctggattccatggcagtcgacaccagaaattgcgatgatg

SEQ ID NO: 28483 - DNA, 196 bp, Zea Mays
ttttttgtttgttctctagttctatcctttctctttcgttttcttttttttctttttttgtttctgtttttttacgtaaccgaaggagaaaaacaaggaagcagtgttgactcggtttgtggcgtgatcaaacgggagatggtggcggcgcactagggtttgaatggtgcaagaatgaaggatggtgaaaaaaaac

SEQ ID NO: 28484 - DNA, 431 bp, Zea Mays
cttcacacaatccaaggatttctcaaagcacctttccttggattcgcgaagttcttcaacatttttttctagcttatttttccaatactcactaatctcttgattagcctgtgcgagcgcgcagttctctttagcttcagccagttgtctccgaaggtcttcaatttttgttttctgggcttgggcctgagctttgtaattagtttcgtcttcctttactttgttcaccaatgaaatcaaaattttgtcattctctagaccttcgtttctcagttcaatcacctcagagcgaaggttgttaagagccattgtacaactttcgtcttcggcgctcttctaagccctcaaggcattactaagaattaagtcatgcaaaagaagaagaaaaagttgagcatggcaataaaatacttcattttctagcttcaaag

SEQ ID NO: 28485 - DNA, 1202 bp, Zea Mays
ccccagcgctggacactgccactgcccgtccttcacttgacaccacccatcttggagctcgccttccctgctccccctagcctccctccacgcgcacgccaccgttgctcacctcccagtagctccgctgcatctgcctgctcgaccccgtcaagccgacgaacgcctctgtaagctccctgttcgccgcttcagtgaaccatcaccgcctcgccgtggagctcgccggccaccgcggcatcctcagctcatgcacgccgccagcagctaggcctctacctgtgcgtctccctctactacctcgccggctagcttgctctaagtttcgccgttcatcatgcaccctcgccgacgagctcgggggcccttctcgtccgtccgtaggttccatggagctcgcccaggtcggcgttcgtcctctccctcaagctcatctccatggccgcgtcaagctcttccccacagcagctggcccgtcgtcgttcttctgttccttaccatgctcagctgttcgtcctcgttggtgaataagtagaacggttaaatatattagttgcgataatttccttgtcgtggttaggatgcattgtgactatattagatatttgctgatgtgtcacatatgcaatgtatatttgaattggtgacgtgaaggatatgtctggtattttatttattggctagccatcatatttttcaggattatgctagttttatttattgagaggtagtcgatgttcggctctaatagtcattattttcgatgttcggctctaatagtcattattttctatgttcggtgaccgattaaatgtcttagggtgatgagagagtaaattagacaaggaatgcttaggtagacgtgtaggtatggtacacttgaattaattataggtttacgacatgaagtataaatgaagtataacgatgatgcgtggaataggtttagtgttttcaatggcaagctgatgtgttcttctcgagtagccgattctattggtttgaggaaagactccaactagaacccactattgatgccgtagtttcgagtgaatttagtattagtgcgatatttaaagtgtgctcgatgaaaaccccgaattagtattcgttaatcgatgtagtgtatttgagctgaatttattattggcgcatatttttgttagccgaattgttagatagattgaataaatatgagtgat

SEQ ID NO: 28486 - DNA, 348 bp, Zea Mays
gtacgctagctgagaatcgtacggagaaaaggacaatgaccaaagctgagtcgaccacaagatgtcactacgcgtaagcttccccacaagacgatgtcgtcagtcagaccaacctgaagatggataatctgaacgagtgctaagacaaaggatggtcgccaagtggatatcatataactaacactaacctagtgtttattctaggcaagccccggtgcatgcaaccccttccttatgtttttaaatgttttttacacactttaaatctagtgaaatgtgcattaggtttatagtagttgctcggaaaccctttgatgcattggctaccttgaaatccattcttgttat

SEQ ID NO: 28487 - DNA, 85 bp, Zea Mays
tgaaaatattcttgcaggtagaagtcatccttcctcatgataacccctgagctaggcattaatgcaaaggacaacctctatccac

SEQ ID NO: 28488 - DNA, 720 bp, Zea Mays
aatggcttgaggcttacacaaatttcacaatcggatgttgtgagaaagattatcagtgtcctcccaattgacaaatatggacacattgtcacagtgcttcatcaaatggatctttcagttgccactcctacacagatattggaaagatcaatgctcatgagatgtatatgcacatcaatgtcaaggatgagtcatcttccaagagaaaggattttggctcttaaagcaaatcaagaaagaaaaagacaagctaaagtacaaattgaagaggaatactcaagtgatgatgatcttgatgctaacattgccttgatggtgaggaagaccatcaagatgctaaagaagctcaacagagaaggcatcaaatttgactcaagaaagaagaaatttttttccagcaaaagaaaacccatttctgaaatgtattgctacaactgcggtgagcttggttatcttgatcatcaatgtaacaaactcaagaaaacaagttcaagggcaagaaagaagatgacagtgatgatgagaaaaaggaaaagagatttttagaggaaggatgggaagcacaagaggttccacaaaaagaaaaatgtaaaggcatacattgttgatgactgactcactgacattaagttatcaagtggatcttcttcaagtgaagaaaaaaatgatgaaaaagttaccgccatcgctggggactaatctttaccaccaccatcacca

SEQ ID NO: 28489 - DNA, 746 bp, Zea Mays
ctactgggttattcatcaaagtcgaaagcatatcgagtattcaatcatgccacttgcgtggtagaagaaacatatgatgtggagttttattagactaatggctcccaaggagcacttgaaaatcttgatgatgtaggtgatgatccatttagggaagccatgaagaatatgccaattgaagccatcaaaccaaaagaagatgaagaagaggtgcaaaacattgacatacctttttcatcaagtgtaccataagatgatgaaaaatatgagaggtatgcaaataaagatacatttgtctctcataaacaagcaagggtacaagccgaagatgttgatgctccaggatcttctttccaagtggttgacagaagaaactcatcactacttcaagcacacccacaagaccaaatcattaggagtccttcacaagtggttattactcgatcacataaacatgcttattttattgaacatcactcctttgtttcttgtgttgagcctacatgtatagctgaggtgctacaggatccggactgagtgaacgccatgcatgaaggactaaacaacttcacccgtaaccaagtttggaccctggagaagccccacaagatgcaagggtcattggaacaaagtgggtgtttagaaacaaataagatgatcaaggcgtgattgtgaggaacaaggcaatacttgttgcaaagggcttctcgcaagttgaaggcttagattttggagagacctttgca

SEQ ID NO: 28490 - DNA, 667 bp, Zea Mays
atcttctccacacccataatgagtggactgattagtttctttgcatattacgtgttagcaggcactttgttctcttttggaagcaattctgcgataatactcaagaacacattgaagccagcatcagacatactatatctagcttttaacatctatagctttagcacacaccgaagcatcgtgaactctttggcacaactcttggactcatcgtacaaatgctcttttgttgccttcttcagggactccatacctttcatgaagaacatcgatggatctgtatgatgatgcaatattgcctctaacaactatgcatcttcctcatgcataacatttggcagaacatgagttctatcacgttcatttcctctagcactggcactacatgttcactctgtggaagaggttggtgtgtctcgtgaatgaactgaatctgtcatcgatgttctcatggtttccagttgtataaagcgaagtgctactctctccatgctttgtccaaattatgtaatccttcacaaatcctcggcataccagatgagatatgatttgttctgtgtcatcaaatacaacaacattattgcagtccatgcatggacaatatgtgtgtttttgtctttgttctcgaagcatggttcgtagcgacatcaataaatctatggacctc

SEQ ID NO: 28491 - DNA, 451 bp, Zea Mays
atgaatggattaacgagattcccactgtccctgtctactatccagcgaaaccacagccaagggaacgggcttggcggaatcagcggggaaagaagaccctgttgagcttgactctagtccgactttgtgaaatgactttgagaggtgtaggataagtgggagcctccgggcgcaagtgaaataccactacttttaacgttattttacttattccgtgggtcggaagcggggcaccgcccctcctttttggctccaaggcccggcctcgccgggccgatccgggcggaagacattgtcaggtggggagttaggctggggcggcacatctgttaaaagataacgcaggtgtcctaagatgagctcaacgagaacagaaatctcgtgtggaacaaaagggtaaaagctcgtttgattctgatttccagtacgaatacgaaccgtgaaagcgtgg

SEQ ID NO: 28492 - DNA, 353 bp, Zea Mays
gttaaactaactcttaataaatttgcgcaagagaaatttattcattaaaacatatatttggtgtgtataaaatatacacttagaagtatttgcttaaatgaataatgcaatgaatataaacaaaataaaccttgcactcatgcttggagttttatctatgcatttaaagttaaactcaaactttgatgagaagttgaatccaaatgaaatctgaaattgaatttaaatagagaagatagaatgaaaataaaaaatagaaaaaaaagtaaaagaaaaaaggaagaacctatcaaggcaaaaactagctctagtcggtctaagaagcccctctgcgcgcccttcagacaccgtag

SEQ ID NO: 28493 - DNA, 238 bp, Zea Mays
ccccccatttctccccctcctcccaatgtgcagccctcccgtgtggttctccgtcgtgtggctgcgatctcaattggagtttggagggaggaagaaggaaggaggaagggaagaacctaaggtgaatttgtgattaacttttgttgtttttgtgctgcaatcaattggattatgtgtttatctttgcgaatcggtagaggtgctgtccaggaattttgtgagtgggtgaacagcagta

SEQ ID NO: 28494 - DNA, 250 bp, Zea Mays
ctcccatcttcttcctcctcaaacctttgcagccctcaccacccaaaaccctagctgcccccccccccatttctccccctcctcccaaggtgcagccctcccgtgtggttctccgtcgtgtggctgcgatctcaattggagtttggagggaggaagaaggaaggaggaagggaagaacctaaggtgaatttgtgattaacttttgttgtttttgtgctgcaatcaattggattatgtgtttatctttgcg

SEQ ID NO: 28495 - DNA, 538 bp, Zea Mays
cttgcatttgcagacatttgcactcatgaggtatatatatgaagagtgatattactatgttactattgtggtttctacctgcgaggtgtggtagctaggagtgttgtacgttgtatacgtgctgcacctttgtaataagaaggttgtgaaatcaagtggtggtaaaacaatattcttatgtggttaaacaatttgatattattttacttgctaagatgtgtcatctcactcttgcattactcaatgcaggtacttgatacatgttgggaatgaggggagtagcagcacgtccactttcactctcataatagcgctgcccaggcgtagccatgatttaattagaaacttgttgtcaaaagaagtttatttttttgctagtcatgcgcactggttaattcagttcatgtcgtatgtttaacttccctttgctagccgattaataatacttggtatgtttttgtcatgatatatgtttatacactgttgtcccccccctcatttatgcaattttgcaaaggagatgctgccaaaattttat

SEQ ID NO: 28496 - DNA, 659 bp, Zea Mays
cacaattcaattgagcgcagtacacaattgtatttactcacaacaaaacacaagcttttgaatgttttttacatgtctacaagacataaaattggaaaagtttttacaacagttcaatcatcttatctcagaaccttctcaacagctacgtttagcaaagtattaacaacttgaattcatcaaggattccccttagtgatggatcagctttgggatcatacgattctaggggtggatgtcacacccggatttaaggggtaaacccgggtgcgtctcatatgtgcgccaaagaagaacaacacatataatgaccaagtgtatagagataaatgtcacaaacattattacatagaggaagtgtcttacaaaaataaatgataaaaaataagtgaactaatattatttccttggcgctaataatctgactgggagacgccacctagactttatcaaactcttcatagtagtcctcctcctggtctacctgctcttcacctgtggggggatttatatatcgcaagggtgagctcacaaaagttcatatctcaacatgtgtggggaataatgtgcatgagctcaccaaaagtgggggctaatgtgtagtgttaggctgatcaacaaataatggttaaggcaaagcattgcttttaataagttag

SEQ ID NO: 28497 - DNA, 688 bp, Zea Mays
caacatgctctatggatgaactagcagaatttgcttcttctaagttagcatttaaatcaacatttaaattcttaagcttagagacatagtcattacaagcagataattcagatgtcaatagttcattcttcttagtttctagagcaagagatttttgaacactaatgaacttatcatgttcctcatacaaaatatcttctttcttttctagcaatctatccttttcattaagagcatcaattaattcatttattttatctaccttagatctatctaatcctttaaataaatcactataatctatttcatcgttagaagattcctcgttgctataagaagaatatttaggaatatctcgaatacgtactgttgggggccttcgtccttcgaaggtcctcaaaaatgtgatttaacaatattttccaagtgtgacatgtaaacaggtaccttcggactcgggtcaaaagcatatataatatggaaagcatgattgggacgaaggttgagtcaatccggaagctatgtgcaagaaagcttcggccaaatggcagaaaaaggaactgacttaaagaggaaaaggctatctagtcctcatagaatcgtacataagttaataataaatgtaaagggcataaatgtaatttctcacaggctgcgttctgtgcctataaatagatgaacagtaccc

SEQ ID NO: 28498 - DNA, 216 bp, Zea Mays
aaaattcctggacagcacctctaccgattcgcaaagataaacacataatccaattgattgcagcacaaaaacaacaaaagttaatcacaaattcaccttaggttcttcccttcctccttccttcttcctccctccaaactccaattgagatcgcagccacacgacggagaacctcacgggagggctgcaccttggaggagggggagaaatgggggg

SEQ ID NO: 28499 - DNA, 322 bp, Zea Mays
acaatgttcttatgtggttaaacagtttgatattattttacttgctgagatgtgtcatctcactcttgcattactcaatgcaggtacttgatacatgttgggaatgaggggagtagcagcacgtccactttcactctcacaataacgctgcccaggcgcagccatgatttaattagaaacttattgtcaaaggaagtttattttttttaactagtcgtgcgcactagttaattcacttcatgtcgtatgtttaacttctttttgctagccgattaataatacttagtatgtttttgtcatgatatatgtttatacattgttg

SEQ ID NO: 28500 - DNA, 1448 bp, Zea Mays
ggcaagtaaatacagtggtggttgctaccgtttgggttgcatcctattccctgacattgagtatgcataagttttaattatgttaatcattgaattctatgatgaagtttatttgtttggaagtattaattctcaattgtctaatattgtggatgatcataatttggtaatgatatatgtggttgattcccatcttggatgaagttgaagtattttttttgaatcacgttatatgaagtgttgtaggcatgacatgctcatcgcatcatccatcttgcattttgaagttatgtcgtgatcttatggtccgaccgtaccggtacatttttagcatcatacgttgcccgaggaggggtacgatgcagcttcatatccttagaggtatgaaggcagaagtcatccttgcatttgcagacatttgcactcatgaggtatatatgaagtgtgacattactatgttactattgtggtttctacctgcgaggtgtggtgactaggtgtgttgtacgttgtatacgtgctgcaccttcgtaataagaaggttgtggaatcaagtggtggtaaaacaatgttcttatgtggttaaacagtttgatattattttacttgctgagatgtgtcatctcactcttgcattactcaatgcaggtacttgatacatgttgggaatgaggggagtagcagcatgtccactttcactctcacaataacgctgcctaggcgcagccatgatttaattagaaacttattgtcaaaggaagtttgtttttttaactagtcgtgctcactagttaattcacttcatgtcgtatgtttaacttctttttgctagccgattaataatacttagtatgtttttgtcatgatatatgtttatacattgttgccccctcatttatgcagttttgcaagggggatgctgccgaaattttatatatagatgtcagaagtgttgtttagtagcattccggggtgttggtggaccccggggtgttacaatcctgaaggtccaatggaatggatcagtcacgaagcagaggccttcgaggaaattctaaacagccgcggcgacatctgcgctttttcgggtgctagagggattgctactgttttggagaagaaaggctgcgagcatgtaaaatccttagcgcagtccgaagctaccttgtccactgaagacattaaagacccctcacccgaagcaagcatggtcggtgggaaattcttcaccgatatctgggataacggcggccgagaattggcgcaagaaattattcaaaggagtgaaaaaggcatccacgatgctagaaaagtagcggaagctgccaagaaaagtatagagcccgaagggcacataggtattaattagtggtttttatcatgctgtaatttttaattccagactctgttcttcggattgtaatagtaatatagtcgtatcttttctt

SEQ ID NO: 28501 - DNA, 320 bp, Zea Mays
taataataaaataataattctaaaggttgaattgaatccctaaattaaaatttagggtttttgaaagtaagaagtgaaatgatatgaaaaaaataaataatataaacatattcctaaaaattgtattttacattccataatatgatttgataacaaatttgcacaaggtttgagagtaaattcaaattcaaatttaaacctagaagagaagaagaaagaaaaaagaaaaaaaataaaagaaaaagagcttacctgggccggctagcctcatttcggcccaatgccccctcaccgctgcgtagcccactcggaggatggcg

SEQ ID NO: 28502 - DNA, 2157 bp, Zea Mays
cataattctgtgcagaacctgttctcttaagagttaggcaattttatcaacagaattaaactgtgagttggtaaaagaagttgtagataatttcataagctttccagattgttaaaaagtgcatttatatgatttgtgaaactccagttatgtttgttttactgtggctgttcctgtttacctgacagaaatgagtgggtctgttcactgctgggtttcatctagtaaatggccgaattgactcttccaactatggagacttttgtagagggataaaagttcttacttccagcagaatttcataatttttggttcagtagtttgggagatatcgaattttaaagttaaccatactgctgtctaaaacagattcagtcagttatcttgtcagatgttttagaacttgtagatggcagaatttaattatctattgaatactgaagttgtagagtattttgtgtagatactcctagagtatttgtttgatatcactgctgttttaattttaaagatacaaaattaacaaacagcgttgctgctgtatggcatgtggttcagggtgggagtctttccactgggtcttggtttcaagtgtaggagtgttttgttgattgatggcaaatgtttgtgaaatatttgtactaagttttatgcctgctagcaggtggctacactccagatcatgtctagtacatttcttcttcttcgatgaaggcaagtgaatgtagcggtggttgcttttgttctgacctgttatttctattgcctacactctaatattcagaagtattggattctttcataattggactctatggtgatgctttacttgcttgcattatactgttgctcaatcatatattgatgatgattatgattcgagtatgattcatgagattaattcacacccctgaaggtaaatgaaatattatttgagattggtattgtatctgaaggtaaataaagtattatttgaggtttgtattgtatctgaaggaagtgaagtttattgataaatgcaacatgccatatacattgcatgactcatttgcatctgaagttttgtcgtgacctatggtctgaccgtaccggtacaatttagcatcgtacgttgctcgaggaggggtacgatgcggcttcatacccttagaggtatgaaggcagaagacatatgcattgcattcatatgcattcattgaagtgatatttgcagatgatgtggttttataccctcagaggtacgaagatagagtacctacacattgcattcctatgcatacattgaagtgatatttgcaggtattgttgacgcagggaagtgttatagaacctattgtggttgttcgaggaaatgagatggtattggttatagtgggactactgagttctatatctacaagtatttatgattttaattgtgactcttttaaaatgttgatgaattcaatttgtggtttaaatatctcgtcaaaataattcgcttgctgagatgtttcatctcactcttgcattactcaatgcaggtgcttgttgctcatcaagggaagtgggaagtagcagcaaatccaccttcactcttataataacgctgcttaagcgcagtcatgatttaattagaagcttcttgtcaaaggatgtttgtttctaactagttgtgcgcactggttaatttagctcatgccgttatggttgtcttcccattgctagcagactattaatgtctattatgtttgcttatcatgatatctatttatactttgttgcttccccgtttatgcaattttcaaaggagatgctctcgaaattttatatacgaatgttagatgtgtagtttagtagcattctggggtgtttgtggatttcggggtgttacaagtagcgtatcaaatatagctgatatgacgaagggcattaacatttaacattctgtgttgccttgttcttatctcatagcatttgagaacaagtccacaacatcgactataaaaactatccccaatcgagcaatagatcccacactaattcaacccaaaagtctagccaatgtcactggtgaccaatattcagtcatcaaagtgactgacagcccaactttgagcttatttttctccaaactttgtatgtgatcaaagcttagttacttaagcaaagttgttc

SEQ ID NO: 28503 - DNA, 438 bp, Zea Mays
ctgacatctatatataaaatttcggcagcatcccctttgcaaattgcataaatgagggggcaatagtgtataaacttatatcatgacaaaaacatactaagtattattaattggctagcaaagagaagttaaacatacgacatgatctgaattaactagtgcgcacgactatttaaaaaaaacaaacttcctttgacaataagttctaattaaatcatggctgcgcctgggcagcgttattgtgagagtgaaagtggacgtgctgctactcccctcattcccagcatgtataaagtacctgcattgagtaatgcaagagtgagatgacacatttcagcaagtaaaataatatcaaactgtttaaccacataagaacattgttttaccaccacttgattccacaaacttcttattacgaaggtgcaacacgtatacaac

SEQ ID NO: 28504 - DNA, 788 bp, Zea Mays
gttttgtatacaatttataattaaattctaacatctaattagcccaaaacagtccacaatatgaaccctgtaatctgttttttttttgtcttttggacagcgacatacccggattcaaacagcgatatcttttaaaatataattccaaatcaagcgcataagtactcattggaaagataagacaaatccctacatgattatcatactggttaacactaattacccacgaaaaaatcccagaaactgctaatactactgctgttcacccacctgaaaaatctgtttttttggacagcaacataaccggattcaaacaacgatatctcctaaattataactccgaatcgagcgcataagtactcgttggaaaggtatgacaaagctctacatgattctcccactgatccccactaatttcccacgaaaaattctcataaatccctagaactactgctgttcgtccacccactaaatttctggacagcacctctaccaaatcgcataggtaaacataaaccaattggattgcagcataaatacaacaaaatgatcacgaaaatcaccttgagttcctcctttcctccttcttttcttccttcttcctccctccaaactcccatggaagactcgcacccacatgacggacaccaagcggggaggctccaccttggagaggaagaggtgggggcggctagggttgaggggtggagctgcaatcacttggggaagaaggagagggattggggcggctgcaagagtggaagagaggaagagagagggggggcggc

SEQ ID NO: 28505 - DNA, 413 bp, Zea Mays
gtgaagtgttggtgggccgaggcgtgctgagtgggccgaatgggtggagttaggccgagcgcagtttttttttccttttttgttttatgttttcccttttctttttattttcaaatatataatttgaattcccattcaaattcaaactttgtggtaaatttgttttctcatcacatgttcaacttaaacatggcatgggtgcacttatttatttttaatatttattttgttaaatctagtgctttgttttccccaatttctagtattccaaattgaggttaaatgcccatctcaactttagtatatttcttttatcattatcttcatgagtgaatgcacaaacaaataaccatagcatgatgcacaaattatttttgggtgtcattagttaattaatgacttttgaggtattc

SEQ ID NO: 28506 - DNA, 1721 bp, Zea Mays
aaataacatagagttggtcaagatgaccaacttttgaaagaactccaaggtcaaggtaagagtaagggtctatagtccttagggtgactattctagtctaggctagcggtcctacagttagcaaggctttgataccacttatgtcacacccggttttggaaggtaaactgaatgcgaaccatgcacgtgccaggatcagaactcacatacacagcgattacataattggacatcatcacacaatgcttgaattaaatagcggaaaggtacttagttacatcaagatgtccgagacatccacagagtctattacacaaccatagttcaacataattatcaaagtgcggaaataagaaacgtagatgctaagcctacataggcagctaactgggggtttgccgctaagataaactagaactcatcgtattcctggaactcctcgaagtcatccatgttgccagcttcacctcctgagcactgagaacaatggggacaacctgaggtggggtggtttgtaaagcaagggtgagtacacttcaacgtactcagcaaatgtcccgtttggctaaagtggactagttgtatgtggagttaaggttaagcagttgcttttagttggtcaagttttattgttataagtagagccaaattttagtaataacccagttattacccagaggcactccctccaagaggaaataccagagatcagaattataatcaccattgttaaccatcatcataaaagtaaccattgttcttctaatcgaagaggatccccaagcagctcataaccgtgagcccggctgatatactagtttttaacactctgcagaggttgcacactttacccacaagtcgtgattcccattctgcccggggttctagcctccccattggtcactaccaaggtgacctagcagggtctcactacgtagcctttacaaagatttcccagaggacatagccgcctgttaggtttctccagtttgataaacacagtacatctccctagaggaagggtgactaacaaaaaccaaatccaagaacatctgcaaccaacctcggcagagcaagtaatgtgcccggaccccattgacggccctacggcgaagctaactactactctggttcctctaattaatcagctaggggcgtcccattccaccctcatggttgcactattatcccgggttgtcactcccccaaacaggtccttatagagaggcactcaggaaagagcctgagccccctaaagaatcataagaaccttattgggataacatcatcgtatcataaaatatcacatcatgttcattgattaagtttaagcaatagcataagctaaccatgattaacccacaaaggtaaacaagggtaagggaaatacagactagtcaaaccttaggttttcaataaagtaatgcgggacagtgaattttaaagtaaagtatgacatgataggtctgaggacacttgccttcaacaggttgttgctcagggaggtctccaacaacacactcaggaaactcggactgctcgttgtctaaataaagcgagcatgcattcaatacatttggaaagtacaaatgaacatcacaccaaacatgtacaagcattggaacacatcttaaagagacttaattttacataaaggataatggattcaagtatagcataaactatggcatacattaactttatttgaaaatagattacta

SEQ ID NO: 28507 - DNA, 1323 bp, Zea Mays
gtgtttgttagatgtcgatcacttgacgaccatcctttgtcttggcactcgtttagattatccatcttcaggttcgtttatcaacaccatcttgtggagaagcccacactttccatcctcttgtggtcgactcatctctggttctccgcatcacgtggttaattcacgtacctgaatgacatgcattatgcacatgaatgcatataggcatgaatattacaaacctaaatagtgctaagcgatagcgaataaaacacctagtggcgagacgttgtacaagttcatacggaaatactagttatcgatatacgactacgcgcaataattacacttctctagattaaccgaatctaacgcaaacattacgaaacatctaactattcatactaggtacctacaactcattaagcgcaacggtcacactcccctagcttaaccggatcaaccccaaatatcatggaaccatcaaaccatacacaaactccatatacatatatatatcaaattacaattttagaaataaaagacctaaaatgtttatacgcattatttatcaggcagatcctagattctggttgaaacaattatatggatgttacttgatcctaaatattcgaagtagcaatcaacatccattcaaatcgcaaaatcgaccagcacatattcatgcctggtttagagagtatactaattgacttacaattttagctttacgatcctgagacacctgatgtttataaaattatagacgaacttttattaaccttctaaactattttccagattaatttatataacacattagttggctacgacatttaccgatcataaacatagaatgatgatactaactactagagcagggtggagggagttcagacggaatcgacggcgaggatccgagcagggccggggtgcgcgcagggaggagcagggaccaagctcggcggccatggctggaactccggcgagcagcaacccgagcagggcgcggccagggagatgggcgccgagtagccgagctggagattgagcacaggaaaatgagtggccgagcagggagccgccgcggtggccatggggagcagcgaactcggataggcaggggagagcgcggtcgagcatggggcttgggcgccggcagagaggagcgagcagagggcagggcgcggtggagagctgagcaccagagagagagagagagagagcagcgccgccaatggatgagggagatagccgtgcaaggaggggaggagaagcagaagccgagctgagagcagggaggggcgcgccatgaggatctcagcgcggctgggaggagcg

SEQ ID NO: 28508 - DNA, 700 bp, Zea Mays
gtccatcacacggttcagccttcattttggatgggtgccgaaggcagcagtcatcaattgatcctctttcttcgtataatttccctatcagttctagccattcaatgcacggtttgctaacttcttctggaatttaaacttgtaaggaagtcgaacaagttcatacttctttccttcttcctttttctttggcattccccaatcacagaggttggaaatgtcctgttcgccaagtattcttacaccaagtccctggtgctaatgtgctcagccataactctaaactccacctcagcaagttggcatggggaccctagttgcatattgcacataggtcgagtcatgccgaagttcaatttcaagggactcattaccatggtcatgagcttctcccttttcttctcatcggccttcacgtaaaaccattcgtctgtccacccggtcggccacttggtgcggtagcctatcacgggggcctttgtgtccttctggtatgcaaagttgtagcatccgacgttcttgtgctagccatcggctctttccttcgtctgaaaatgaagctcatgtacccgacagaaccctttggcgttggcactttttccttggcttcaaagagcccagatatacacgctaagcctaacaatggcgttcagggtcagctgatgtaggtagatttcaaacttcttcaaaacttcaccta

SEQ ID NO: 28509 - DNA, 630 bp, Zea Mays
ctcgaattcaatttggttgggcttagtcggacataggatactatcatcatcctcgctttcattttcactcttagccttagccatggtctgttcagcttcgacattagtaacaccttcggcaataatttcctcctgcacaaccaacccaaaacgcctcatcatttctgagatgtgagctgtctcagtcgtttcaatctcatcttccatgcgggtcacccgagcagtagatcttactctagccattttggtgttcagactctagcagacgaagttgcgcctgagcggtgaaatgcttgatcgatgcgtaatgccgaaagcttcggcttcggtgaaaattttcaacagcacaacagtgcaatagcaatgaatgttgtggtaacttctcaccaacttgtctgtttatatagccctgcaggagaagaaggcgaaccaccaagacgctcgtactgactaaccagtggaccaataagtgttgtgaatattttaattgttttttgataacaagattagggaagatgtttttcggaccttcggcattcttaagccttcgttcttttcgcggatcgagctcgttatgaaaaaaatgatctagcactgcgaaggggctacgtggcatttactgggtaacgg

SEQ ID NO: 28510 - DNA, 200 bp, Zea Mays
gccaaccccacttgggctgggtgtatcatctggtatcagagctagggcccattttaagaaggtgagaatgatgaggacatcctccactattacccgttgacaaagacgcaattggcccagttggtccaattgtagtcggacggtgaccgtgtgagcctcagaattatcccacctcgcttaacttgggaggaggaagccac

SEQ ID NO: 28511 - DNA, 235 bp, Zea Mays
ccggctttgccggattcgccgtttttaaaattcccaaattcggcttgaaaataggacttctcattttccaaacatttattccgattttagggccaacttgcagaaattccagaggacgtgtctttacacaaaaaaatctgaaacttggtgtgtttccttcttatgtgctgctgcaaaagagaaaaatataaaaaaaaatatttgaaaaaaaatcgcaagaaaaagtgaaaaaaag

SEQ ID NO: 28512 - DNA, 136 bp, Zea Mays
cccaggccgccagcggctgaccagtgcgcacaagccaagcagcggggtggttggttgggccgcgacgcggttgaggtaaatgggccgacgtgcagagaagtgaaggtgggccgagatagagaggcctaggcgcggt

SEQ ID NO: 28513 - DNA, 746 bp, Zea Mays
ccacttcctagtgccggccgccgcacagctcgcataggatacagacgcaaacacgccgcgagcctgtgacacaaggaaaatcctaggcctcgttgctccctccgccggtcgccaccagtgaccagtcctccgctgatgtcgctgccacccgacatagaaggtgagcttcccggactctgggaccatggaggccattacaacgtataggttactcttcagttcttcactcttcatcttccacatgcccttcgcccttcccttgcttggaagtttgaaccctaggcagctactcgtctctcgctaatcatgtcgtgtcgatccgtggcccatggtgtcgcctgcatggtcatcgtagcgatcaatcacaataaatgacgcgacagcctgaggcgtcgtccgcgtgttgctttgattctcagattgctagttctataaatccggccccttctatcttagccttgcagaccgaggtcctgaatcctgatttcgtgtttcatgtgagtcgatatggtgaggagatgtcctataatggtgtccaagtctagggccagtgaaaccaatcctaatccttatcctaatcctaatactagcgttggtgcgtctggtggtaaattaggtgtgagtggtagtgtggctgctggtgaactggatgtggatgtggccgatttttttgcattttgactctttctcggaaaaaaaatcacgtttggaccctaaaaaattttaatgtcatttttggactcttt

SEQ ID NO: 28514 - DNA, 895 bp, Zea Mays
gcaccgagctcggcgccatagatatgggcgccgagttcaattgtataaccaaagcacgtctagctcagttggtatagtgcaagactcttaaccttgtggttgtgggttcaagccccatagtggatgttactttgtctttgtcattgatttatttttttgttgtctagatttttcgtttatgtcgttgatttgtctgttcatatttatttttcatccagatttttttgtttttttgactgatttgtttattcgtccagatatttttttttattcgtcgtatgttcatgcgcatgaatctaacgtatgagataggtatagttttccttcctaattattgctcctaaatttgaacaacgcatttatattttggatttataaccttgtacacttgtcacaaatctatgatggtgcctatggctactgtatatggatcgtcctgccttttttctgtctgctagagaggcaaagaccaaccaagctgacgcggcgacgtgcacctgaaacatacaagaaacacgggttcacaagcatgaccaggcagtgagacaccccgggccgagggaaggaagagcacgcagcagcgccatgcatcgtccagcctgctactctgaccgtacgtgccgctgcactagctagaaacactggaaagagaccagagaccccaaaacaacaaataaataacaaaaaaatctggataagaaataaatctagacagacaaatcagcgacataaacgaaaaatctggacaataaaaaaacaaataagtgaaaaagacaaaaagtattaaaaaaacacccactgtggggcttgaactcacgacaacaaggttaaaagccttatattttaccaactaagctagacaaggtttctatatagaatggagctcgggcgccca

SEQ ID NO: 28515 - DNA, 5525 bp, Zea Mays
cgagctttgttacctcggcgccataggctacggcgccgagtaaagggtccaaaaatgacattaaaattttctagagtccaaacgtgtatttttttccgagaaaggaccaaaatgcaaaaaaattcggtggatgcgggtcgtgtggctgctggtgaaccaccacaaacaccatttgtcgtccatgggggtgaattgggtgatggtgattgtgcaccagcgtcggcgtcatcaagcggtgcaaagtatagctcgagggcagactgttggaaacatatggtgaagaaggaagtcattgaggatggtgtagtatattttgttgttgtatgtaactattgcaaaagtgaattgagtgcaggttcagttgctggcacgggacatttgaatcggcactacaaagtttgtttgacaaagctaggaaaaactcgaggaggtacgcaaaccaatcttaactttagtgctgatggtacaataagtacatgggtttacaacccacaggtagcgcgtgatgaaatagccaaatctattgtttgtgtgggtgagagccaaaattttaagaacttgattcaacgtgctttctgcccacaatatcagcctgtcactagaaaaactacaaaatctgatttgatttgattgttagaagataagattagattgtaaacaaatatctgtaacaaacaagagtaagcatctctgggaagataaagatagggatattctgttgtaactagaattcctgaagcttctctagtttgttacgatcctgtaaattctgcgcatgttgtttatgcctatataaacatgtagggcggccctccaacgaggtagcacgctttaacctattgccctctgattttcacatggtaatcagagcctaaaccatctaccaaaaccctcatcatgtcgtccagtgcttcctctgccgcacttgttgcacatcctgtttctaagaagcttaccagggccaaccatgccttgtggaaggcccaggtacgtgctgccatgcgcggcgcacgtctggagggatacctcaccagcgcaaccaagatgcctgatgaggagactgtcgacaacgcgggcaagaagagccccaatcctgcttttgaagagtgggaggtaaaggatcaacagatcctcagctatctcctctcatctataagcagagaggtgcagattcaagtcacctcagccaagactgcagcggaggcatggcgctccatcgaggccatgttcgcatcacagacccgagcccgggctgtgaatcttcgccttgctctgtcaactacaaaaaaaggtagtatgaccgtcgccgagtactacaccaagatgaagggctacggcgaggagatggctgcagcaggaagaccgctgcaagatgaagagatggtcgagtacatcctcaccggcctggaggaagaattcctatcgatggtgtctgcccttgtcacgagggtagatccaatctcgcttgaagacctctactctcagttgctgaattttgagaccaagttggatctcatgagaggtggaggcgagcagcatcaaggatcagcaaatatggctggtcgcggtggccgtggaaatcaacgtggaggcagtggtggccgtggccagcgtggtggacgcgggtcatctcgtggtggccgtgctagttggtccggagggcgccaaggcaaccagggaggctacatcaggcgttccaacaactccagcgacgagaggccggtctgccaggtctgcttcaagaagggccacaccgcagcgaggtgctggcacaggtttgaagaagacttcgtcccagatgagaagcttgctggagccgccaccaactcctaccacgtcgacaccaattggtacacggacaccggcgccaccgaccacataacaggagagcttgagaagctctcaatcagggagaagtacgctggtggtgatcaaattcacactgccagcggttcaggtatgacaatcagtcacattggtcaatctactgttaatacccctaatagaaatcttcatctaaatgatgttctttatgttccacaagctaaaaaaaaccttgtctcagttcataaattaacttcagataactctgccttcatagaatttcatccaaatttttttgttatcaaggacaaagacaccaagaacattttgcttaaggggcgatgtcacaaaggactgtatcccatccccgctacatccacaataaagaacgctcttggtgctgtcaagccctccatgtcccgatggcacaatcgtttaggtcatccatcttcttttattgttcgtcaggttgttagcaagaataaacttccttgtttaggtccctcaacagatgaatccgtgtgtgatgcctgtcagaaagccaaagctcatcaattcccatatcctagatccactagcgtatctagctcccctctcgagctagttttttctgatgtatggggtcctgcacccgaatctgttggcagaaaaaaaatattatgtgagctttattgatgattatagtaaatttacctgggtttatcttattaagtataagtctgaagtttttcagaagtttcatgaatttcaaagccttgttgaacgactttttgacaagaagattcttgctgtccaaactgattggggaggggaatatcagcgcttgaataccttttttaataagatcggcatttctcatctggtttcttgtcctcacgctcaccaacaaaatgggtcggctgagcgaaaacatcgactcatcgtagaagttgggctttctttgcttgcacatgcgtctatgccccttaaattttgggatgaggcatttctagctgccgcatatctgatcaatcgcactcccacaaaaattcttaatctagacacaccttttgagcgcttgtttcataaacaacctgattattcagttctccgcatttttggatgcgtatgttggcctaatcttcgcccatataactctcacaaacttcagtttcgttccaagcaatgtgtttttcttgggtatagtagcttacacaaagggtttaagtgtttagatgtctctactggcagggtatatgtttctcgagatgttacatttgatgaaaatgtttttccctttgcttccttgcatagcaatgcgggtgcacgattgagatctgaaatccagcttcttacacctgatcttttaaatcctgccacatttaattctggggtagacagtttgattgatcatgcggctgatatgtctactgaccctaaccaaatttctggagacaattctgttcaagatcaggcagaacacacaccaaatatggatgtcctagcgccttcagtaccaaacactgctcctgaagctgatgtggtgcagattcctgggagtgcttcgcactcgagatctgctcctgcagcgccatcgacagctgcaccgtctccaacctgtcgtggcgactcgcgtgttgccacgcacccttcagctagccacgattatgtggcttccgtcgacatgtcccgcggcattgcgggacgggaagagagcttcttgacagctcccactaccgcgacatcaccagcgagttctgagccgtctggttctctgcctgcgaccgctgctgatgcacaagtccctgagccgattttgggaggtgtatcttctatggaccctgcatcaactcgcccaaggacaagacttcaacaaggggttaggaaaccaaaggtttatacagatggcactattcgatatggctgttttacttcttctggtgaaccttatgatctaaatgaagctttaggagatgttaattggaaagatgctatggatatagaatactcagctcttatgaaaaataaaacttggcaccttgttcctccaaaaaaaggtaggaacgttataggatgcaaatgggtgtataaaattaaaaggaaagccgatggaagcttggataggtacaaggcacgactagtagctaaagggtataaacaacaatatgggatagattatgatgatactttcagtcctgttgttaaacatgctaccattcgtataattctttctattgctgtgtcacgagggtggagtctacgtcagcttgatgttcagaatgcattccttcatggagtattggaggaggaagtctacatgcagcaacctccaggatatgaggattccacaaaactcaactatgtgtgcaaacttgataaggcactctatggattgaaacaagctccacgtgcatggtattcacgattgagcaataagcttctttctcttgggtttcaagcatctaaggctgacacatcattattcttctacaataagggaagtgttactatttttgtgcttgtgtatgttgatgatataattgttgcaagctccactcaaaaagcaacagaagcattactaagtgatctcaacaaagagtttgcactcaaggacttgggtgacctcaactacttcctaggaatagaggtgaataaggtacgagatggtattatcttgactcaagacaagtatgcttcagatttacttaaaaaggttggtatgtctgactgcaaaccgatcagtacacctctttccactagtgagaagctatctatacatgaagggtcacctttaggagaaaaagatataacccagtacaggagtatagtgggggctttacaatatcttactttaactagacctgatattgcattttcagttaataaagtttgtcaatttcttcatgctcctactacgttgcactgggcagcagtcaaaaggatacttagatacatcaagcaatgtacaaacttggggctgcatatccatagatcagattctactcttgttagtgccttttccgatgcagattgggctggcagtgtagatgatagaaagtctacaggtgggtttgctgttttcttaggatcaaatcttgtctcatggagtgcaagaaagcaacctacggtgtcaaggtctagcactgaatctgaatataaagctttggccaatgctactgcagagttgatatgggtacaaattttactcactgaaattagtattaaaagtcctagagcagctaagttgtggtgtgacaatttgggagctaaatatttgtcagccaatcctatctttcatgcaagaacaaaacatattgaagtggattatcattttgtgagagatcaggtcgtaaagaaactacttgatatagaatatgtgcctactggagatcaagttgcagatgggtttactaaacctctttcagttcggcttctggagaatttcaaagtcaatctcaacctcactcggttatgattgagggagggtgttagaagataagattagattgtaaacaaatatctgtaacaaacaagagtaagcatctctgggaagataaagatagggatattctgttgtaactagaattcctgaagcttctctagtttgttacgatcctgtaaattctgcgcatgttgtttatgcctatataaacatgtagggcggccctccaacgaggtagcacgctttaacctattgccctctgattttcacattgattaca

SEQ ID NO: 28516 - DNA, 507 bp, Zea Mays
gtacgttctaccctagtcaattgtgtttcagagcttacgcttggggtcatggatgttttaatgattaggaaccttggagaggaccagcaaggacttgggaaaggtctagttgttgaggaggagcagcaagggcgcccacaacaggaaggagatcaagtccgactcggctgcgactccatcttgtgttccaggaccagtctgcactaaaatggacgcccaagatgcatccggactccgattgcaatggacttgatatggttggaaagataaggagattatctaaccaacccaactggttccaccctaaaattcggccggagtcaacgggaatcgtcgaaacaagtcagcgtcagtctgttttggtgctgcgacaccgtctgttgggccgttgggccgtgtatcgcgtcggagcccattaggggtgcatccaggggtcacgcacgccctaatactctatttattcagcagccgccgccacattagggttcgggttttgcttaagtttag

SEQ ID NO: 28517 - DNA, 600 bp, Zea Mays
aatctcgagggcgagatttctgttaagtgggtaggatttgtaaagccccaaaaaaaattgtgtaaggaaaaaaaataaaaaaataaaaaaataaaggtattcatataaaaatgtgttgggaattatttgattttcccttctttgtgcatactcaattaagggaaataaaatagcaaataaataaatataaaaataattgtagatcatgcagttaaaataatttgaatttttgaatgaaagttaaactgaactggaaatttgaatttggaataaagaaaaaaaataatagaaaagaaaaaagaaaaaaaaagaaaacagaaaaccccctattgggccagattcccctcacttggcccatctccactaaatcccttccgtgcgcacgcctacctgctcgctgacgattggggcccatctgccattgtctcgtgggcactgcccggtggggtccactggttggactcacaaaacatgcgctcgactctgatgactgtatagtgaccctagttgctcggactcatcttctccgctcttccaaagacgctgccgccgctgccggggaatccgcgtgtggatcgctggcgaccaacgggatccgcg

SEQ ID NO: 28518 - DNA, 268 bp, Zea Mays
cttgacagaaggtaagaatccaagtgtgatgtgcgagcaaatacaagtcagcgtgaacagtacggtgttactatttatctatttataggcacaggacatagcctgtataaaattacatccatgcccttgacatttattattggctaagggtaatcgatcaaggactagacaacctttttctctttaggtcggttttattttccattgctaagccgaagcttctccatccgtagcttcggaactggttcatccttctcccagatcgcgc

SEQ ID NO: 28519 - DNA, 1174 bp, Zea Mays
aaaacatgtattatggttgtttaatcaagaaaggaaatgcatcaactgtttgatcacacaactcctatcccctaatgcatcattcaaggtgataaagctttttaaaacagaaggaggtggcaaatgcaccgaggcttgcatggaataacactaggttagtgtttgttagaagatgtctgcttgacgattatccctcggccgagcacttgcttgatttaaccatcttcaagttggtccgactgacgacatcgtcgtgtggagaagaccactccttgcaccatcttgaggtcaacttggctcgtgtcctccgcatcacgtgattaactagcttacctaatgatatgcataatgcctatgcatgaacataagaactagaacaagaataaataatgctacacgatagaaaagtaaacacttaatggcgagatgcaatacaacactcataaaggatgtcgacatatcactaagcacaactaacacttttttccaacttaactggatctaacacaaactttaaaataataaactaagctcaagtcctatatcaaccttagctagcacccaatatcaaacgacttgccaaaccttgactcacttttcttgagtaccaacaacctataataaggatagaagcctgttaatcactttctaaaccatttatccggattaatttgcataacatgccaaatacatgaacatcacattattttatgacttagtagatagagtatttttaatcgaatcacaccatgcctacaaatctattaacatattcttcacatcatttatacctcaaacctatcctccacgtcaccacttcgaccaaacaaaccaaattcatgacaaacaatactaacaacacttatcagtcaagtgttgaaaaattctaaactcatctattgaaattcattaaataattgagcattaacaagagaactagtggtgccctgctaatagcgagaacatgattattagcctaaaccaatcacatagaatgtaatatctactaagactaagtataaattcaccatacaataggaattctcacgataattattgatagcacatttggctaaacatttcaaacgttaaacctacattcacattactaccaatatactttttcactgaaagtagtaattcaaattttagttcctatatcaaacaatttttt

SEQ ID NO: 28520 - DNA, 402 bp, Zea Mays
aaaaatctcaacccaaggtttggaaccctaatctcctaaaccccccttattttattttctccctaaactccacccttaggtcatctcatcatgtgcatacacttgaaatgttaggagcacctcacatagactatttcatcactcaagattttttagcaaattgttgattcaaaagaaaaggaaataaaaagaaacaaaaatagaaaaagagaaaaaggaaatagaaaacagaaaaagaaaaaaaagaaaacccttccccccctcggctgggcccattctggcccaacccgtgcgccagcgccacccctgacagaccggccccaccagtcagcgactctacctctctccctctcgcgccgctctcccacttgcagcccagacccgcctgtcagcatcgtcgtc

SEQ ID NO: 28521 - DNA, 583 bp, Zea Mays
aaccaagatacaactatagatgtcatcctagggatgaattggttaaccaagtatcaagctagtcttagttgtgataagagaatagtgaagctagtgtccctatcaggagaagaagtgttagtagaattggtcttgtctggatcaaggaaagggagttgtcaccaagtcaccactcatattgaagagattaaaccatcagaggctatccgtgtagtatcagatttcccagatgtgtttcccgaggagttaccaggtatgccacctgaaaggaaggttgaatttgccatagagcttattccaggcaccgcccctatttccaagagagcctatcgagtgtccagaccagagttggtagaactcaagaagcagattgatgaattgttagagaaaggttatatcagaccgagtatctcgccttgggcagccctagtgttatttatggagaaggatgtcacgaagaggatgtgcatcgattacaaatctttgaatgaagtcactttaagaacaagtaccctctgcctcgaattgaagacctattcgatcagttgagaggagccagtgtgttctcaaagatagatctgag

SEQ ID NO: 28522 - DNA, 1150 bp, Zea Mays
gcatgggcccgcttgacgagccgcacacttcgctcgcgctctcaggaaaggaacaaacgctgacaaaacggacccacctgtcatcccttcgttctgcccgtcaaccaacgacgcgagatccgcggcgagctcccttccctgatttccgacgccagttggccacgtctccgacttcgccggtcctggaagataaaggctgaccacgcccgcaagccatcactcgtactcaagccgatagaaccctgacgcgagtgattttacgcgtgcggcggaggtgagaagtccgccgccgcgactgccctcgccaacgcagtggctgcacctccacgcaggaatctgggaacctgcttggcgtggtgaagcttcggcccgcactggattgggcgaaccttaccccggcggtgagcaattcctcgccgtggtactcctccgccgcggcagccgcagtatcacgtggtccgtcttcgccatagctccagcccctcggtatgaccttcgaccacctttaccgcatttgtaggatcgtgatgcacctgtccgtggtgaggatcgtgagttatggagtcggattgcctctctccggcgtgaggacgccgtgaagtcaggcggtggcgccgtcgctagctgaggattgggggaaaacaccctggtcgtccaatcctcgttgaacggtatagattaaatcgacgataacctttcggccctttaaatctggtccgtagaaatgtgatcgaagggctacggttgtttcaaattcagtccgttgatgatagatccaagcgcctataatgtttcacggttcgtcgtagtcggcttctaatctgggccgtctggtctctatcctgcggctgtgggttgttggtaccccttcgcgggtactttttgctaaagagccccctaggaaatcactaatcaacccgcagttcttccctggctagtctgtgtcttaggatttgtttgcgccaacacccctgcgttttctagaattcgaggcccagtcctcatagttgataaaaccaggaaaactatttagaaaatagtttttagtataaatttaattgcagaaacttgtttaatttgtagaaaattcatatgaactccaattcggaccatttcagttcctataattttgtaatattattctctatca

SEQ ID NO: 28523 - DNA, 431 bp, Zea Mays
ggagataatggagtggagagtgcccactacagttattgagattcggagtttcttagggcttgtaggatattatcggagatttattgaaggattctctaaggttgccaagcctatgacctcactgctagagaaaggaagagaattcaagtgggatgagaagtgccaagaaagctttgatcaattaaagaagaggttgatgtcgccaccagtgttggttatgccagatctacagaaaggatttgacatttattgtgatgcatgtggccaaggattgggatgtgtgctcatgcaagaaggacatgtgatcgcctatgcgtctcgtcagctgcggaaacattaatttaactaccccactcatgacttagaactggcagccgttgtgcatgcactgaagatttggagacactacattatgggaactaagtgtcaag

SEQ ID NO: 28524 - DNA, 422 bp, Zea Mays
gcccatgtggctaagtgtgatgtgtgtcaaagagttaaggccgaacatcaacgaccagctggattattgcacccattgaagatacctgagtggaaatgggaagaaattggtatggattttattgttggactaccccgcacccctgctgggtatgactctatttgggtgattgtagacagattgacaaaagtggctcatttcatacctgtgagggctaattacacgggggccaagctagcagaattgtatatgactcggatagtttgtctacatggtgtgcctaaaaagatcgtgtctgatcgaggatcgcaatttacttctcgattttggaagaaattacatgagagcttggatacaaagttgaattttagctcagcctaccatccccagactgatggacagacagagaggactaatcaagt

SEQ ID NO: 28525 - DNA, 204 bp, Zea Mays
agaatgagcaagagcatgaggagcatttgaggaaagtacttcagaggctacgagattatcagctgtatgccaagcttagcaagtgcgagttctggatcagtgaagtcctattcttgggtcacattataaaccgagagggattggctatagatccgaagaaggtaacaactatcttggactggaaagcaccaaaagatgtttgag

SEQ ID NO: 28526 - DNA, 1871 bp, Zea Mays
gttgagttcaagtggaccctagcatgccagaagtcctttcagacattgaaggaggagttgacaacgacaccagtactgattctgccagatgttcacaagccattctcagtgtattgcaatgcttcgtacaccggaccgggatgtgtgttgatgcaggaagggagagtagtggtatactcgtcccaacagttgaagattcatgagaagaattatcctactcatgatctggaattagcagccgtggttcatgcattgaagacctggaggcattatctttatgggcagaagtgtgatatctacacggatcacaagagtctcaaatatatattcacttagtcagagttaaacatgagacaacgaagatggctagaattgatcaaagattatgagctggagattcattatcacccaggtaaagcaaatgtggttgcagatgctcttagtagaaagagtcaagttaatatgttggccgctcacccgatgccgtatgagctagcgaaggaattcgacagattgagtctcggatttctgaacaacacccaaggagtggcaattgagttggaacccactctagagcaagatatcaggaaagggcagaaggatgataggaagatcaacgagatccgatagctgatcttaaatggaaaaggcaaggatttccgtgaagatgcagaaggagtggtatggttcaaggacagactgtgtgttcctgacatcaaattgatccgggaactgattctcaaggaagctcatgagacagcatactccatacaccctggtagtgagaagatgtaccaagacctaaagaaaagattttggtggtttggtatgaaaagagaaatagcagagtatgtggctgtatgtgacagttgtcagaggattaaagcagaacatcagagacctgcaggtttgttgcaaccgttgcagattcctcattggaaatgggatgagatcggaatggatttcatagtcggtttgcctcgcactcgtactggttatgactccatctaggtggtagtggaccatttgaccaaggcggcccattttatactagtcaagaccacctacaacagtgcagtgttggccgaactatacatggctcggattgtgtgcttgcatggtgttccgaagaagatagtatcagacagaggtacccagtttacctctcattttcggcagcagttgcgtgaagctttgggcacacacttgaagttcagctcagcttaccacccgcagacagatggtcaaacaaagagaaccaatcagattctggaggatatgttgagggcttatgctttgcaagacaagataggttgggacaagagattaccatatgcagaattctcttacaacaacagctaccaagccagtctgaagacgttaccgtttgaagcgctctatgggaggaattgcagaactccattgcattgggatcaacttggcgaaaggcaggtgttcagaccagatattttgcttgaagccaaagagaacatcagaatggtccgagagaatttaaaggcagcacactccagacagcgaagttatgctgacacccgaagaagagaactcagttttgaagtgggagactatgtctacttaaaggtatcacccatctgaggaatcaagaggtttggagtcaaaggcaagctagcaccccgatatattgggccgtatcagatttaagcaagacgcggagaagtggcttatcaactcagtttgctagagaatctgtcagcggtgcacgatgtgttccatgtgtctcagttgaagaaatgcttgagagtgccagaagagcagttgccagcagaggatcttgaagttcaagaagatctgacttatattgagaagccaactcaaattctggagacagc

SEQ ID NO: 28527 - DNA, 735 bp, Zea Mays
acactctaatttttgaggattgaatatgaactaaggtagatgtagttttattcatgtaataaaataaataaaaggagaaccttagagatttaaacttgtttaagcttgtgagattaataataggtattacataagttcatctttgttctaagttttaggtcaccataaaataaaattaatctatgattatgtacttgtaaataacacttaggaaaatagtaatatattttcaaacaaagttaatgtaggtcatagtttatgttatactttgaatccattatcccttatgtagtattgtgttttttaaagatgtgttccaatgtttgtacatgtttggtgtgatgtccatttgtactttccaaatgtattgaatgcatgctgagtgtgttgttggagacctccctgagcaacaacctgttgaaggcaagtgtcctctgacccattatgtcctacatactttatgattcattgtcctgcattactttatgaaacctaaggattgactagtctgtattcacttatccttgtttacctttttgggttatcatggttagcatgttgctatttctttaacttaatcaatgaacatgatgtgaacatttatgatacgacactgttatcctgactatgtggatgaccttgtgataccttaggggactaaggcattttcctgagtacctctttgtaaggacctgttcgtggagtgaccacccgagataacagtgcaaccatgag

SEQ ID NO: 28528 - DNA, 247 bp, Zea Mays
cgcggggtgagaaaggtgtcgtgggccataaatgtggcagtcggcccagacgacggttttctttcttttttattttattttctgtttttatttcctttttgttttctttccatttgaattcaaaattcaaacttaactctgtgataaatctttctcaaattaagggtataattttgcacatactattattacctttatttataatatttattttgtatatacattttcttttctttcaccacttcta

SEQ ID NO: 28529 - DNA, 443 bp, Zea Mays
tttgcatttggaatgatttttgattgttcataattggttttggatattgaatagcatttcttcttaaatgaaaatccaaataattaatataataattactagtccaaaaataaatatttcatttataattttggtataattattatgaattttagggttatttaaaaatatattttgaatttagaaaatggaatagaaaaaaaagaaaaagaaaaaaaaccctaacctaacctaaccctaacagcccattagcgcgcgcccagctgctcgcagcctcgctccttccccgcgccaagacccaaggtcgtgcccaggagccgagcaacccgatgccgactgcgcccgcgacctcgaagctgcaccgtccgttcgtctttggcgttaatggagcttcaaacgcgaccgttactcccccattactctcctccatggaagaaaccgac

SEQ ID NO: 28530 - DNA, 339 bp, Zea Mays
ctcaaatgctatgaattaagaacagggcaacataaaatgttaaatgttaacgttcttcgtccatgaaacattattcccttgaggataatgagtcttggacgaaggttgatgagaacataattacgaagctcaagtcttcgtaataaaatttcaatagattgtataagataatataaaataaagggtataaaaaggtaaataaatcatagacgaattatattatatttacttaatatattgaatcattgaatacaataatacctctgccttggcaaaggttgattcctgaaagatgcgattgcaattaccagaatgcgtgaacagtaaaggaatactgtt

SEQ ID NO: 28531 - DNA, 424 bp, Zea Mays
ctcatccctaacgcggagtgcggacaccgtaaaaaaaccgacaaccaaaccaagcggaggtcgccgtggggctcaaccatgtcgttccttcggccggagattgcatatatatggagatccgtagccccgtctcgacccatcggcttgatctgcatagcccccccaaacaccatcgggaaagaagaaccagagaggggtagcgtatgggagagagggagaaggataggagagggccgtcgtgggaaaaagcgttcagcgccgtacagatttcgcaatagggtcaggaagactcaccctatcccggcggaagcttccgtggagtcgttgggcggattgggccacctgctccgactgaattgcttgccggagtatcaaacccgctgtggtgctactgtgcgtcgtgggctgcttgtctggatcgacc

SEQ ID NO: 28532 - DNA, 402 bp, Zea Mays
tccgacccggaccctgtcgcaccacgaggcgccgtcaacgagtcgggttgtttgggaatgcagcccaaatcgggcggtaaactccgtccaaggctaaatacaggcgagagaccgatagcgaacaagtaccgcgagggaaagatgaaaaggactttgaaaagagagtcaaagagtgcttgaaattgccgggagggaagcggatgggggctggcgacgcgcaccggccgtatgcggaacggctcctgctggtccgccgatcggctcggggcgtggaccgttgtcgcccgcgccggcggccaaagcccgggggccctaggcgcccccggcagccgtcgtcggcgcggacggtatccgcgcgcctctggcgcgcccctcggggcgctgcgctgcaacggcctgcga

SEQ ID NO: 28533 - DNA, 309 bp, Zea Mays
caaaatctggcagcacctctcttgtaagtagtaaaacgagagggacataaagtttagacataatgtaaaggaaagacaatccatgaaacataaacaggatgcggagatagtaataaacattcatgaccaaatagaaagagagggaacccggccaacccaacaaattcgactaccatgaagcctaaaacatattaatcccctggacttgaacccctgtttaacatcattactaaacagtggtacatttatttaaaagtgaagtggtcgtgctgctacatccctcctttcccaaaagcaagatcaagtgcc

SEQ ID NO: 28534 - DNA, 198 bp, Zea Mays
gattctcccctttccttcctcccttcttccctccaccaaaaccaattggagacttgcaccacgcgacgtagatgcaagcggcaaggaatggcaccttggggaggaggagatgggggcggctagggttaggtggtgtggctgcaagagtttgagggaggaggagatgggagggggcggcggccaagggctaggggaaat

SEQ ID NO: 28535 - DNA, 800 bp, Zea Mays
gcacactctaaaagattacatcctctatatattcttcttctccagcaacatcctctaaatttggtcctctatatatacagtgttaccagatttcacaatatacaattctttttaccggtggatcctaaaaatcgtctgtgactactaaaaattcctgctactgttcggtcagaaattagaacattattgtcaaggaacacaatacttttaacaggaaacatccaccgtagatttaaaaaactgtgcatgaaacacaaaattaggggaaaatcagttgtttctgttttggttagtttcctgtgacttatcaccaatgacaaaataatcatcaatttattaatgggaagttccttagaagctagcaaccattcaaaggggaaggaggacgattggctaggatccagagcattcggagttcttgagaagctagcaaccattcaaaggggaaggaggatgattggctaggatccagggcattcggagttcctgagaagctagcaaccattcaaaggggaagtgagaggctagcaaccattcaaaggggaagaggacgattggctaagatctaccgaattgaaggaggatgatgccaccgtcgggtggttgctgcttggaaaccaacggatgcgagccgtcctcacctagatcagggcgactccggcagcctggtcctagcttcgcgtccgacatccttgccgcgagcgcgccgacgacatggtggagatggttccagggaacagagacggagaggaaatgtcggcgtcggcgcgggattcactgccagccggtgtatagcgggc

SEQ ID NO: 28536 - DNA, 669 bp, Zea Mays
taatgacataaaatagggtataataagttgattacatcatgatgtccgagacatccacatagtctttaacgataatcaaagtgcggaaaagaaacgtagatacacacggcctacacaggcagtcgactgggggtttgccgctaacccacacctagcactcatcatactcttggaactcctgaaagtcctcctccacgacttcatcttcacctgagcagtggttgcaatgcggacaacctggggggggggttggtgtgtaaagcaagggtgagtacacatcaacatactcagcaaaatgtctcgtttggctggagtggactagctttatgtggagttaagtcaagcagttgcttttagttggtcaggttattatttactagtaaaaagccaggttttagcattaacccaagttattaacccggatgtatcctttccaaacggaaagaataccacttaccattaccatatttataaccagaaccatcatcctcgttaccacctgtaaaccatacatctctgatcaagtatctctaatcactggagctcccttggccgctcataaccacgagcacggctgatatttcagtttcataacactctgcagaggttgcgcactttacccataagccgtgattccgctcataactgggaatgaattataagaatgag

SEQ ID NO: 28537 - DNA, 574 bp, Zea Mays
caaacattgatatctcccctttgctggtggtctcttggaaagtgatgctagatgtctatgtgcttagtgcggctgtgttcaacgggattatccaccaagtggattgcactctcattatcacataggagtgggactttgctcaaattgtagccaaattcatggagagtttgcctcatccaaagtagttgtgcgcaacactgacctacgacaacatactcagtcttggaggtggataggacaacaaatgtttgtttctttgagctccaagacactagggaccttcccaaaaattgtcaaatccctgaagtgttcttcccatcaaccttgtgcggacttgggttggaggtgcatgtggtacttattcctcctccttttcttcttattcttgtgctcccctttgatccatgccgccgtattgaggtacatgtttctcatcttaagttggggattgcaccaccgttgaggaagaaggttgatcttgtacttgatgttcctgtggtctcccatcgcctatcgccatagtcatcattatggccgttggaacctcgttttcatatatatcatcaagatcaac

SEQ ID NO: 28538 - DNA, 199 bp, Zea Mays
cagtgctaaaataatgacataaaagagggtataatagttgattgcatcatgatgtccgagacagccacatagtctttaacgataatcaaagtgcggaaaagaaacatagatacacacgacctacacaggcagccgactaggggtttgccgctaacccacgcctagcactcatcatactcttggaactcctggaagtcct

SEQ ID NO: 28539 - DNA, 855 bp, Zea Mays
ttgattagttctttcagtctggccgtctgtctgcggatgataagctgaactgaaattcagatgtgtacccaaggcttcatgcaactgctgccagaaatgagaggtgaactacgttcctctgtctgacactatcttctttggcacaccatgaagacaaacaatctaggacatgtacaactctaccaatactgcactgttgtagttggtcttgacaggtatgaagtgggctgacttggttaagcggtccactactacccaaatggaatcatagccggctcgagtgcgaggcaatccgactatgaagtccattccgatttcattccatttccattgaggaattcacaacagttgcaacaatccagttggcttatgatgctctgccttgatcctttgataactgtcacatatagtcacatgctccgcgatttcccttttcattccataccaccagaacttcttcttcagatcctgatacatcttctcacttccagggtgtatagaataagctgactcatgagcttccttaaggatcaactccctaatggactggacattgggaacacacaagcggtccttgaaccatatcataccttctgcatcttctcgaaaatctttacctcttccttctagaatcagctgccggatttcactgatcttctcatcattcttttgtgcttctttgatttcccgctctagggtaggctctaactcaacggtcactcctcgcatattgttcataaatccgaggctcaacctgtcaaactctttggccaactcaaaaggcatcggatgagcgaccatcatattgacttgacttttcctgctcaaggcatctgctaccacgttcgctttgcc

SEQ ID NO: 28540 - DNA, 244 bp, Zea Mays
aaacgaccgagatgagtcaacaagttcctttcttttttttgtttgttctctggttctatcctttctttttcgttttctttttttcttttcttttttttgtttctgttttttgacgtaaccgaaggagaaaaacaaggaagcggtgttgactcggtttgtggcgtgatcaaatgggagatggtggcagtgcgctagggtttgaatggtggaagaaagaaggatggtgagaaaaaacacaatgcga

SEQ ID NO: 28541 - DNA, 138 bp, Zea Mays
tggtctacgtgtttacaactcggagcgtacacgagatctgataattgagcataataacacattcaaattagcagaaataagaatcacatcggtggataatgtgtgcttgttatagtaagtagagctagatgactgacc

SEQ ID NO: 28542 - DNA, 648 bp, Zea Mays
ccaacgcccagatttcaatcgctgaatagctcactggcccattcaatcccatctgttaaacaagcaaacggacggccagtgcactttcccccttcctcggccggacacggcaccgcggagtactagcccacggcggcgcccatggccggcgattccaatccgcacaatccgttgattattccccaattcggtatagccacactacgcggagagaacgagggatccaagggtcagctcattacattggattctgcggtgtattaaccccgccgccatatgagtctctgttaaacccgcagctcgacgtcgttgaaggattccggtcgccattctcccctggtgagtccccgagcacgcacagagcttcccagggaatcccacaagactcacccaaggcatcagtccgcccccagagccatggtagcgcgaccgcgattaagaggaggcggcgtgcgagagttgcgccagatggtagtgtgcggaactttatagcaggcggagacggaggcgcggacgtgccatggtggccacgtcatcgcaatcggcgcacggaagaggcggatgtggaggaggggtatgggagtggcacagcgagcaatgagatgcgagagtggcggtctgatctcctctccatgccagcgatgtgag

SEQ ID NO: 28543 - DNA, 387 bp, Zea Mays
atgggaattattcctaaggttgagccgatgtagagcgtggtgccctcgcttgtatatgtgtaagggcttgtaagatgaagttgtgtgccctcgcgtgcctgtgcctgcgagggcgctgtgtactttgtctggtatggttggttatgctgtgctggtgtgattatagtcggtcttggcgcggatggtttgatgctgtcgtttctgcttttgttgtactagttcggctgcgcccttaggcggcttctgcgcggagtctttgcgatagacttcgggctttttcgcacttgttgtgctagtccggctgcacccttaggcgacttctgcgcggatagtcttcgcgatagacttcggattttttcgcacttgttgtgcttagtccggctgcac

SEQ ID NO: 28544 - DNA, 109 bp, Zea Mays
ctctgcgtattaaagaaaggtcggacacaagatcttccaacaactgaagattttctcagattatcagcagctttttaggttgtagaatgccctctatataattatatat

SEQ ID NO: 28545 - DNA, 636 bp, Zea Mays
aaattaaattattgtaatttgcttccactgattctttccttcgatgtgatgtaatatctgcatgacaggtgatgcgctattgggcgtaatgatgaggatacagttaccgaacttgtcaagtgattttgtgcatctacagggttgtccaaggtcccttggacaaggacaaatgtaggtgggcctaataccttgggaggtttcgtcacaataaatgtcacaactatcattattacatagcgaaagtcttacaaaaataaatgataacaataaaatgaactaaatattattcattggcgccatcaaggtgacagggagacgccacctagataagctcatattcctcattgtagggctcctcttggaccacctgctcttcacctgtggggggtttatatatctcaagagtgagctcacaaaagatcatagatcaacaagttgtggggaataatgtgcatgaactcaccaaaggtgggagctcatgtgaattgtaaggctgatcaacaaataatggttaaagctgagcattgcttttaataagtgatcaagttttattagcagttactaaatctaagtaaataccaaaccaaagtaataatagataaaattaataataaaccacaatgcgatgcaaatgac

SEQ ID NO: 28546 - DNA, 50 bp, Zea Mays
ctcgcgtatgcgcccggcgtgctccgtggtcttcccctaggccacaatca

SEQ ID NO: 28547 - DNA, 886 bp, Zea Mays
cccctctctagcctttggccgccatcccctccccctaattccctctctcttgtgcagcagcccccatcccctcaaccctagccgccacccccctcccatctcctcctctccaagtgatgtccttcctcgctggatcttcttcgtgtgggtgcaagttccgattggagaattggtgggaggaaggaaggaggaaaggaggaacccaaggtgattttgtgattaactcttgtttatttgtgctgcaattcaatcgattagatgtttacgtatgcgaattggtagaggtgctgtccagaaattttgtgggtgcgcgaacagcagtagttctagcagattctgggaatttttcgtgggtaattagtgggaatcagtgggagaatcatgtagagctttttcatacctttccaacgagtacttatgcgctcgatttggagttatattttaggagatatcgctgtttgaatccgggtatgttgctgtccaaaaaaacagatttgcaggtgggcaaacagcagtagtattagcagtttctggggatttttcgtgggaacttagtgataatcaatatgagaatcatttagagctttgtcatacctttccaacgtacttatgcactcgattcggagttatattttaggagatattgctgtttgaatccgggtatgttgctgtccaaaaaaaacagatttatgcaggtgggcgaacagcagtagtattagcagtttctgggaatttttcgtgggaaattggtgataatcaatatgagaatcatgtagagccttgtcatacctttccaacgagtacttatgcgttcgattcggagttataatttaggagatatcgctgtttgaatccggttatgttgctgtccaaaaacagattgcag

SEQ ID NO: 28548 - DNA, 396 bp, Zea Mays
cgccactgccactgtcgtcaccgtggagggagaccaggggatgccatgtcaacaagacaaagcatgcctcatcgccattggtttttcatctggaagcctgctaccattggacaccgttttttcattgagcgatgagattttatggtaccagatcgaggtgtgcgagctccggtgctagtagtgagcatcgaaagtgagtgtccttttctgtgcatgggcaataagactggctctgctgcctcacctaatcggtgatgagtgagtgtctaactaaaagtggcaggaaagtgagtgtgtttagtcaggtgtacctgcacattactgtctctcgggtggtcctttatatatatgctatgcacatcttttttttaaaaaaaaacatccaccattttgtgc

SEQ ID NO: 28549 - DNA, 306 bp, Zea Mays
cgctcctctccactcgtttctttgcgcatcgaaactcgctttccttcctattgccgaatccgcccgccatcgccgatgtagggagagagtagaggagaagccgtcgtagcagcaccacgcgtccgtaacctcctcatccttggggccgtgtctgagggctttgctgggtgcctcaaggagggatttctcaacctcaccgggtgggccgcgtccacaaaccgccaggcttcgcaccgccgtccgaccgccgtgaagaagccgccattcgccgtagtcaactccgtcgtcgcttcctttgttggtaag

SEQ ID NO: 28550 - DNA, 473 bp, Zea Mays
cttcacatgattaacttatggagttaaattcaatttgtcatttacatcacattgcgattattttattattagttttatttattattactatggtttggtatttacttacacttagtaactgctaataaaattttgaccaacttataaaaagcaatgctcagcttcaacctttattttgttaatcagtcttacacttcacatgaactcccaccttggtgagttcatacacattatttcccacaacttgttgagttatgaacgtatgtgagctcacacttgctgtctcacaccccccacaggagaagaatatgtggttcaagaggagccacacaacgaggagttcgacttgatctagctggcgtctctcagccagctttgtggcaccaaaaaaataatatttagttcaatttatatttatcatttattttgtaagacttccgctatgtaataagtacatttataatatttatcac

SEQ ID NO: 28551 - DNA, 235 bp, Zea Mays
agcacgtccactttcactctcacaataacgctgcccaggcgcagccatgacttaattagaaacttattgtcaaaggaagtttgtttttttatatagtcgtgcgcactggttaatttagttcaggtcgtatgtttatcttcccttgctagccgattaataatacttagtatgtttttgtcatgatatatgtttataccctgttgccccctcatttatgcaatcttgcaaaggggat

SEQ ID NO: 28552 - DNA, 259 bp, Zea Mays
ataatgcatatcatgctgggtatttgtttgttgcatttggattgctaaacctagaactaaaattagaggttcaaaatagaaatcaaaaaggagaatagaaaataaaaaacaaaaaggaaaaaaaagaaaacaaccacttggcccaccttttccttggcccaactccctcttccctttccatccgctcacttgggccgacacgtagccaggctccagcccacgcgccccagccggtagaagcctctgcaccagctctcct

SEQ ID NO: 28553 - DNA, 1298 bp, Zea Mays
ttagtgcaagtagtctcttcttcaccttagccatggtacctcggtccataagccatcgcttggccttcaccttcgcctggtcactcgaagccatttccttgctatcttcaccttatcaagccattcttgagtcacatcatattaagcatccattgagagaatcatttcttcaatattgtgaaccttgcttgaatgtcatgtagatataaatgataagatcaatcaagctctagtatgattctcatagacgtagatatggactaatagtaatatggtcaagtcaattcatgattcctcatatattattcactttggcttgaccaatcctctcaatcacttcaacctctattctaatcatatgtatgtagtgatttctcaggtcttgtccatatatatattcaaaccaatacagagaccatattatatccatttgcattgtctcattggttatttaaccttgtgttgaatctttattcactgatcattatacactattcaagtatgttcatcatactagttgggggttttctcctccaacgaaggccctcaaggaaaaaacaccttcggcaagacagtacaaaggcaggcgagacacgaagatataagctaaaaatgatgcggacaaaagccgaagctatagctgaaagagcttcggcttgatattgcgataagggtgaaggacgataccgacttaaaaaggaaaagactatatagtctttaatagtttgcattacaattataattagttaatagggacatggatgtaattttgtctgggttgcgtctcgtgcctataaatagatgaacagtgcccctgtactgttcacgctggatggtaatcacttgttgggggccttcggcttccgaaggtcctcaaaaacatgatttaacaatgtttttggagtataatgcgtggacaggtatcttcggattcgaatcagtaccacagtgggagaagcacaaagaatacggaggttgatgcggcgccaaagctgtgagcaggagagcttcgacatgatagcagaaaagaaaaccgacttaaagatgaaaaggctatttagacctcgatggattactatagagttatttgcggatgtaaagggcatgggtgtaattttacatgggttgcgtctcgtgcctataaatagatgaacagtgctcccatactgtttacggagactggtcatttgcctttgtgtcacgcttgtactcttaccttctttcaagccaaaggtacacttgtaatttgatatcatttctatttttccttagtaataaaatagaaatgagataatgat

SEQ ID NO: 28554 - DNA, 489 bp, Zea Mays
ctcgttgttgcacgcatgcccaagcacgacccagtggtgccacgcccctgattgccttcacctatcctctgcatcaccgcaaccatgctactgatcccacgtcgttgtcgcttacacacgctaggttttttttctttttcctagtgtggcgaacgctgacgtaatggactccttcgccacgggcaaggatcccatagtgtctccctcggcagagattttggcatccaggttagtctaggccatccaagtccagccttcaagaagattatccatttaggtttctagggctcagttagatcgatcgatgcgtagatcatacatcttcttttatggactcggttaagtttgttgtctattaaggtcgctgcttagaatttagggcatttttgctcgaacattgttgtttggaagtcaacatttgcctcaggttgacatgaatgatgcccaccatgtgttcgttgaaatcccttcatggtaataagttttgat

SEQ ID NO: 28555 - DNA, 431 bp, Zea Mays
agaaatcctagtaattaatatgataattaaataatataatagttattagtctaaaaacaagtattttatttataaataattaaagtgaatttatatgaatttttgagctctttcaaaattcatttcgaaatttaaaaaaaaaagaaaaaaagaaagacctaacctaactggcccactaggggcccaaccaccccaaaccctaatgcgcgcgcgtgcattccaagccagccgccaccgcctgtgcttccttctccctccctaactctctcatctctcaccctctacctcgcttctctctctatcgcacacgccaggagccgtttctttctccctccccctttctctctcttctctcctcccttctctcttccacgcgcacccgaccgaagccgcaaccttgcggccaccctgcactgcacgcacgccaaggg

SEQ ID NO: 28556 - DNA, 1397 bp, Zea Mays
gggaaacacatcttcgtcgaagacgacgtgacgagagatgatgatgcggtgggaggtgaggtccaggcaccgataccccttgtggtcaggggagtagccgaggaagaggcagcgagtggagcgaggagaaagcttgttgggggcggtagcggaagtgttagggtagcaggcacagccgaacacgcgctggtggtcgtaggaaggggatgtgtcgtacagggcgaagtgaggtgtagggtggctcaccgccttcgagggaagacggttgaggagatgcgtggcggtatgaagggcctctgcccagtaggtggcagggagagacgcctgaaagagaaggcagcggatcatgttggtggtggtgcgaatcatgcgctcggcccggccgttctgagcagaggtgtagggacacgagagacgcaactagacgccgtgagtgaggaagaaagagcgggaggcgttgttgtcgaactcgcggccattgtcgcactgcaaggcacggaccgggcgccggaactgggtggatacccaggcgaaaaagtgagtgagggtgggaaacgtgtcggacttcagccgaagggggaaagtccaaaggaaatgggagtagtcatccagaatgaccaggtagtatttgtagccggagaggctaaggacaggagatgtccagagatcacagtggacaagatcaaaggcctgaacaaccttggacgtggaagtagaaaaaggaagacaggagtgacggccgagctgacaggcatgacagaggtgctcagaagagccccgagtatatgatatgtcggagtggccggaaagctgggacacgacgtcaggtccagggtgcccgaggcgacggtgccaaatggcggaggaggtggtggtagtagcaagagcatgagatgtggtggtagtagtaagtacaggagatgaggctactctggtgtggggagtggagggcaagtgaagagaatagagggggccggagctgtcacagcgagcgagcacaacatgtgtgggaaggtggcgtatggtgaggccccaggggtcgaactccatagagcactggttgtcactagtgaagcgacgaaccgagaggaggggatgagttagtccgggagcaacaaggacgtcgttaaggcagaatggtcctggaagagccgatgtacctactgaggtgaccgggagggtggaaccgttgccgacgacgatggaggtaggatgtgaggggtggggtggatgggagtggagtaacgaagtagtggtgggggtagtgtggaaggaggccccggagtcaaccacccaatcggtggtagttcggggaggtggaagtggcgaaggtacggtgtgagcggagagggccaaagaaggtgccctgacagaggcactaggaagggagggagatg

SEQ ID NO: 28557 - DNA, 838 bp, Zea Mays
ccggtttctagtggcgatttattaaagaaccaacactacaaatagcattggtggttgataaccaaaactacctataaaaattatatgctattgtagtttttaagcttttttctactggtgacaacctcagcgagccaaaggaggaagaggacgcgcccggcgcgtcggagcctggggcggcggtggcgcctggaggctgactgcagttgatgtgggcgctgggcaacgggaacggagggaaggaccggaacaaaccggcggccatgtgaatcgtctagtcccgcacgcacgtagccagcgtcgttctaggctcctcgctggtggtgtccacatgccaccgccgatgaacccggagttgtttgtgtgctcctgagccggctgtgttggagttagtgaattatatacaagattaaatgacttcattcttctctatattatgctcagactgtctgttagaccgagacaagtaacatgatattaattaggggcatgtttgtatgcactaaaacatagtttttaagacgtcacctaggcgtataggcgctcaaaaattctggcgttcaccatcgccatgcagaattagacatggagggagggagggaggatggagataaagatgagggaaagtgttccaacactgatttctcgggagagtaggcgtcgatctgatgggaagcagcggcagtgctggagggagcttgaaggacagagcggtgacgcttgatgagcggtggtgtcatgtcccgacgatagcttggagggagctcgaagggtaggggagcagcactagaggaagatcgaaggggtgggcggcggcgctggagcgtgagagagtagg

SEQ ID NO: 28558 - DNA, 476 bp, Zea Mays
ctggaccgctcgctgcatcctgctcaagtccggccacctccaagcttctccctccacgcgcacttcgctccctccctccccttctccctgctgtgcgcgtcggatcccagctcacagagcttcctctgcgcaccatggttgtcgcgcccggggtcgcatgctctgctcgctctgctcggtccctgctgcgagctcgccggcgttgcctctgtttccatggtcgtgtgtatcctcttattccacatcgtcgtgccatccttcacctcgctcggctttgttttcttgcgccgtagggtgctcctggtcctgcgccgtcaacctgccgtgcgagctagctccacctcgcctgctcgtgtttctatctgtcgtgcgctattgctgcgtcgggcatccttggccgcaggcgataacttgctcggcctaatcgttgcctctaccgctccctcagctcgcccgagctcctcccctgctcgccg

SEQ ID NO: 28559 - DNA, 1031 bp, Zea Mays
gtaattcctcacaggctgcgtcctgtgcctataaatagtgaacagtattccgttactgttcaggcattcgattaattgcaatcgcatctctcggaattcaactctttgccaaggcaaaggtataattgtattcaatgattcagtatattaagtaaatgcaatgtaattcatctatgacatatttattcctcttatatcttttattttatgtcattttataatctttaccggaattttatcacgaaggttcgagcttcgtaattatgcttttatcaaccttcgtccaggatcctaatgtttcatagacgaaggacattaacatttaacattttatgttgccttgttcttaattctaagcatttgagaacaagtccccaacacttctcatgtccgaaataatctacagtatttcgaacaatcaatttagaatacttgtagatgaacttatgcacctgtgcaatgatcaactaaacaaactggttagtccagaaggtttgtgatagtcgtcaaacaacaaaaatgattataggaaatgttgagataatttccctttcactgggcaaggcaccagagagaggtgaccgcgccatctagtggccgcgacgcaggggacgagcttgaggacgacggcaccatgggtgagcgccatggaaccccgagcagatgggagcgcggccacagaggaactttgcgcgcaggcaaggagaagatagagggagcagggaacttgggcgccgagcaccatggggagaagaggccgagaagggggcgcggccagcagagaggcgttgggagcgctgagggagagagagctcagccgggagaacgcgtggtcgagtagagggcagggagtaacgccggtgagccaggggcgcggcgcagagaaccggagggcgcgcagccacgaaaaaaatagaggctgggcgcggcgggaggaaggagaagcagagcgcgaaggtgggagctcggctgcggctgggagcttctgtcggcgagcaggatttttaacagcctagagcggtggctgggaa

SEQ ID NO: 28560 - DNA, 3802 bp, Zea Mays
atccgatgtccttggggcaatcggacggatcctgttaagttatttagtgcacatgcatagccgtctgaggtctttgagacaaggacaggtgcatgtgggcccaataacttgggaagttctgccacaactcaataggattattcgccatgcagatcgcactctcattgtcacataggagagggactttgcttaacttgtagccatagtccgtaagggtttgcctcatctagagtaattgtgcacagcaatgtcctacagcaatatactcggcttcggcggtggatagagctactgaattttgtttctttgaagcccaaggcaccaaggatcttcccaaaactgacaaatcactgatgtgctctttctatcaattttacatccgacataatcagtatcagaatactcgattagatcaaaggtagatcccttcgggtaccatagcccaaacttaggagtgtaaactaaatatctcatgattcttttcacggcctttaggtggatttccttagggttggcctggaaccttgcacacatgcatattgaaagcataatatccgatcgtgaatcacataaatagagtagagatcctatcatcgacctgtataccttttgatctacaggcttacctcctgtgtcaaggttgagatgtccatttgttcccatgggagtcttgatgggtttggcattcttcattccaaactttttgagaatatcttgaatgtactttgtttggcaaatgaaggtgccttcttggagttgcttgatttggaatccaaggaaatacatcaactcccccatcatggacatcttgaatttctgtatcataattctactaaactcttcacaagatgacttgttagtagacccaaagataatatcatgaacataaatttggcatataaacaagtctttgtcaattgttttagtgaagagagtagggtcagcttttccgactttaaaaccattagtgataagaaagtctcttaggcattcataccatgctcttggggcttgtttgagaccataaagcgcctttgggagcttataaacatgtgaagggtacgcactgtcttcaaagccaggaggttgctcaacatacaccttttccttgatagggccattgaggaagggacttttcacatccatttgatataacttaaagccatggtaagtagcataggcaagtaatatttgaattgactcaaacctagctacgggtgcatatgtttcatcaaaatccaaaccttcgacttgtgaatatccttttgcaacaagtcgagctttgttcctagtcaccactccatgcttatcttgtttgttgcgggataaccatttggtacctacaacattttggttaggacatgtaactaaatgccatacctcattcctcgtgaagttgttgagctactcttgtattgccaccacccagtctggatctcttagtgcatcatctatcctgtatggctcaatagaagacacaaaagagtaatgttcacaaaaatgagcaactcgagatcgagtagttacccctttttgaatgtcaccaagtatggagttgacggggtgatctctttgaattgcttggtggactcttgggtgaggtggtctttgatcttgaatttcttgttcatcctcctttcttgatcaacttcatctcccccttgatcgatgccttcttcttgaggtggttcactgtcttgatcttgatcctcttcttcttgagccatttcctcatcttgagttggtggagatgcttgtatggaagatgatagttgatcttgtgcttgtgaaggctcttcaggctcttgtgggcacacatctccaatggacatgttccttagcgtgatgcacagagcctcttcatcatctaactcatcaagatcaacttgccctacttgagggctgttagtctcatcaaacacaatgtcacaagaaacttcaactaatccagtggacttgttgaagactctatatgcccttgtgattgagtcataactaagtaaaaagccttctactgctttaggagcaaattttgaatttctacctcttttaataagaataaagcacttgctcccaaaaactctaaaataagaaacattgggctttttaccagtgagtagttcatatgatgtttcttgaggattcgttgaagatagagtcggttgatggagtagcaagcggtgttaatcgcctctgcccaaaaccgatctgatgtcttgtattcatcaagcatggtccttgccatatccaaaagagttctattctttctttccacaacaccgttttgttgaggtgtgtagggagaagagaactcatgcttgatgccctcctcctaaagaattccttcaatttgagagttcttgaactttgttccattatagcttctaatcttcttgattcttaatccgaactcattttgagcccgtctcaagaatttatttaatgtctcttgggtttgtgatttttcctgcaaaaagaacacccaagtgaagcaagaatagtcattcacaattacaagacaatacttactcccgtcgatgcttatgtagttgaatagatccatagtggagtagttgaagcggcctctcggtcgtcatgatgttcttgagtggatgatgaactcaacctgcttccctgcttgacatgcactgcaaatcctgtctttctcaaaaagaacattggttagtcctaaaatgtgttccacctttagaagcttgtgaagattattcatcccaacatgagcaagtcggtgatgctagagctagcccatgttagtcttagaaattaagtaagtgtttagttcatcattgttatcattgaaatcaattaaatatagttgaccatctaatactcccttaaaagctagtgaatcatcacttcttctaaagacggtaacatcaacatcagtaaataaacaattgtagcccattttgcataattgagaaacagaaagcaagttgtaatctagagaatctacaacaaaaacattaaaaatggaatggtcaggagatatagcaattttaccaaatcctttttccaaaccttgatttccatccccgaatgtgattgctctttggggatcatcatttttctcatgaggagaacattcttttctcccctttaatgtggtttgtgcacccattgtcgattatccaacttgttccgcctgatgcataaacctacaacacaaatttaggccttgtccttaggtacccaaacggtcttgggtcctttcacattagaaacaagcaccttgggtacctaaacacaagtctttagactcttgtgtttgcccccaacatatttggcaactaccttgtctgatttgttagcaagaaacaatgatgcatcaaaggttttaaacgaaatgctatgttcatttgatgcatcaacaatctttttctgaggcatcttaacatgagttgtatgcctagagctagaagcctcattactgtatatataagcatgatgagcagcaggataagatttcttgcatgaattcttctaattttatgctcaggacagttttcaggatataaaatgtaaccttctctatcctgaaccatgggagccttgcccttaacaaagttaggaatcttgtttctatgggcattaagtttgatgtttctttggctcccaggttggacgccaatcccatccttaatgcaagggtgtctttcattataaaacattatacgagaaaatttaaaattttcactttcaggctcaagctcgaaaattttagaattcaacttagctatgtgatcattttgtaatcatagcaaggtgatcattcacagca

SEQ ID NO: 28561 - DNA, 960 bp, Zea Mays
caattcctcaatcttagcaactaaactaacattttcagttctaagacaagaaattgaatcatttcatgtatttagctctttattcaagtttttgcattttcaacttcaagagcaaaagcatcttttagcttaacaatttttttatttttcttaacgagcaagtcctcttggcattccaagatttcatccttctcgttaatggtttttaacgattcattattttttcctttttgctctatggtaaggtttgcaaaaagagaagacaaatcatcatccttttcactagagctaccctcatcattggaaataatatatttggggatatctctagaatgtaccttcttctttttgctatccttggccatgagacacttgtggccgacgttggggaagagaagacctttgttgatggcgatgttggcggcgtcctcgtcggaggagtggatggagccctcgtgggagtcccattctcatcctatgtgcgcctcgccacccttcttcttgttgtagtatttcttcttttccatttacttcttccctttcttgtcatcgtccctgtcactatcacttgtttatggacatttagcaatgtagtgaccagacttaccacaccggtagcaaatcctcttggagcagggtttgtactccttccccttcctttgcttgaggatttgctagaagctcttaatgataagagccatttcgtcgttgtcaagcttgaaggcatcaattaggagcatatttgttggtgtagtctcttccctcttttcttcctttgccttgaatgcaacgggttgcatgtcacatccggatttaagggacaaagccgggtgcatatcatatatgcgccaacgaagacaacacatataataacagagtgtatagagataaatgtcacaatatcatcatagtacttgtaacacccctggtgttactgccaccaaatttgagcataacatc

SEQ ID NO: 28562 - DNA, 1304 bp, Zea Mays
ctaagtctaaattcaggcagacagtgagattggataaactttgggttcaattttaagtaggatgtagtgacattttgtgggtgcacaatgtagcaaagttagagctggtctattaggatataactttgttgcagagcattggtctagttgccatataaaattgagaggaaattcgccccaaagctggtctgtcagactgactgatgaagcgtctgatggtacattgatctgaacttgagctctggttcagcccccctcatcgccggcggcctttgcgcccggattcgcgccggccgtcgcgattcgtgccttgggcgagtggattttgctcaccgtgaaaagatctcgtcgcggatgggttcgagttattgtggcctcgctgtccccgaccccttgcaccgacgacgtggctttacggccgtcactagagttggcgtccttcaccacgatcgtgccacgccccaagcctttaaccatgtcgctactagccgcaccagctcaccgataaccgtcgtagctcctcaaccagtgagtgccacggtaaaacgcgctggtgactcaccccttctttccggccaccgcgtgtcttcaccaaattcactggccaccgcttagcgccactataaattgacggcacggtctgctgcgttgggtcatcaccaagcctgagcacccgctcctgccgccgattagtcaccacaactctccaatttcccgttcccccaattctgtttccactgtcgtggtagagccctcaccgtggtcaatgaatcccaggtctgttcatgcaccccgctgtcttgtttcaacatccttgggttctcctgatgcttcccgaccctgccaattggactaggaccccttagatcgtcaggaatgcgcttgattgcccgtagtgcccgctgtcaccgtggacaaagtgtgttagagcgtcgttggtgaaattagttgaggggaaactcttgttagggtttgaattcggtctcagccatagtagagcaccggtcgttgcgtgaatcggccggtacaagctcgtcggagtttggttccccgccgttcgccgtcgtggactggggattgtgaagagaggaaagcgcaagggtgtttctgcaagtgtcagcgagacagaggaatagtgggagggactctttaaagaatttcataacgtcagggctctctgtgcaaaaccgacagtgcgggcgcgctttcgccagtgaatgggccgacccaggccagtttcagcccaatcctatagcatgttttcctttttctttttcttctagatttgagaattcccagaaaat

SEQ ID NO: 28563 - DNA, 2244 bp, Zea Mays
caaactttttaggtaaactttaaatattatttagaagccttgggtaaagttaggtatgatttggaccatatttgatacttagaacccaaaaccctagccccctgccctatgaacctcactttagactctgaaaaccctagtttctcggagatctgtgaaggaaagttatattcaatacattagataataaacttttattatctttgaattttcatgagcattacatgagcattcatgattatatatggttatatctagaaaacgaggaggaaatagaagttgaagaagcgaggacttcaccaccaccacctgaagaacctcaggcaggaaactgcttttactttgatatctgcgggacagagcctgattcacctatcacacaaggcaagccccggtgcatttgccacctccttgctgttttaaaatctttctcacttacttgatgcattaggtgataggagttgtgtgctaaaccagttgctgcatttccttccttggatttgattacttctcctgaatccctgatttacaacaaggtttttcttatgcttagctttgctctagaaaacaaaatgttttgttttcacaaaagatggtgcttcaaagtgggtgggatgttttgaaaaataaaacttgatggtggatccatcatggccatgatgggttcagcatcggaaaagacgtacctctgcgaggtaccaaactttgggtttcaaattataaagctgagaccaggcgggtgacttgcacgagaagagagtctcggtgtagtgtaacaccccgggatccacaaacaccccagaatgctactaaactacacatctgacattcatatataaaatttcggcagcatctcctttgaaaaattgcataaacgagggcaatagtgaataaacatatatcatgacaaagacatagtaagcattattaatctgctagcaaagggaagttaaacataacgacatgaactgaattaaccaatgcccacgattagaaaaaacaaacatctatatcgagtttctaattaaaatcatggctgcaactgggcagcgttattataatagtgaaggtggacgtgctgctacttttctcattccccacatgaatcaagtacctgcgttgagtaatgcaagagtgagatgatacattgcagcaagcaaattgttttgacgagatattttaaaccacaaattgaattaaacaacattttaaaggaatcacaattgagatcagaaatacttgtagatatagaactcaatagtcccaatataaccaataccatctcatttcctcgaacaaccacaataggttgtataacactcccctgcgtcaacaatacctacagatatcacttcattgtatgcataggaatgcaatgtgtaggtcctctaacctcatacctctgagagtataaaaccacatcatctgctaatatcacttcaatgaatgcatatgaatgcaatgcatatgtcctctgccttcatacctctaagggtatgaagccgcatcgtacccctcctcgagcaacgtacgatgctaagttgtaccggtacggtcggaccataggtcacgaccaaacttcagatgcaaatgaatcatgcaatgcatatgacatgctgcatttatcaatatacttcacttccttcagatacaatacaaacctcaaataatacttcatcttcgttcaggggtgtaaattaatctcattggtgatactcgaaccataatcatcatccatatatgatagatcatcaatataatacagtcaagtaaaacatcatcatagagttcaattatgaaagaatccaataattctgaatattagagtgtaggcgatagaaataataggtcaaaacggtagcaaccaccgctacagattctgcatagaattatgagacagaaaaactgctataatcaaaccgcaataactttctgatctgatgtccgattgaggtgttcttcgtggccacggaaagatctacaaattatctacgactcatagatagacttcttatttttttgaggccactaagaccacagaaaactggcatgaacagaaactgtcgaatctgccattctgcagaaactaaatttgagatcaaaatctaacccccacatccaatccaacgaaattgcagcacaattaccaaaaggaaaataatatcaccttggactccttttctttctttcttcttcctcccaccaattcaccaatggagaatgcagcacaccaaaggagcaacc

SEQ ID NO: 28564 - DNA, 4020 bp, Zea Mays
ttgagaagaggagggagcgatgcccccgatgtccttgatgcgaaaccgacggctcacaaccaaataccccatccatgccccgatttagacaattgaatactcaaatgatatcgtttaaatgagatcttcacatctgcggactccgaacttccaacggcccacaaccattttcccacatccacgcaccgaagatcaacttttggtcaacaatttttttgggatattacactctacccccttaaaaagaattcgtcctcgaattcgaccactcccagcaaaacatccaaggtaccccaaatagcaccaccattcaaaacatgggtccattattggtattaatcaacacaagaacttctacctcggactaattgtctaaggaagctacacaacctgacaacaagtatgaaacaacatgcaatgaagctcaaagcaagtcatagatgcaatcaacactacgatttcacaacatcgaatttggatgcagccatacatcagcatcaatgtcttaaaacgacactcttttatgaaggggtaatatgcactaagcacaacccttaccaacttcaacaattcattttaattaaatggtgaaacatccacaccagatgaacatataagaagatcaaacacctcacctcacagcaccataaaacaagtagttctattgaatcaaaactcctaatcttcctaaaccctgttcttgtcatcatgaaaagataatcatgtaatctaacattctttgcaccccaaaaagggcaaaagtctacagaactaatggagcaataaagccgacaagaagccaataacattttgcgcagcacagttcatcgatgaaataccaaaaactccacaaagagcattgacagcacaacaacaacacaatacttgcttaaccaatgtcgctatacttcattcaacaactcaattaagaaaaatatccaaactagtaagattaacctacacataatataagtcttcatctactgtagttcagaaacttacatttcattctatcatacgatgcactcaaagtaccagacatacgaggtcaataataaccccttaatccttcacacatttgacaaacatctcaagttgaggtaaaaaccacatcatttaggaataggtgactaaccacacactaccaactctaggctaggcaatgacttcattcaaaccaatagataggtggtccaacaatggctccacaagcatgcatcggggagagaaccatctgatcctcaacgtattaatacataatcaatggatcaagaaaaacaaagatttattctacaactagcatgactaacatgcaaccactttaaaccacctctaggctttgtggctactaaaacacacaatagaagagagacatgtaagccattctgggctatgaaaagacttcccccaaaatccatataaaagaccaatattcatttctttcagaactggtttctcgacataaacattcattctttacaaagatagttggagctatccaccaaccactcaacaacttaaattcaaattgatgattaccttgtaccccaaaaacacgcaattcacactcctcttagaaacatcctcaatcaagcatatataacaatattattgtaataaaactcacccatgaaaaacatggtgaaaacaacataggcatacttgtatatcacaagcatagtaacaacttcaatctcacaaatgaccagcgatatgaactgcattaataaaacaatatcaaaatttcagaaataaattatatcaagcattaagccataaacaacttaccacatcaccgtaaaggaatggggaggggtgaaattattgtcatctgcacttcaaagacactaatatatatcaaagatacatgaacccatacccttccttatatgtgcaagtgtgtcaaaatttatcttcaaattgccaagaatctaaagcctaagctttgataccaactgtaacaccccgggatccacaaacacctcggaatgctactaaactacacatctgacattcatatataaaatttcggcagcatctccttttgaaaaattgcataaacgaggggaaatagtgaataaacatatatcatgacaaaaaacatactaagcgtttttaatctgctagcaaagggaagttaaacataacaacatgaattgaattaaccaatgcccacgattagaaaaaaacaaacatcatttgacattgagtttctaattaaatcatggctgcaactgggcagcattattataatagtgaaggtggacatgctgctacttctctcattcccaacatgaatcaagtacctgcattgagtaatgcaagagtgagatgatacatcgcaacaagcaaattgttttgacaagatatttaaaccacaaattgaattaaacaacatttaaaggaatcacaattgagatcagaaatacttgtagatatagaactcaatagtcccatataaccaataccatctcatttcctcgaataaccacaataggttgtataacacttccctgcatcaacaatacctgtagatatcacttcaatgtatgcataggaatgaaatgtgtaagtcctctaacctcatacctctgagagtataaaaccacatcatctgctaatatcacttcaatgaatgcatataaatgcaatgcatatgtcctctgccttcatacctctaagggtatgaagccgcatcgtacccctcctcgggcaacgtacgatgctaagttgtacaggtacggtcggaccataggtcacgaccaaacttcagatgcaaatgaatcatgcaatgcatatggcatgctgcatttatcaatatacttcacttccttcagatacaatacaaacctcaaataatacttcatcttcgttcaggggtgtaaattaatctcatgggtcatactcgaacattaatcatcatccatatatgatagatcatcaatataatacaatcaagtaaaacatcatcatagagttcaattatgaaagaatccaataattctgaatattagagtgtaggcgatagaaataacaggtcaaaaccgtagcaaccaccgctacattcacttgccttcatcgaagaagaaaaatgtactaggcatgatccagagtgtagccacctgctagcggatataaaacttagtacaaatatttcacaaacatttgccaacaatcaacaaattgctcctacacttgaaaccaagactcggtggaaagactcccaccctgaaccacatgccaaacagcagcagcgctgtttgttaattttgtatctttaaaattataaaagtgatgacatcaaacaaatactctaggagtatctacacaaaatactctacaactttggtattcaatggataattaaattcttccatctataagttctaaaacatttgataagataactaactgaatctgtttcagtcagcagcatagttaacttcgaaattcgatatctcacaaactactcaaccaaaaatcatgaaattctactagcagtaagaacttgtatccctctaaagaagtccctatagttggaagagccaattcggccatttacctaacaaaacctaccagtgaacagatccgatcatttttgttaggcaaacaggaacagccacagtaaaacaaacataactggagtttcataattcatatgaatgcaatctttaacaatctggaaagcttatgaaattatctacaacttttcttgcaaactcaaggtttaattctattgataatattgcctaaatctgaagagaacagattctgcatagaattatgagacagaaaaactgctataatcaaactgcaataactttatgatctgatgtccgattgaggtgttcttcgtggccacggaaagatccacaaattatctacgactcatatatagactttttttatttttttgaggccactaagaccacggaaaactggcatgaacagaaactgtcgaatctgccattctgcagaaactaaattcgagatgaaaatctaatccccccatccaatcca

SEQ ID NO: 28565 - DNA, 1577 bp, Zea Mays
cggctagggtttttgagaagaggagggagcgatgcccccgatgcccttgatgtgaaaccgacgactcacaaccaaatcccccatccatgccccgatttagacaaatgaatactcaaatgatatcgtttaaatgagatcttcacatctgcggactccgaacttccaacggcccacaaccattttcccacatccacgcaccgaagatcaactcttggtcaacaattttttttgggatattacatgtagtgtctccgtctgagtcgattaaggaccttcttgatgtaggcttgctgatcaaggaccctttaactggtcacatgcttcatcatgggtaagctttgcctcgggcagactaataccagaataagataacacgcaatgggagtggagagatggcgagagtagcgtgtaccctccgtggcaagaggctggatggtggtgtatctgtgctctcggttggcgtgaacctgatctggtcttaagaaccctggtggcgagctgacatatgcaagggttaagtgctacatatgtcatgtgattggagatccttagctgagtataatcgattcggatcaccgtaacttcacggacatgaagacttggtcactgccctacacgtagcattccagtgaataagaagggttgttaagaaatttgctagtataggtcaagtgattgaactagggtagaaagaactctagatacaagtaaatttacttaacctgacaagtaaaactggattttaaggatccactattagtaagcatttatgcaaacatagtctttgattattgataagctataccttgactcccaaaggccagcatatccttgagagtcttttattttgacgggtaagacttgcaaaagtacatttcgtactcaaggctttgtcccatgttgttttaggtgatgaagtagcaaacttttgttgtttctgttccaaggtggcaccaaaagaagaaaatcaagattgaagctgcaggaggaaaggtcctccgttaagaaaaaccttttactgtttatcgggagcggttttcgcctcccaggttatgtaataataatactcagcactcttatatttgctctggtctataataaatactactctttcttacttttaaataaagtaagttattgtaactacttccacattttcgtacctccaatgtattgtaatgtctgtgtgacgggtaaaacgctcttgggcaaggtaaggaattcagaaaccgaatttgtcaagtggtcaggcgcacctgcagggttgtctgagttccgttggacaagcacaactataggtgggcctaatgacttgggaggttctgtcacagctggtatcggagcgaagcccatctctgcagatgttatgagacattttcaaaaagaattttcaaagacttatctagaaattttctttccttcttatctaagtaccttctgaagtacttattttaaagatcagatagtagagtgcaatgtatagaaggttgtgcatcaactaaggttgattctttaattatacatgcatcatactaaaaactatactaataaaaatttccccctcatggagatatgac

SEQ ID NO: 28566 - DNA, 214 bp, Zea Mays
gcgttgggtcatcaccaagcccgagcacccgttcctgccgccgattagtcaccacaactctccaatttcacgtttcccccaattctgtttccgccgccgcggtagagccctcaccgtggtcagcgaatcccaggtttgttcatgctccttgctgtcttgtttcaacattcttgggttctcctgatgcttcccgaccctgccaattggactagga

SEQ ID NO: 28567 - DNA, 520 bp, Zea Mays
acactggaggacagagggaaggtcgccagcgagcaaggagacgaacgccgagcaggaacgagatccgggctgggagatgggcagggatggagctgggccgaacggctgccagcagggggaagtcgccatagacgagcagggtaggagggagctgggcgcgcgaccatggagatggcggccaggagagtgagcagagggtgagcgccgccaagagcagggcgcggctaccaggaagcaggggcgcagggaataaggaagaagcgcgcggcgaggaggcaacctggaggctgagctgcagcagggaggaagctccacgccagggcgcggtctgagcagagaagcgccattctggcgagcaggaggaggagctcggcacagcggccatggccgagcagagaggggctggggactcgcgacgagcttggggaggtgggcggccgagcggagggatccgccatgggcgagcacagggagtgcgcgcgcgccaccatgggcgagctgggcgcgatgaaggggctcg

SEQ ID NO: 28568 - DNA, 275 bp, Zea Mays
tggcggcgagatttttttttgaagcaggagcagagcggcggctgaaaggattgggacgcgcgatggccaaaaaaatcagccggggaggaagacaggccgggggcggctggagattttttttccatttttttttatttcttcttttttaaaaaaggggttctgatatttgtagcgataaataaagggtcaatacgctatacgactacgcatatatttttctcggattttgaaacaggaaaccgaattggccagcaatggttccagtttcagtttat

SEQ ID NO: 28569 - DNA, 373 bp, Zea Mays
ttcgtgtaaaagaagccgagatccttcgcatggctgacctcgtcgcgccgcccatttcggtcgggccgctgcgactctgcctcagagtatttagccctgagtcgtctacgccgtgcgccctaatctaatcccgcgtccacgttgtacgactccgccgcgtagctagtttccaccgccgctgttgccattgcgaactcgtccgagccgccgccgccatcgtggattcgcattccggtcgccggtttcgcctctgtcggtggtcagggagcttcgcctcgatacgtgggtggtgtccgtggcatcgtcgcacagctaggagctctagccgcgggcaatttcgcgccggtgttggtcctgcgtggtggatccgcct

SEQ ID NO: 28570 - DNA, 1137 bp, Zea Mays
ataaaaagaaaacaaaggaagggaaatccttccatagccgcttcagaggatcaacaacaggtacgactaccgatccggaagtcatcacacaatgtgcctatgctaacgagaagaaaaaatcattgtggctatataactatccaattcaactaactgaattaataaattggctcaccatgatcgaattgatttgataactgtgagggcgtcgacggttcccagtttagacatccggtcgagctcctggcaattgttgcacggacttctctcacattttcattccactctaggatcactctccggaagacaaagtcgacgatgagccccatggagtgaacaacgtcgttgctgcacccaccacatagagacgaacgacggcaacgccacaacggcttcacggacatggcgaggacgcagggcatgacaactatgtcgatcgggattcatgagatcggtgacgaagcttagcttgagcatttcatcgaacaactaaggagcgtcacatgtagcttcatccacttctccatccacaacacccttcttcacccacagcaatacatcaaacaaaagggaaacacaaatatgtagctctgaacatcagccagccctcaaccaacacacagtgagcaacaaggggattgaggagttgggcgagctcggttttgggaggggtgagatgaaggggctcgactgggagatggagtagggcacatgacagctcggaatcggactcggagacggcgatcggcacggacgggaggagctcggagcgcttccatggcgagcaggggagggacgagaccgacgactcgacggcggccgtgggagaagcagaggcctggaagccagccacgggaaggacgccggggagcagaaaccagggcggcggcgtgtgcgcagggaggaagaagatctgggcgcgcgcagcgaggagcgaccggcacggtggagcaggcaacccggggcgcagggagctgggcatgggcgcggcgctggagagcgaacagggcgcgaccgatgaacggaacaggagggagctccgcgagctggaggccgacgcgtgtgggagaagcaaggcgcgccatgggagggagagaagcactgggagagagagaacggcgcagagaagaagcgcgt

SEQ ID NO: 28571 - DNA, 429 bp, Zea Mays
cgcaggctggcccacgagtcggcgcacggtaagaggagagcagttgggccgcgcagaggaaaatgagtattgggccagattggagttccgcagcccagggagctttttattcttttctttttatcttttctgttttctgttttcttttctttttattttttttaaattcccaatttgaaattgaaatatgagtgtgaatctagtacccaaattaaaggtaaactttaatcatacccgaatggttgggtttatatttttatagactttgttttatattttataatatctctatcttccttttctattttcaaatcaattttcgatttagggtttactttaaatcctcatcccattatcattacattttattcatattattattgcttttaatgcacaaacaaaaatccaaaataatgcaatggtttattt

SEQ ID NO: 28572 - DNA, 1333 bp, Zea Mays
gttgtttgctgctcgtggtcgtcgctgaacgccgctcccagtgggaaagcttttctagttcgcgctttgtcgccctctatcgccggatgccatcctctctcgccacctcattgccgcaccgtcgtttttctcgtccagtgctcgcgcagtctttctcaaaccgtgctgccgtctcccaactgcttgcccttgccccctgcacgcgcttgtcatgctagtcaaccccgccacggtcatcgtcatcgatactgcgcttgccggtggctgaagctcgtgtcgccctctccctcactggatttgtgtcctcgccagctcgctccagactcgatctcgtcgtcgttccatacgtcgtcaagaaatcccaagcgtcaggtgaagacgaagctagcagcatgatatttaccaagtgctcgacaaaaaaactcgaacaagtcgtcgatcgtcatcctcatctacgccaagatccgagaagattagacgcagaagaaaataaatcagtacgcggtcggagaatactcgatgcagataaagatgaagcgcgattcgacgtagcactcactctatttccggtgaaatgctgagctgaaaggcgtcgtcgatttcgtggtttcaagtcggatttaattgatggtaagttgcttcgttattccagtcaactaggtgtttaattcgctatcgcgtagcactatttaggtctgtaatatttctgtctatatgcattcatgtgcatcgtgcatttcaattaggtacgataattaatcacgtgatgcggaagacgaaccaagtcgactcgaagtgcgggctactctgcatggtggtggtgctggtagacgaacctgccgatcaagtgctaggacaaggatgatcatcaaatggacttcgcctaacaaacactaacctagtgttattcaggcaagccccggtgcatttgccacctccttgtgttttaaaatctttatcaccttgtttgatgcattaggtgataggagttgtgtgctaaaccgttgatgcatttccttccttgaaaattgattacccttccttgatacccgttttgaaaagaattttatgatgcttagccctgctttagcaaacaaaaatgttttgttttaaaacaaaagtgatgcttcagtgggtgggaatgttttcaaaaataaaacttgatggtagatccatcacggccgtgatgggttcaacatcagaaaagatgtacctctgccaggtaccaaactttggattgaaaataataaagctgagaccgggcgggtgacttgcacgagaaaggagtctcggtgtagtgtctccgtctgagtcgattaaggaccttgtcgat

SEQ ID NO: 28573 - DNA, 543 bp, Zea Mays
ctgacttacacgtagcattccagtgaacttaaagggttgataaaagacggctagtgcaggtcaagtgattgaactagggtagaaataactctagatgcaggtaactttacttaatctgacaagtaaaaagggattttttaggatccactcatagtaagcttttctgcaaaacagagtatttgattcttgataagccataccttgaatccctctagccagcatacccttgagagtcttttctttagttgggtaagtcttgttgagtaattccgtacttagggttttattccctgttgtttttcaggttatagttttgtgctgctgatgatggtgttaagtgtcggtgggctcgaccttcttataagtctaagtacttcttctgatggtcacttaagctagcatatatttcaaaactaccaataatctataacagttcaaagttatttctttgaatcactttttgtaatcactccgatcatgtacatcataaaaattgatgtaacttgtaaaatttggtaataagatttccgctgcaaaatgttg

SEQ ID NO: 28574 - DNA, 665 bp, Zea Mays
gtcattatccccgcctcgctcgcgtatatacccatacccatgcttcattgcatctgtgcgtattgcgatggaggcggatgagcaggcggagccgcggaggcatctattccccgattggatttgtgcgcctccgacctggtgttgctgtcgcgatgagacgcagatccaaatgcaggtctgtcccatcaaatcggtcgtcttccttcctttgttccccaattggatccacagggggtagaggaaccccgccggtgtagcggcccaagctgctgcaagccgactatgcaccagtgttgtgaactgcgatgcactcgcaagatagtcccggtactcagccctcccgtaggaggccctaggagtaaaccagatctatatcttcttgcctccctctactaacaccttgtccctccttatatagagaggtaaccctaacttaatagctaagcaacataacaaaccctatctgaccggcactattcacgcgctacagtaaccgcacgtgaacaattgccgcggctaacctaaccataatgacctagctaatgggcttaaggcccataacattccatccctccttaaaaacagctcgtacgtgagctgtagtcaagaattgacccatactaaactagcacttaatgactcaatactaagtcttttacatctcg

SEQ ID NO: 28575 - DNA, 240 bp, Zea Mays
accactatagcctcaaatacctcctcgaccagcgcctctccacgatcccgcaacaccactgggtcgggaagttgttgggctttactttcactatggagtacaggtcgagcgccacgaacgtcattgcggatgctctgtcccgccgcgacacggaggagagcgtgctgctggcgatctccgcgccccgcttcgacttcatcgcgcgccttcgtcaggcccaggccatggacccggctctag

SEQ ID NO: 28576 - DNA, 723 bp, Zea Mays
cgctggctcccctgggcggagtacgtctacaacacggcctaccagtcgtccctccgcgacaccccgttccgggtggtctacggccgtgatccgccctccatccgctcctacgagcccggcgacacaagggtggcggcggtggcacaagaaatggaagcacgggaagcctttctggctgacgtccgcttccgtctcgagcaggctcaggcggtccaaaagctgtagtatgctaagcaccactgggaggtcacatatgaggttggggactgggcattccttcgccttcgccaacgtgtggcggcgtccctgccgcgaaccatcactgggaagctcaagcctcgctacgtgggaccctaccacgtcaccgagatcatcaatgacgtggctgttcggctagaattgccgcccgacgcacgcctgcacgacgtgtttcatgtcggcgtgctccggaagtacgtgggctccccacccaccacaccgccggctctgccgcctctgctcaatggtgcggtagtgcctgcgcctgcaagaatagcgggggctcgcttgtcgcgtggcgtgcggcaagtcctcgttcattggagcggcgaaccagcttcatcagccacctgggaggagttcgacgacttccgcgcccgattcccagccttccagatcgaggacgagctggccttcgacgaggggagagatgtcatgtacgggcgctcgtacgccaggcagcgt

SEQ ID NO: 28577 - DNA, 626 bp, Zea Mays
gctgcacggatccatagcattgctataaaaagttaattctctgatagttgttgttaaaccaaaccatattgggtttgttgggtgttttgacagtctacatatgcttcgtgtcctccaatcgctggacctttgtctcactatattgtcttaataggtcgcacaaacagaagcaagtactcatatgctcctaaatctggtgtgaggtacgacgggttttacagaattaagaagtgttggaggcagtttggtgttcaggtaacttagccctcctcctgtatacagattgcagatgtagctatactttcatattatgcagctacttgtcacctacaaatgaagctaagtgtaagagggaagagcggaacaaacaacaacataaaaggtgaactaagatgaccaatcatttagttgaaaagctggttgttagttatttgtttgttggacgagaatacccattcttgtgttgctactgcttactttgataatagattttttttgttttttttttttctatgcttccaactcatactatctctccttgtttatcctatccaggtaaaggctgatgttgtttttaagaaagttgctttaaactctatattgtatctgaaggtagcgctagatct

SEQ ID NO: 28578 - DNA, 280 bp, Zea Mays
cttagagcttgcgcgtaaccttcacagggtctagggagtggtgtgttttttgtgttttttttgttttttctgttttttttgagtaagcctgcttagggctttgtaccttggtccattttggaccttttttcttctctaattaaaatgatgcgcagttctcgtgcgctttcgaaaaaaaaagctttctagaaaagtcctagtttactatttttgggtaaatatcttgtgagctatgactgagacaagtgactgctgtattgctgtccaaaaattctgctag

SEQ ID NO: 28579 - DNA, 915 bp, Zea Mays
gattatttatattcccatttcataaatatgaataaatattcatattacttatattacattgataccttcggcttgctagaaggtgaagtgcgagagtgacgcaagagtgattacaatttagcgtgaacagtgtggggggtactgttcatctatttataggcacgggacgcagcacggacaaaattacatctatgtccctgttaactaattatgatcataatgcaaactgttaaggactatacagtcttttcctctttaagtcggtatcgtctttcgcctttatcattacaccaagccgaagctctgtgagccatagcttcagcttttgtacgcatcatcttcggcttatatcttcatatctcacttgcctgtcctgtctagccgaaggtgtttttgtcttgaggaccttcggcggaggagaagacccccaacagtttctcttgctaggagttgctcaaaggatgcggatgacgtatgggagcaaactcaaatcgatactagcaaagaaacgttagagagggaaaacaaatcgaacgagaatcaaggcaagtaggcacgatgatttgttttaccgaggttcggttctaaagaacctagtccccattgaggaggtcacaaagaccgggtctatttcaaccctttccctctctcaaacggtcacttagaccgagtgagccttttccttaatctcacgggtcacttagaccccgcaaggaccaccacacacttaagtgtctcttgcttcgattacaaatctcttgagaataagaaaggaaaaaagaaaaggccaaaccaagcgacaagagcaacaaaagaacacaagtgatcctctcacaagccctaatgcactagagttgattttggggctttgagtggattgattgctttgattgtgtcttagagtgttgggctttt

SEQ ID NO: 28580 - DNA, 469 bp, Zea Mays
tttttgattgctcataattgattttttgaatattgaatagcatttcttcttaaatagaaatccaaataaataatataataattattagtccaaaaataaatattttatttataaataattttggtttaattattgtgaattttagggttatttaaaaatattttttgatttagaaaaggaaatagaaaaaaaaagaaattcgaaattgaaaaaaagaaaaaaaaagaacaaaacgctcgttctcagccccagccaatcctgatcactcacccagcccagcttgagcgctccttttccctctcttgatcacatagtggtgggtcccatttggcagtatgtttcttcaatttccagcgtctcctctgctccttcaaccgtgtagccaccgcccatgccgcttgagctacttgcaagttgctgcgtgtcttcgccacgcaccactgatctccgtagtggagcacgaccggac

SEQ ID NO: 28581 - DNA, 476 bp, Zea Mays
ctttaagtgtttgttatttatgttcatttggaatgatttttgattgctcataattgattttttgaatattgaatagcatttattcttaaatagaaatccaaataaataatataataattattagtccaaaaataaatattttatttataaataattttggtttaattattgtgaattttagggttatttaaaaatattttttgacttagaaaaggaaatagaaaaaaaaaagaaattcgaaattgaaaaaaagaaaaaaaaacaaaacgctcgttctcagccccagccaatcctgatcactcacccagcccagcctgagcgctccttttccctctcttggtcacatagtggtgggtcccatttggcagtatgtttcttcaatttccagcgtctcctctgctccttcaaccgtgtagccgccgcccatgccgcttgagctacttgcaagttgctgcatgtcttcgccacgcaccact

SEQ ID NO: 28582 - DNA, 364 bp, Zea Mays
gtggattttaagatctaaaagaaattctagaatttagaagtggagaaagaaaagaaataccacataaaacataggaaataaatatatacataaatatattcttttcatcaccaaatttgatttggtacatttgacatatgtgcaaatctacaactaaattcaaatttaaatttgaaatccaaaaggaggaaggaaaaataaaaaggaaaagaaaacaaaaaaggaaaaaaaagaataaatggcgtctgggccaattccttgccatctggcccatctagttcctccgctgcggcccaacttctgttattggcgccgacaggtggggcctaagcatcagcctcccctctgtctatgaaacccccgc

SEQ ID NO: 28583 - DNA, 414 bp, Zea Mays
aaatagtgtaaaaagaaatatattaaagtccaaagtggaatttaagatctaaaagaaattctacaatttagaagtggagaaagaaaagaaataccacataaaacataggaaataaatatattcttttcatcaccaaatttgatttggtacatttgacatatgtgcaaatctacaactaaattaaaatttaaatttgaaatccaaaaggaggaaagaaaaataaaaaggaaaagaaaaaaaggaaaaaagaaaaaaaaatggcgcctgatccaattccttgccatcggcccatctagttcctccgctgcggcccaacttctgttattggcgccgacaggtggggcctaagcatcagcctcccctttgtctgcgaaacaccccgcgctcagtctctgtgaccccactcgtcagtca

SEQ ID NO: 28584 - DNA, 230 bp, Zea Mays
atttgatctaaaattgagtacctttacctataaaatattatttttagatttactatatatttttaatattttaatatacatttatatatattatatgttaaaaataataaaagaaaaaaaagaaaaataaaaaaattgaaacgcaagaatgcttctgctgcgaatgtacgtttctctggagaaaaaaaacaccgcttcacgcctgcaaccccctcgcctctccatattgc

SEQ ID NO: 28585 - DNA, 607 bp, Zea Mays
caacaccaccgctccccctcttgcccatatttcaggtaaggttgctaggcactaagcatataaagctaattaccaaagccagagccatgatagcactcgtggttgcactgttatcctgggtggtcactccattgttccaattaatttgaaataatgttgttttaaccatcgggttaatgtcataattgcccatttcaattttggaacattaatatcaattaatgagtgacaccaaaattattaagttgagcggtagcacaaatttacaaagcttaataagttcccaaggtaaacaaggaatacaattgataaatctagaaaatccttaattaggtaaaacccatcaaataatgcagtatatcaaaaggtaaacattattatatgcattgattgggtataaaaagaatatgcagagggagaatccacttgccttgctcaaaagtttcctgcgggtcgtcctcaaacagattcggatcctctaccacacagtcagcttctaatatcgattcgcatatcgtacatacaaaataaatcattcaccaataaataaacacgcatcattacataaacatacatcattacattcacattaacacatcgcccttat

SEQ ID NO: 28586 - DNA, 450 bp, Zea Mays
gaacaatcacggtgcaatacgtgtcgcatatatctaccaacatttcatagcgcacatacatatgaatttcgaatcaccatgttcatattataacagaataaacatacaattcatgaatggaatcaaacaaatttcaaaaatacacaagtaaattttgggtcgtcttcaacctagggttcgtacgtgtgacggggagggatcgacagatttcgatctggtggagaagggcaggggttcggtcttcggatggcgggtgcgtggctccggcgatgaacgacgaactccggcgacgaacggcgagctccggtgacaacgacgaactccgacgacgaacgacaagcgagagagtgcgaggaaatgagagtgagctcgggtaggggaggaagggagagagagctcgacacatttatagagagagggaggggagatggagggtcagctaggggagag

SEQ ID NO: 28587 - DNA, 224 bp, Zea Mays
ggccagccaggctagattcggcccatgcggcgactcctctttttttttcttttcttttctttttcttttctattttcccttttctttttatttttatatttcaaatttgaattcaaattttgttgtgaaattcatatttagattaaatgcacaaattaaaactacaagtgtgtaaaggtatatttattcatatatttattttctttatattgtatggtattttc

SEQ ID NO: 28588 - DNA, 238 bp, Zea Mays
cgccttctcaggtgccaggggaattgcggctattttggagaaggcaggatgtgaacatgtgaagattttggcccaagccgaagctgctttctctattgatgacacgaaggatccctcggccgaagcaagcttagttggcggaaaattctttactgacatttgggaaaatggcagccgagggatagcccacgagataataaaaaagagcgaaaaagatactcacgatacaagagaagca

SEQ ID NO: 28589 - DNA, 279 bp, Zea Mays
gctgaattgattttcttttttttcttttcatattttccttttcttttttgattcattttattttcatttgaatctctaatttgaatttaagtcttgttatgaaattcaactttgagtcaaatgtataaactcaaatctgtgtaagaatcataatatatacttttttatatttatttttattcacatagtaatttcccttcttctctttttctagattcttgaattttcctttaggatttaaattccactttggacattaacatattttttatgttattt

SEQ ID NO: 28590 - DNA, 231 bp, Zea Mays
aggaccgagagatggtgatcgtgcacgtgatatggtgccaaccacaggatgccgttggtggacgacccaaggaaggatggacttaaccactggatgctagccaagcgagtacccaccccagcaaacactatctaagtgtcaaaataaaggcaagccccggttttatgcataaccgttatatatgctattttactgcacttaatgtttgtaggcttgtactgtgcacttaag

SEQ ID NO: 28591 - DNA, 271 bp, Zea Mays
taccactagctcactcgaaggtgaggcacagagaaatacaataaagcataataccacaaatttaataagtatcaatagtgattacattatcggagtttcagaaataataaccataagttttaatgcagcggaaataactaacggagaaaaccgagtaacatggcgaagcctggccacgctactcctcctggtcctctcctgcggaagcagtaacccactcggctgtctatcccggtggcagggatggaggccaagtcacaccatcaaccaa

SEQ ID NO: 28592 - DNA, 209 bp, Zea Mays
cattttgctacacttaaagtgtgtaaaaattatttaaaacacaaggaaagcagttgcatgcaccggggcttgcctggaataaacactatgttagtgtttgttagatggcatccacttggcgatcagcttttgttccgatacttgctccgtctgtccatcttcagattagttcatcaacttcatcttctggagaagctcacgcgtagcga

SEQ ID NO: 28593 - DNA, 483 bp, Zea Mays
gttaattatggtaataaatttttcattcaagtgtttgttatttatttgcattttgaataattttttattgcgcatgattgattattggatatttaataacatttcttcttaaatgaaaatccaaataaataataaaataattatttgtccaaaaataaatattttatttataaataattttggtataattattatgaattgtatggttatctaaaaatatattttgaatttagaaaagaaataaaaaaagaaaaaaaaaccctaaccctaaccctaagcccactaggggcccatgaaactcccagccgcgcccctggctcctcccatgcagccgcgccgccactcctttctcccactcggccccattctacttctctgtctcgccctgcatcccttcccaaccccgcggccgccaaaagccccgacgtgccccccagccgacgcccattccctcgcaacccagcgaccccgccccgacgcccg

SEQ ID NO: 28594 - DNA, 5324 bp, Zea Mays
caagtttttagtatgatcctttttagactagatgagtacctagctattcatacatggtatcaaacattttatcaatcaatatcttttgccaaatcaacacatttccacttgttactcaatgtagcagcatggatcaagcagtctcattagctgcgagaagcagacgattcgaatcgagttttaaaaccttgcaaggtaaacctaaacacacgacgtggcgaggcactccgtccccacacacatcaactgtcccatcgattccctggcaacagaaaggggctcaccgccttagcgtacaatgcctcactgaccccgactgccgtcgtgcagtgaccgcacttgtacccaccataaccggaatgggagaccacgtctcaggtcgcgtgaggagggcaatctgcgcgtaggttcactcaggtactaggcttaccgatttaccatatttctcggcatgagtttagtacggtcaaacgcttgacacacggtaccacaccttaatccttattccaatttccgtctcggagacgacgcatccccatggaccgtcgtcaacagaccatcatcattccgatataaaatggatacaatcaattcctgacctcgcgcgagtgccagaaaaatcactcgacttctactgagatccctaattagtaaagcagctactcgacctagcatactagtatccatcccaaaaggaatcctgagttcatgcaactagggtttcagtcaactcctacacttaagtgcacagtacaagcctacaaacattaagtgcagtaaaatagcatatataacggttatgtataaaaccggggcttgcctttaatttaacacttagatagtgtttgctgggggaggcactcgcttagcgagcatccactggttaagtccattcttcaggtcgtccaccaactgcatcttgtgggtggcaccacatcacttgcacgatcatcatctctcggtcctaaatgagatacaagatgcatatgtatgaatataatgaaagtagcacaagatatataaggacacagtagcgaactgacattaaattggaagacaccgtaacaaccacacgttagcattagttatctacacttcatcgggcctacgtagtcgataccactggaaagatgacgacacttactatacttaactaacacaaacatgacatcacaagtatgagcctttatttagtttgctacgacttttcattagttcttctattaatcacacaaaagcatcccaagcacaagttcaacagaggagggattcttatccataaccactactcaagcaagcacattaatcctagaacgcatgttaacctaagtttagacattataagtctatgttcgttaagtgctaaataagcatttttagccaacaggtgaactaaacaatcaaatgcgcacttgcagatttttggacagcaatacaatagttacttttttaatcataacttttcaaatattaatccaaaaatagcaaactaggactttctggagagcttaaaaggtgctctacaactttggtattttcacctcaacaagattcaacacttagcaaggttaaaagtgctaacacaacagatctgtccagatttggacagattcagacgtgtgactttaaaaattcataactaaagattcaaacatccaatcaaagtgatcttagactttctggaaagctaattaaatattctacaaattatttataaacatctctggctggtttaatatgtatcaagggtaaaatacactatgaagactgtgctgtccagaactggacagattcagtcttcacaccttaaacatccataacttaatcttcggatcaccaaaaagagtgatccaagactttttggaaatcttgtcaaaagcactaaataacttttataatcaccaagaattgattctatgttgaactgaatcaaacaattcagttttcgaaatctattatgacagtggacagaacacagcaactagtttgtaaaattcataactcctaaactgtcaggcctatggttatgaaattttaacacaagcaagataagaaaaacatatacaacgttcttataacgaccatgaacagattgtaacattaaattaagcaaacaatgcagtttctgaaatctgtatagaatttggacagattcagttactgaatttgtaaaaagtataactcccaaacgatcagagttatggttgtcaaattttaacaaaagcaagatcataaggttatctacaactcttctatatgacctttctacagaaaacatgatttagttcaccaaacatacaacacgaggaaatcactgcgtgcagtccaaaacagcaactaaataatttcagctcctatacaattcaagaattgccatgatccagagacttgaattattctaacactttgacaactgttagagttaaaataaccaagtgagaactaacaagtagacttactaatttttatacaagttatttcgtgctctagaactaccatacacaattaatcaacgcattcaccacaatcatcaaatccggcatatatgtatatcgaagcgcttttcacccactaattcgcattttagcttagacaccacatgagcactactaatttttacccgcgatcataaccatgcgcaattgggctacaacaagcaaatcatcgtgactacgagcttaaccaaagttatctaacaagttggttaactagagcaacgacatagcccgcaatacaacatacacgtcggctggcctattattatcgcagacagagacactcatatactacatcgtttttataaacatacatatttatcatgtgaatagagcattttaataatcatcccaaaacaactaactccagtacacaacttgtattacgatcctacttgaccacccgatgtgactactagaatccgcgagcacaaccatacactatatgcgaagcataatttaacgaacgcataatgcgcatcgacacgactcgactcgacttgtaaatatagagaaagtgatgactactttgacatgtcaccacctctctaattaagccaaaacaatttctacttacaacgacccaacattcatgtcaagcacattttattttacctgtctcgcatacaaccatattatggtgtgcactcgagacattacgatttaatttaacgcagtcgctactacaacgcatctcggcatactcgtttgacaatacagtgttcaggcaaaacccacacttccaatctacttatcacatccaaccaatactaggtgaccactgcattcttataacaaattttagcacaattatttatgacaacacttatcgactagacgagtgaaacaccaactgattattcgtatatctcgcctttaaatcactaatcatatgtcacataatttatattttcaacccactctaaactacaccacgatgaatacataaaatgtatttaacatagactaactcattagccgactgcggaaaccaccaaacatgctttctgctttattagatttaccacaactaacacactgctttacgacgaagtatattatttttttaacgaacaattaatacatccgcgaccaatccctacgacgtacaaaataactatcgtagccacatatatatctgatctaacacaaaataacacattggctcaccatatcaaacctcggtcgtggttgctgcacatgtggcgtgaagacgaacgcgtcgtcgcgcatgggagaccgaaacgaagccagagggcgtggctcgctgaggcgatttgtcgagcacccaacgcgcgaggcgaaggagcatgctgcggcggggcaatgctcggcgaggcttgttgtagggatttggactacgcttaggcaaggacaatggcggtgcttcagagtagaggacagagcgagcgagggctactgtaggggcgctggtcatgggaaggagcagcgaagggacgagctcggagaggggcgctgcgcagggttgctgtttttggatcgaagagttgggcgcagggaacttggacgctagggacaaggaagtggaggtcggccatgggcgacggtgggccacctgctcgaccttggacctagagaaactgctctgtgtgcggtggagccagggggaggggtcgctgtgcagcgcgccgcccagaggtgagatgcgccagggagggaggagccgaggacgccgagcagctggaggagagagctcgcgccatggctaagagcaagctcgggcttgagccatggagtagtgaactgcgcaggcttgggcgctcggatggggaaaaggaaggaggccggctcaaggtgcggcgccctggaggagaggaggagctgctgctcgcctacaccattggagctgaggagaggaagggcgccatgggaggaagggagccgagctccctgcgcgctggggaagaaggccccctgctgcgcgtgggggaaggagccagggagagaagaaagtggcggctaggggaattagaggggtgggaatggaaaatttccaaatttgcaagggagaggggtcctatttatagacatgtggtagggttagggttttcttagtgggcctaatgggcttggttgggctggcccaaaacactcaaacggaccgcgctaaattatttcccgaaataaaaatgctcctgcggaattcgtttcaacagagaacagagcgaaatatagtttggacgaatggacgatcgagcgattaattcagccgagagtctaatttgatttcgctcaaaaataattccctatgcgtggttcgaaaataaatcgtcctgagatttgatcggctttgaattttagtcggagaaggcgaatcgtgatattttaaaatcgctgccggagtgggttttcaattcggttcagacataagatatttggccgagtcggataaaattgattagaggacgacatattgagcattccgtttgagagtacggactcggattaaaatagtcggacattgatcgaggttcgaggaattagacttgggctcagatcaaatagtagtcgtcgagagtttgatttaagagcttcagatgagatttataattcgagaatgattttcgagtctgcattcgttccgagagataacgttttaataggctccaaaattggctgtttctcgcgatcgaataactccgacttcggtgagcttccatgaataatcctgataaacagagatagacacaatcgagaaataggaaattttcactgagcattcaagttagggacaaatctcccgacataacacgaaactgacacctggggtgtcacagtaatcacctaacttgtaaaataaaacttggc

SEQ ID NO: 28595 - DNA, 416 bp, Zea Mays
agcaagaggatttgttgtatgaagaacatgacaagtttgtagaagcacaaaaatcacttgcattagaaattaagagaaatgaaatgctttcttgtgagttgtctacatgtcatgattcaattgctagtttgaagagcataaatgatgatttaaatgctaaactagaaaaatctagtaaatcaacatcttgtgtagaacatgttgagatttgcactaggtgtaaggatttcgatgttgatgcctgtagtgatcacttggtttcaatttctaaattgaatgatgaagtggctagtcttaatactcaacttaaggctagcaaaaatgatttcgataaactaaaatttgcaagggatgcctacaccattggtagacatccctcaattaaggatggacttggcttcaaaagggaagccaag

SEQ ID NO: 28596 - DNA, 946 bp, Zea Mays
gttgcttattgtggtgctcaagttgtacaaacactccctggacctcacaagtccgttgcaaagtgatgcacatgtttagggggagatgtgttgcaacttgaccctttgagactaaccatttgcttgagtttgcttgatttagtctcgaaggtggattgaaagggaaaggtgaacttggaccatgcaagacttccactgcactccgatgagagggtaacttattccaagttcatctctatgactttattgcctttgtactcttaattgaagattttggtgaggcaatggggttaaggggccaagattgatcccgttttggtgcttgatgccaaagggggagaaaataaaggccaaagcaataaatggatcagctaccacttgagagattttgaaaatagtaaaatagagcttttggtttgttcaaaactcttgcattgtctctttcgtcaaaagttggcttctagtggggagaagtattgattatgggaaatagggggagtttttgaaatctttgatcaatctcttttggaatgactctccctatgcttcaacatgtgtgtttgacttagagatagagatttgagtttgatttgcaaaaacaaaccaagtggtggcaaaggatgatccatatatgccaaaaatgaatcaaaatagatttgagttctatttcaagtgattttgcacttgttctagttgctttatattgtgttggcataaatcaccaaaaagggggagattgaaagggaaatgtgccttttggccatttctaagtattttggtgattaagtgtcaacacaaagtgcttaaatgtgaatctatgcccatggatgaacaaagtgcacatcacaagtaaaggtatgtttctaagccttagtacattggttttgtgtactaatatatttatctaagtgttagaaacagaaagaagaagaaaaggagattgttg

SEQ ID NO: 28597 - DNA, 286 bp, Zea Mays
cgatagggtttggtggctaggcccctagtgggccggttagattaggtttagttttttttcttttcttttttttaatttcgaaatgaacttttaaagagctcaaaaattccataaaaattcaccaaaattatttataaataaaatacttgtttttagactaataactattacattatttaattactatattaattactaggatttttctcttaagaagaatttctatgaaacatccgatcatcaatcatgtgcatacaaagaaaaatgattgaaaatgcaattaaat

SEQ ID NO: 28598 - DNA, 474 bp, Zea Mays
gtcagattccagagcaaagctgaggcgtgccgcgtatctgtgcttgaccccggtgggtgaagtcagtggcggatccaggattgatctaagagaggggctactaagctaaaaccatatttgttcttgttcttgataataaatttgtccatcttattctacaaacataaaatttaatttaattttaaaccaactgtttattttatagaattaaaaaaaactacttcaacaaggcaacaaatctcaaatatattaacatatcagcaatcgctgcatgatcttaaagggaacccactaaaacaccactatatctggttcagggatgcagggattgataggtcttagcctcttaggtacgaaactagcaggattatgaatattgagatcacatttcgggcataagcagcaaacaagtaataactcggatcaccggaacactatcaaacatagaaaaaaaattaacaaaggtacaaagag

SEQ ID NO: 28599 - DNA, 905 bp, Zea Mays
aaatatcgcagcacgtgccgacccgatctgcagccctagttgtgaggacgtcgaaccccggtgagcccctcgctagtagcccgttgttttcgcatctctagtgtcggagacttgttctcaaatgctatgaattaaaacaaaacaatacaagatattaaatgttaaattccttcgtcctttgaatcattatttcccttaggatataatgattttcagacgaatgttataaaggacataccttcatcatcaccgcaatatacgttaagtgaaagaagaaacatatgaaatataggaaataatatatatatatacaatcacataacattattaattcattttatataatcatggaaaggcagaaatctctactacttattaaggctgcaatagtagtcggtcattccgcgttctgccatttcctgttctgctcattccgtgttctgcctttccgattccctcctccccgcgcacagtccattcccatgctctgccaccagtatagccgacgcctagctaaaattaaaaaagtacacatggccccaaagggattcaaacccacgacctctcaagcaaatgctagcggtagctaccactacaccacatgtgtgtttatgtctatatctataacaaaacatatctactatatctctccccaagcccacctgctacccttgcacaatgcgtagtagtagataagtatcaccgagattcttgaattatatttttggatgaagggagtagtatttaaagaagagccttgcatgcaatttcttttgtttgaataatattttcaacttaaattctttttttgcatgcgtgacatttattcttcgtaatattttttccatggatctgactgtgagtcatttttataaaccaacgccaaacatgaattcatgtttctt

SEQ ID NO: 28600 - DNA, 204 bp, Zea Mays
ttcttctttttttctttttcttttctattttcttttcctttttatttttagatttcaaatttgaatgcaagtttggttgtgaatttcacactcagattaagtgcacaaacaaagataccagcatgaagaagtattttcattattttatatatatatattatgttttatttattaaggggttaatttctatttaacttgtgtttg

SEQ ID NO: 28601 - DNA, 229 bp, Zea Mays
cgacaaatttttgttgcttttgctccaaggtggtaccaaatgaggaaaaacaagactgaagtgcgggaggactcggtcctccacttaggttcttttgcttatagcttatcgggaggagtttgtgcctcccatggtttgtataatattactactctgcactcacttttagctctggtctgtaataaaataactcaagcttgcttttgaaataaatgtaagtttatgtaat

SEQ ID NO: 28602 - DNA, 335 bp, Zea Mays
catacagtgaggtggcttcactacgaggagacgagcaggcagcatgaacccgggcgaacgactctccatgggcaggagccgagcgacagcgcgccgacgttcctgcgaacaaagcaagagagaggcgttaggagatagatctaggatttgataactgggacccatgcgcaagtgatacaaatagtgggagaggctaccagtggtcagccgggttgagaaaatgggaatggctgggcgtggttttttttcttccttttttttaatttcgaaattatttttttgtttttttaaatagcagaatatatatataataaataaatatattccaaaaattc

SEQ ID NO: 28603 - DNA, 25 bp, Zea Mays
gcagtagcctccaccaccaccgccg

SEQ ID NO: 28604 - DNA, 840 bp, Zea Mays
atttcggcagcatctcttttgaaagattgcataaacgaggggcaacaatgtataaacatatatcatgaaaaaacatactaagcattattaatctgcttgcaaaggaaagttaaacataatgacatgaactgaattaaccagtgcacacgactaggaaaaaacaaacatcatttgtcatcaagtttctaattaaatcatggatgcaactgggcatcgttattataatagtgaaggtgaacgtgctgctacttccctcattcccaacatgaatcaagtacctgcattgagtaatgcaagagtgagatgatacatctcagcaagcaaattgttttgacgagatatttaaaccacaaattgaattaaacaacattttaaaggaatcacaattgagatcagaaatacttgtagatatagaactcaatagtcccaatataaccaataccatctcatttcctcgaacaaccacaatatgttgtacaaccctttcctgcgtcaacaatacctgcagatatcacttcaatgtatgcatatgaatgcaatgtgtaggtcatctgccctcatacctcttagagtataaaaccacatcatctgctaatatcacttcaatgaatgcatataaatgcaatgcatataaatgcaatgcatatgtcctctgccttcatacctctaagggtatgaagccgcatcgtacccctcctcgggcaacgtacgatgctaagttgtaccggtacggtcggaccataggtcacgaccaaacttcagatgcaaatgaatcatttaatgcatatggcatgctgcatttatcaatacacttcacttcctttagatacaaaacaaacc

SEQ ID NO: 28605 - DNA, 658 bp, Zea Mays
ctataatcaaactgcaataactttctaatctgatgtccgattgaggtgttcttcgcggccacggaaagatatacaaattatctacgactcatagacagacgttttatttttttgaggccactaagatcacggaaaactggcatgaacagaaactgttgaatctgccatcctgcagaaactaatttcgagatcaaaatctaatctcccatctaatccaaccaaaaaaactaattgcagggcctaaaactcatccaaaacaagagaaagcattcatcaagtggagaaaagagagagaggaaaggaaatccaaccaattcttgagaggaacaacgatgatgagcgacggtatgccctcatctcccctctcttctcttcttttttcttcctctcatctcttggggcaaggcacaaaagggtgacggctgctaggggtgggaggacgtggattctagggttagggaggtataaatagaagaaaacttccacaatcctaatatccaatggctcagatcaaccggcactcgaaaagactcatctggacttcaaacaaagcaaactagtgattgatcggaatcatcttgatgagatctatacatctacggcctccgatcatccataggacacaccatatttggattataaaaatggtttatttttt

SEQ ID NO: 28606 - DNA, 368 bp, Zea Mays
taaataatggaattctcataaaaagaattatagtgcaaaataagtttattataaaattggatttattctgaaattttagaacatatataaatatactattatatattttttatttaaaaaaaagaagaagaagtaaaaaaatccacatcccacacgtttgggaatatactattctatttaaaaaagaaaatgcaaaaaaaaaagaaaaaaatgcactcgcccacacgtttgccaagtgcccagcctgctcaccttctctcgctttgcccctatgacgcgtggacctgctgtttggattctcttcaatctcccattatagctttgcacgtttgctgtttgttcgtcgtccgttacgtttcccacccgtg

SEQ ID NO: 28607 - DNA, 52 bp, Zea Mays
accccctatataatcatgaatcccatcacattgcataaaacaaatacacttt

SEQ ID NO: 28608 - DNA, 226 bp, Zea Mays
atctcactcttgcattactcaatgcaggtgcttgttgctcatcaagggaagtggaaagtagcagcacatccaccttcactctcataataacgctgcttaggcgcagtcatgatttaattagaaacttcttgtcaaaggatgttgtttctaactagttgtgcgcactggttgatttagttcatgccgttatggttgtctttccattgctagcagattattaatgtct

SEQ ID NO: 28609 - DNA, 360 bp, Zea Mays
agcgtcagcaggtaaaacgtgaggggcaggcaagtgggcctgcgggcaaaggtctggcgcgtgcgcaaagggcaggagcggtagtgggctgtgcgagttccgatgtaagtgggccaggaggtggaatcggcccatgacagaggtaaggttccctttttctttttttcttttttttctattttctattttcaaattccaattttcaattttgaatttaaatctgatatgcacacacaaaaagtccagcatgatgcaaagtatatgaatatttattattgctattcttgttttagatttttattattttctttatttaagtatatgcttcaaattagtgatccacacacataaaaattcttg

SEQ ID NO: 28610 - DNA, 397 bp, Zea Mays
aaaaatttcagattttttggacacccgagcgaaaagttatgcccggtttacggaaggttcctcaagttatgttttaaaaacgaccgggatgaaacaaacgtatcctttctccttcgttttctttttttttgtttctattttttttatgtaaccgaaggagaaaaacaaggaagcggtcgttgactcggtttgtttttttttctgttttttttcgtaaccgaaggagaaaatcaaggaaacggtcgttgactcggtttgttttttctgttttttttacgtaaccgaaggagaaaaacaaggaaacaatgttgactcagtttgtggcgtgatcaaacgggagatggtggcggcgctagggtttgaatggtggaagaacacaatgcaaccagcaacaaat

SEQ ID NO: 28611 - DNA, 224 bp, Zea Mays
tctatgtatatcaattaaacaagttggaagcaaaataattacagaggtgcacagaagattggcgtttctgcttatgtgctactctttttgttttttctttttccctgatttttgctctagtcgttgttttttctgaattttatttcttaattttttttatttttctgtttgcagtagcacataagaaggaaacacaccaactttgagaattttttttgtgcaaa

SEQ ID NO: 28612 - DNA, 475 bp, Zea Mays
ggctgggaagccaggggcgacggcaggtttagggttagggataatgggcctaatgggccgaggcggttagggttaggtttttttttctttttctttttttttctatttcgttttctaattttgaaatacatatttaaataaccctaaaatttataataatcaaactaaaattatttataaataaaatattaattttttagaataatatttattatattatttaagtgaattttcatttaagagaaaatgctattcaatatctaaaatcaattatgagaaatcaaaaatcattccaaatgcacataaataacaaacacttaaaagaaaatttttattaccataatttcattaataaccaaatgtattatttttatttaatgattttcatagtgtcacacattgtcaacaagtcttggtgcttgtcgattcaggtagctctgctagttttctaggaagccatctcatgggggttatg

SEQ ID NO: 28613 - DNA, 254 bp, Zea Mays
atttaatacaaaaaaatattataataacttcacccatctgtgggtatgaccaaattgcatggttaacacgaattggaattagcacctgagttaaattcaaaaatttgaattcaaatgaattaaggataaaagaaaacagaaaataaaaaaaaatagaaatgaaaaagaaaagagaaaccacctagttgggccgatttccttccccgccggcccaactcgcgcttccactgtgtctcgcgcttacccaacgcgcg

SEQ ID NO: 28614 - DNA, 183 bp, Zea Mays
caacatcatcggagttttgcaaaagtagtaatcattgttcgggatgcagcggaatttaactaacggtaaataaggggaaggatggggaagcctggcccatcactcctcatgctcctctcctgctgaggtagggtcccactcaactgtccaatccggtggcaaggtagacggccaagtcactcc

SEQ ID NO: 28615 - DNA, 271 bp, Zea Mays
aggtgcaaggaatcgacgaaaggcttaccgtggacctcggtctacgtgcgacggcggccggttgaagtccggcgacgtcgatccggtgtctccggtgaggtatagttcaatccctggctcggggagcttcactgaggcccatagaagataacacgagggtcggatagggcggggagtggctggtttggccggtctacgatggtcgtggcttgcgcggccgctggcacgtcgctctctgggcaaacgccggcgaacccaagcttgggttggg

SEQ ID NO: 28616 - DNA, 306 bp, Zea Mays
aagtaccaatattcatttctttcagaaccggtttctcgtcataaacaatcattctttgcaaagatagttggaactatccaccaaccgctccacaactaaaattcaaattgatggttgccttgtaacccaaaacacacaattcacactcctctttgatacatcctcaatcaagcatatataacaatattattgtaataaaactcaaccatgaaaaacatggtgaaaacaacataggcatacttgtatatcacaagcataataacaacgtcaatctcacaaaagactagcgatatcaaacacattaat

SEQ ID NO: 28617 - DNA, 1025 bp, Zea Mays
ccacatgatccacaacctccaaaagcacataattatagggagaaacaaggatcccatccttacctagggttttccctaagaaaaatctgcaagagatgggggtagcacatctccttgatcctctcttcctcttcaatccatcttgttcctcctcttctcgatccttgttgcgtggggggggggacatctagggaggaagaagtattggagggctgctgcaatggggggagagggggcgaccatccaagggggaaaagtgaggcggccaagaaaggggagggggtggcggccaagaaggggaggagggtggccacctatggtttattttgtgggagaaaagaagtgacgcctcagatgacttctgatgcagcatccaacggcccacaacctttttcccatatccactcaccgaagatcaacttttgggtcaacatttttttgaggatattacactctaccccccttaaaaagaattcgtcctcgaattcaaccactccaaccaaaacatccaaggtaccccatatagcaccaccattcaaaacatgggtccattattggtcttaattaacacaagaacttctaccttggactaattgtttaaggaaactacacgacctgacatcaagcatgaaacaacatgcaatgaagctcaaagcaagtcatagatgcaatcaacactacaatttcacaccatcgaatttggatgcaactatacatcaacatcaatgtcttaagacaacactcttttatgaaggggtaatatgcactaagcacaacccttaccaacttcaacaattaattttaattaaatggtgaaacatccccacacgacgaatgtataagaagatcaaatccctcacctcaaagcaccacgaaacaagtagttctattgaaacaaaactcctaatcttcctaaatcttattcttgccatcatgaaaagataatcatgtaatctaacattctttgcaccccacaaaagggagaaaatctatagaactaatggagcaataaagccaacaagaag

SEQ ID NO: 28618 - DNA, 1088 bp, Zea Mays
gtattatttgaggttggtattgtatctgaaggtaaaatgaagtattatttgaggttggtattgtatctgaaggaagtgaaggttattgataaatgcagcatgtcatatacattgcattactcatttgcatctgaagttttgtcgtgacctatggtccgaccgtaccggtacaatttagcatcgtacgttgcacgaggaggggtacgatgcggcttcatacccttagaggtatgaaggcagaggacatatgcattgcattcatatgcattcattgaagtgatatttgcagatgatgtggttttatactctcagaggtatgaagatagagtacctacacattgcattcctatgcatacattgaagtgatatttgcaggtattgttgacgcagggaagtgttatagaacctattgtggttgttcgaggtaatgagatgatattggttatagtgggactactgggttccatatctacaagtatttctgattttaattgtgactcttttaaaatgttgatgaattcaatttgtggtttaaatatctcgtcaaaattattcgcttgctgagatgtttcatctcactcttgcattactcaatgcaggtgcttgttgctcatcaagggaagtgggaagtagcagcacatccaccttcactcttataataacgctgcttaggcgcggtcatgatttaattagaagcttcttgtcaaaggatgtttgtttctaactagttgtgcgcactggataatttagctcatgccgttatggttttcttcccattgctagtagactattaatgtctattatgttttcttatcatgatatctatttatactttgttgcttccccgtttatgccattttcaaaggagatgctgtcgaaattttatatacgaatgttagatgtgtagtttagtagcacttctggggtgtttgtggatcccggggtgttacaagaagaagcgagacaggttcaggagggggctcagcactaagctccgtgaccgtctcaacaccgtcagggccaacagttacaatgagttggtcaacatggctatttcccaggaggactgcattacagctcaacaggca

SEQ ID NO: 28619 - DNA, 300 bp, Zea Mays
cttggacgtcacccctccccccctctcccatcttctttctcctcaaacctttgcagccctcaccacccaaaaccctagccgccccccccatttgtcttcccccctccaaggtgcagccctcccgcgtgttctccgtcgtgtggctgcgatctcaattggagtttggagggaggaagaaggaaggaggaagggaagaacccaaggtgaattcatgtttaacttttgttgtttttgggctgcaatcaattggattatgcgtttatctttgcgaatcagtagaggtgctgtccaggaattttg

SEQ ID NO: 28620 - DNA, 1450 bp, Zea Mays
atttaattatccatcgaacaccgaagttgtagaatattttgtgtagatactcatggagtatttgtttgatatcaccactattataattttaaagatacaaaattaacaaacaacattgctgttgtatggcatgtggttcagagtgggaggttttccaccaggtcttggtttcaggtgtaggatcgatttgttgattgttggcaaatgtttgtgaaatatttgtactaagttttatgcccgctagcaggtggctacactccaaattatgcctagtacttttttcttcttcaatgaagccaagtgaatgtagcggtggttgcttccgttctgacctgttatttctattgcctacactctaatattcagaagtattggattctttcataattggactctatggtgatgctttacttgcttgcattatactgatgctcaatcatatattgatgatgattatgattcgagtatgactcatgagattaattcacacccctgaaggtaaatgaagtattaattgaggttggtacgtatctgaaggtaaatgaagtattatttgaggttgtattgtatgtgaaggaagtgaagtatattgataaatgcagcatgccatatacattgcatgattcacttgcatctgaagttgggtcgtgacctatggtccgaccgtaccggtacaacttagcatcgtacgttgcccgaggaggggtacgatgcggcttcatacccttagaggtatgaaggcagaggacatatgcattgcattcatatgcattcattgaagtgatatttgcatatgatgtggttttataccctcagaggtatgaagacagagtacctacactttgtgttcctatgcatacattgaagtgatatttgcaggtattgttaacgcagggaagtgttatacaaactattgtggttgtttaaggaaatgagatggtattggttatattgagactactgagttctatatctacaggaatttctgatcttaattgtgattcttttaaaatgttgattaattcaatttatggtttaaatatcttgtcaaaacaattcgcttgctgagatatttcatctcactcttgcattactcaatgcaggtgcttgttgctcatcaagggaagtgggaagtagcaacacatccaccttcactctcataataacgctgcttaggcgcagtcatgatttaattagaaacttcttgtcaaaggatgttgcttctaactagttgtgcgcactggttgatttagttcatgccgttatggttgtctttccattgctagcagattattaatgtctattatgttctcatatcatgatatctatttatattttgttgtttccccgtttatgtaattttcaaaggggatgctgtcgaaattttatatatgaatgttagatgtgtagtttagtagcattctgggtgtttgaggatctcggggtgtta

SEQ ID NO: 28621 - DNA, 292 bp, Zea Mays
gcagttaaagggatatgatgagtggtaaaagctcggttttttattccgagaggggtgcctgccccaaataagcctgttacgacaacatggcgctcacaatttgtaccatctgatcccgaaattaaaacatattgaatttaatggttctatttggtttctagtgattttttagtgcttctattttattatttatttagttttaaattttgaatttttataatctaaaatagaattttttttgtgtattgagtaatttatgaattaaaatagaataaaataaatagattaaaat

SEQ ID NO: 28622 - DNA, 598 bp, Zea Mays
ggcgattgggcctttccctgagttgggtgtgcttaatgaactgttgggctccgggcaaccctaacttgttgggcctcggccaaccccacctggactgggtgtatcatctggtaccaaagctagggcccattttaagaaggtgggaatgatgaggacatcctccactattactcgttggcaaaagcgcaactggcccagttggcccaattgtagtcggacggtgaccgtgtgagcctcagaattatcccacctcacttaacttgggaggaggaagccactttaaaagggagagacaccttcccccattggactagtcttttggggtgattgggcctttccctgagttgtgtgtgcttaatgaactgtgtgagttgtgtgtgcttaatgaactgttgggctccgggcaaccctaatttgttgggcctcggccaaccccacctgggctgggtgtatcagttgaacctgtactaatgatcatctttagtgctggtttatgtttacaattgatgctaaatagagaattttaatatcggttcttacatgaaccagtactgaagtcctctcttagtaccagttcatataaataggactaaagata

SEQ ID NO: 28623 - DNA, 412 bp, Zea Mays
tgtatacgtgctgcaccttcgtaataagaaggttgtggaatcaagtggtggtaaaacaatgttcttatgtggttaaatagtttgatattattttacttgctgagatgtgtcatctcactcttgcattactcaatgcaggtacttgatacatgttgggaatgaggggagtagcagcacgtccactttcactctcacaataacgctgcccaggcgcagccatgatttaattagaaacttattgtcaaaggaagtttgtttttttaactagtcgtgcgcactagttaattcacttcatgtcgtatgtttaacttatcgttgctagccgattaataatacttagtatgtttttgtcatgatatatgtttatacactgttgccccctcatttatgcaattttgcaagggggatgctg

SEQ ID NO: 28624 - DNA, 356 bp, Zea Mays
cccctttggccgcccctcccctctctcttccactcttgcagccgccccaatccctctccttcttccccatgtgattgcagcgccacccctcaaccctagccccccccacctcttcctctccaaggtggagcctccccgcttggtgtccgtcgtgtgggtgcgagtcttccatgggagtttggagggaggaagaaggaagaaaagaaggaggaaaggaggaacccaaggtgattttcgtgatcattttgttgtatttgtgctgcaatccaattggttacatgtttatctatgcgatttggtagaggtgctgtccagaaatttagtgggtggacgaacagcagtagttctagtgattt

SEQ ID NO: 28625 - DNA, 701 bp, Zea Mays
atttgttaattttaaatgttcttaaggccatcattccataagatcattgcactcaagagaaaatccaaatcaaacattatgcaaacatcaccatcacatggttgttattataataatagtatcataaatagtttcatcgtctaacacaaaatcgaacttattacatcatgatttataaaactctagagtagcttagtaatagatcttggggctccatagcgaattctcttacggggcatgaacacagctatggcagagacttgggcttcgggtgaattccttccttcaagttgagcttcgagggctgcaatccttgcatgtgcgtcttcaagttattcgtgtaaccttgagatgtccagggtagcactgtccaggttagtattaagaccagccaccacacctacaagggtgttgaggggatcttctctagcttcacatggaatcacacttgtcaggcttttaccacgaagacgtaggggaaggtgcatgtacatcgtgtcgtgcagttgttgctgataggtgtggctgagggaccacatagctctctgagcaacattgctgaccgaggaggctcaaacactcgccttgtgtcatatagaggtcgaacataggtccccaacgcatgcaacacatcctgcagcaaatttggaaagtgtcccgtctcgaacattgaagtgtaatgttctacgacaggccgcaaa

SEQ ID NO: 28626 - DNA, 1283 bp, Zea Mays
ctttccccctgccgcgcactccttctctgcgtcgttctctctctcccgacgcttctctccctcccatggcgcacccctttagccgcgcgcctggcagccgcttcctcaatctcggtgctccctgcgcgcgccggtcccagctcggccttgccctgtgccatggtgccggtcgccaggtcgtcttctccacctctctcatggcgctcgtctctgcccatctccatggctgtgtgcggacctctcttctccccatctccccaagctcgtcacgaccccccagctccctctgcccagctcgctccaagctccctgcgccttgccgaaccccctgcgtcgcaccctgctccctgtttctgtgtcggtcgctcctccctacgcacgccttgctccaactaggtccggccatggagctcgcccgcgatgcccgccgttctgcatacttgtggtccctgctcgccctctcctgcattgctcacccaaatccgtggagcactggatgtccggccgttacatccctggttgcactctagttttcctctctttgcctcgatgtccaagcaccttgcctctcctgttcctgtcctatccttcgtcgcctcggcacgctcgcatcccttgggctcgtttcaccatcgtgcgacaccggctgctagttgagtttgatttcgccgggttactcggattaagtccgattggtgttgagagttcgtcatgttggtgtgtggcgttgagatacagaaggaagggtcctggctggttatggagaaatttgttgaacattggatgatgatgtgcatgaagttcgtgtagtacctgtcaagcgctcgacaaattacctgaatcggagaaccattaccgatctcgtgaattcgagtcagctattggaatggtaagctgatctattattcctgctagctaaattgttgaatggatgaagcgagtgatgagtttggtaggatcaatcggtgtcgcttgtgcttagctgatttttgttgtgtggtgaaaatagctctagcgcagcactcctcggatgttcggtaaaatgggtgaactatagatcatcgtcgatctagtgaattcgagttcgatttagctatggtgcacagactcattgctctgttatttggtttgttttatggatagaatatacatagtgattgtgatgattctcgtattttagttagcacaatgtatcaatgagtttatgtcgactgtgattaaatgggttctaaaagtgcggagtgtggtgtattagtatgcaaaagatgtatttggtattccat

SEQ ID NO: 28627 - DNA, 271 bp, Zea Mays
gttaggcgcttccttcctttttattttttttcttttatatttttactttccctttttgtttttagaattcaaatttgaatttgaattgggtcatgagattcatcaatgatcaaggtgtaccgagttcaaatttggagtaaagaattacattcttatttttagattttattttaactcatttatttattgttgtttcctcttttcccaattttctagaaattccctttagggtttaaattctaatttgggtattatcatatctatttttacc

SEQ ID NO: 28628 - DNA, 849 bp, Zea Mays
ctagagtatttgtttgatatcaccgctgttttaattttaaagatacaaaattaacaaacagcgctgctgctgtttggcatgtggttcagggtgggagtctttccactgggtcttggtttcaagtgtaggagtgttttgttgattgatggaaaatgtttgtgaaatatttgtactaagttttatgcccgctagcaggtggctacactccagatcatgcctagtacatttcttcttcttcgatgaaggcaagtgaatgtagcggtggttgcttccgttctgacctattatttctattgcctacactctaatattcaaaagtattggattctttcataattggactctatggtgatgctttacctgcttgcattatactgatgctcaatcatatattgatgatgattatgattcgagtatgatttatgagattaattcacacccctgaaggtaaatgaagtattatttgaggttggtattatatctgaaggtaaataaagtattatttgaggtttgtattgtatctgaaggaagtgaagtttattgataatgcaacattccatatacattgcatgactcatttgcatctgaagttttatcgtgacctatggtccgaccgtaccggtacaatttagcatcgtacgttgcccgaggaggggtacgatgcggcttcatacccttagaggtatgaaggcagaggacatatgcattgcattcatataaattcattgaagtgatatttgcagatgatgtggttttataccctcagaggtatgaagatagagtacctacacattgcattcctatgcatacattgaagtgatatttgcaggtattgttgacgcagggaag

SEQ ID NO: 28629 - DNA, 308 bp, Zea Mays
caaaacctaaccccacatctaatccaacctctaatcctttaattcccatgatccacaacctccaaaagcacataattacagggaagaacaaggatctcatccatacctagggtttccccaagaaattctgcaagaagagatggggaagaacatctccttgatcctctcttccccttcaactcaatgtgctcctcctcttctcgatccttgctgcgcgggggggagatctagagggaggaggaagtcgtggagaggggctgccatgggaggagagggcagccagcccaaggcaaaaggagagaggggcg

SEQ ID NO: 28630 - DNA, 1342 bp, Zea Mays
atgtgacagccctcccaagttatcaggcccacatgcaccaacccttgccattaacggcctcagatggctgtgcacgtgtactgggtaacttaacaaggctatcgagttcatcaactcgaactcatcatcccaaggatctcccacattcatgcatattacagtaatcacactcgatacaaacacacttcggagatagagcggaagactttacaaaacatattttacatttccaaagctcaagttttacaacataagaagaatagtaattattacaagtcctgatagtacctaaagtgcataacttattacaataattggaagggtgaagcctttccataagatatatacataaacattctaagcttcaaggcctccacatgatgtaactaaccaaaagataagggaataaaacttctcctacaaaaacaacaggggataaaaccctgagtacgcaattactcaggaagacttatccgactaaagaaaagactctcaagggtatggtagctgattgggaatcaaggtaaagttgatcaatgatcaaagactccttttgcagaaaagcttgctaccagttgatccttaagccaagttttatttcactagttaggttattacctgaatctatatttgcctggtctagttcaagcacttggcctatactagttgcattttattcattctcatatttcacttgctaactacgaggatggtctccgggatgagtctccataaccaaggagcaacgacgattcaaaccgattatacccagctacggatctctaaccacacggcatatgtaccacttaacccttgcatatgtcaaccgttctcacggtgtcctccactacatgaacaggtccgcgccaaccgagagcacattaccctaccaggcgtgctactatgccaggagggtacatgctactcccaccatctctctactcctagtgcgcgattgtctcttcacgtatggaatagccgagttcaagcttaccctatcccataccagggtatgttgctatttgcaaagtctcaaccacaacaggccagtcaacggtacgatccttaaccgacacagacgggcgaccttgtctgctcaacgtctggtctagatttattcaaacccttttcccatttttggtacccggcagggatactcttttcgagtgccgagtccactccagccatagaggattcatcaccttagtttgttttggtttttgaatcaaaaagcccataaccaatgttccacaccattgtttttgaaaacaaaggatttttcagtttctaagcagggttaagcattatcagttctttttataaatcagggatcaaggtatag

SEQ ID NO: 28631 - DNA, 655 bp, Zea Mays
ataaacgggggaagcaacaaagtataaatagatatcatgataagaaaacatataagacattaataatctgctagcaatgggaagacaaccataacaacaatgaaccgaattaatcagtgcgcacgactagttaaaaacaaacatcctttgacaagaagtttctaattaaatcatggctgtgtctgggctgcattattatgagagtgaaggtggatgtgctgctacttcccgctccccttgatgagcaacaagcacctgcattgagtaatgcaagagtgagatgaaacatctcagcaagctaattgttccgacgagatatttaaaccacaaattgaattcatcaacattttaaaagagtcacaataaaaaaaaatcagaaatacttgtagatatagaactcagtagtcccactataaccaataccatctcatttcctcgaacaaccacaataggttctataacacttccctgcgtcaacaatacctgcaaatatcacttcaatgtatgcataggaatgcaatgtgtaggtactctatcttcatacctctgggggtataaaaccacatcatctgcaaatatcacttcaatgaatgcatatgaatgcaatgcatatgtcctctgccttcatacctctaagggtatgaagccgcatcgg

SEQ ID NO: 28632 - DNA, 275 bp, Zea Mays
ggaaactgcacagcgcctccaacaaagtctccaaacaaattcccagtcccatccccggaaccgctcgctctatccctctcgtcagctccacgatctgcacgtctaccaactcgctcactccctccctcacctcaactccacgatctgctcgtccaccagctcgcagaggaagataaatgagggcgtttgacaacggatccgagggcgcaaaggaaggagaagcaatcgggccgagtccgtcaccggagatcaaggagaagacgattatgtggcga

SEQ ID NO: 28633 - DNA, 1181 bp, Zea Mays
caaaaggttacaagttacatcaaatttacattatgtttatcggagtgattacaaagtgattcaaagaaataaactttgaaatgttataaagtatttatagttttgaaatatatgctagctcgatgacaatcctcaataagaagtataggagaggtacttagacttataagaaggccgagcccgccggcacttagcaccatccacagcaacacacttctattttcggttcttcctcctgcttgggaaccacctttgcacaaaagtagcagagcgccataggctctccacctaaaacaacctggaacaaagccctgagtacggagtgtactttcgcaagtcttacccgactaaggaaaaagactctcaaggatatgctagataaataggaatcaaggaaaaggctttagcaagaatcaacttagatacttttgcagaatagcttactaaagtgagtccttactttcaatattttaacgccagaataaatattaatagaatctagttgcatctagtctaatttcaccatctcatcaatacaacattatttttactcataatgtttacatcctgacttaggttgtaggtcggagatcaagtctccactctcaggggatataacggcgatccgaatcgatttactcagctgaggatctctaaccacacaacctatgtttctcataactcttgcatatgtctaccattcccatggatcctccactgcatgaacaggtccgcgccacccgagagcacaccaccccttttaggcggtccgttgccaggagggtacgtgccactctcgccatctctccactcttagtgtgcgattgtcttttcatgtatggaatagccgggttcaagcttaccttgtcccatatccagggcatgtggctagttaagatagtccttgatcaatagacctacatacgcatctaatccttaattaacctgggtagaacatcacctgttcctagcccaagtcccgatttaagtacttccatccttaggattgtttgtgttccttaggatgaaaagagcattatagggaactttgcagtaagatcccaccatgctctcaataaaaatattcttgcaggtagaagtcgtccttcctcaggataacccctgagctaggcattaatgcaaaagacaacctctatccacaagatctaagcagagctaag

SEQ ID NO: 28634 - DNA, 266 bp, Zea Mays
aaattttacaagttatatcaagtttacattgtacatgatcggagtgattacaaaagtggttcaaagaaataactttgaacagttataaattatttataattttgaaatatatgctagcttaagtgaccattctcaattagaagtatagaagagttacttagacttataagaaggtcgtgcccaccggcgcttaacaacaatcacaatcaagtgactcttaacctgcagcaacaatgggaataaaaccctaagtatgcaagtactca

SEQ ID NO: 28635 - DNA, 4739 bp, Zea Mays
attcaatttgtggtttaaatatctcgtcagaacaattagcttgctgagatgtttcatctcactcttgcattactcaatgcaggtgcttgttgctcatcaaggggagtgggaagtagcagcacatccaccttcactctcataataatgctgcccagacacagccatgatttaattagaaacttcttgtcaaaggatgtttgtttttaactagtcgtgcgcactgattaattcagttcattgttgttatggttgtcttcccattgctagtagattattaatgtcttatatgttttcttatcatgatatctatttatactttgttgcttcccccgtttatgcaattttcaaaggagatgctgtcgaaattttatatatgaatgttagatgtgtagtttagtagcattctggggtgtttgtggatcccggggtgttacagttggtatcaaagcataggctttagattcttggcaatttgaagataaatttgacacacttgcacatataggaagggtatgggttcaaatatctttgatatatattaatgtctttggagtgcagatgacaatagtttcacccctccctattcctttacggtgatgtggtaagttgtttatggcttaatgcttgatataatttatttctgaaattttgatattgttttattaatgcggtagatatcgctggtcattggtgagaatgaagttgttattatgcttgtgatatacaagtatgcctatgtcgttttcaccatgtttttcatggttgagttttattacaataatattgttatatatgcttgattgtggatgtttctaagaggagtgtgaattgcgtgttttggggtacaaggtaatcatcaatttgaatttaagttgttgagcggttggtggatagctccaactatcattgcaaagaatgattgtttatgttgagaaaccagttttgaaagaaatgaatattggtactttatatggatttttgggggaagtcttttcatagccagaatggcttacatgtctctctcatattgtgtgttctagttgccacaaagcctagatgtggtttaaagtggttgcctattagtcatactaattgtagaataaatctttgattctcttgatccattgattatgtattgatacattgaggatctgatggttcccttttcgatgcatgcttgtggagccaattttttagaccacctatctattggtttgaaggaagtccttgcctagcctagagttggttgggtgtggctagtcacctactcctagatgatgtggtgtttacatcagcttaatatgtttgtcaaatgtgtgaaggattaggggttattattattgactttgtatgtctggtactttgagtgcatcgtatgatagaatgaaatgtaagtttctgaactacagtagatgaagacttatattatgtgtaggttatccttactagttggatatttttcttagttgagatgttgaatgaagtatagtgacatgggttaagcaaatattgtgttgttgttgggctatcagtgctctatgtagagtttttggcatttcttcgatgaactatgccgcacaagatgttattggcttcttttggctttattgctccattagttctatagattttctcccttttggtggggtgtaaggaatgttagattacatgattatcttttcatgatggcaagaataaggtttagaaagattaggagttttgttccaatagaactacttgtttcatggtgctttaaggtgaggtgtttgatcttcttatacattcgtcgggtgtagatgtttcaccatttaattaaaattaatggttgaagttggtaagggttgtgcttggtccatattaccccttcataaaagagtgttgtcttaagacattgatgttgatgtatagctgcatccaaatttgatggtgtgaaattgtagtgttgattgcaactatgacatgctttgagcttcattacatgttgtttcatgcttgatgtcaggtcgtgtagtttccttagacaattagtccaagatagaagttcttgtgttaattaagaccaataatggatccatgttttgaattgtggtgctatatggggtaccttgggtgttttgcttggagtggccgaattcgaggtcgaattctttttaaggggggtagagtgtaatatcccaaaaaaatgttgaccaaaagttaatctctggtgcgtggatgaggtaaagggttgtgggccattggatgcaaagatagaagtcatctgaggcgtcgtttctttctcccacaaaaaccctaggtggccacccctttttttcccttcaccccccctcttggccgccacccccttttctcccccttggctggacgccccctccccctatggcagccatcatccattgcttcctcccccaagatctccccctacgcagcaaggatcgagaaaaggaggggcacgttgaattgaagaggaagagaggatcaaggagatgttcttccccatctcttcttgaagatttcttggggaaaccctaggtatggatgagatccttgttcctccctgtaattataggcttttggaggttgtggatcatgggaattaaaggattagaggttggatttgatgtggggttaggttttgatcccgaatttagttttctgcagaatggcagattcgacagtttctgttcatgccagttttccgtggtcttagtgacctcaaaaaaatgaaaagtctatgtatgagtcgtagatgatttgtagatctttccgtggccgcgaagaacacctcaatcggacatccgaccagaaagttattgcagttttactatagcagtttttcagtctcataattctgtgcagaatctgttctcttaagatttaggaaattttatcaacagaattaaactgtgggttggtaaaaggagttgtagataatttcataagctttccagattgttaaagagtgcattcatatgatttgtgaaactccagttatgtttgttttactgtggctgtttctgtttacctgacaaaaatgagtgggtctgttcactggtgggtttcatctagtaaatggccgaattggctcttccaactatggagacttttgtagagggataaaagttcttacttccagcagaatttcataatttttggttcagtagttcgggagatatcgaattttaaagttaaccatactgctgtctaaaacagattcagtcagttatcttgtcagatgttttagaacttgtagatggcagaatttaattatctattgaatactgaagttgtagagtattttgtgtagatactcctagagtatttgtttgatatcaccgctgttttaattttaaagatacaaaattaacaaacagcgttgctgctgtatggcatgtggttcagggtgggagtctttccactgggtcttggtttcaagtgtaggagtgttttgttgattgatggcaaatgtttgtgaaatatttgtactaagttttatgcccactagcaggtggctacactccagatcatgtctagtacatttcttcttgttcgatgaaggcaagtgaatgtagcggtggttgcttccgttctgacctgttatttctattgcctacactctaatattcagaagtatcagattctttcataattggactctatggtgatgctttacttgcttgcattatactgatgctcaatcatatattgatgatgattatgatttgagtatgactcacgagattaattcacatatctgaaggtaaatgaagtattatttgaggttggtattgtatctgaagataaatgaagtattatttgaggtttgtgttgtatctgaaggaagtgaagtttattgataaatgtagcatgccatatacattgcatgactcatttgcatatgaagttttgtcgtgacctatggtccgaccgtaccggtacaacttagcatcgtacgttgcccgagaaggggtacgatgcggcttcatacccttagaggtatgaaggcagaggacatatgcattgcattcatatgcattcattgaagtgatatttgcagatgatgtggttttatacccccagaggtatgaagatagagtacctacgcattgcattcatatgcattcattgaagtgatatttgcagatgatgtggttttatacccccagaggtatgaagatagagtacctacacattgcattcctatgcatacattgaagtgatatttgcaggtattgttgacgcagggaagtgttatagaacctattgtggttgttcgaggaaatgagatggtattggttatagtgggactactgtgttctatatctacaagtatttctgattttttattgtgtctcttttaaaatgttgatggattcaatttgtggtttaaatatctcgtcagaacaattagcttgctaagatgtttcatctcactcttgcattactcaatgcaggtgcttgttgctcatcaaggggagtgggaagtagcagcacatccaccttcactctcataataatgctgcccagacacaaccatgatttaattagaaacttcttgtcaaaggttgtttgtttttaactagtcgtgcgcactgattaattcagttcattgttgttatggttgtcttcccattgctagtagattattaatgtcttatatgttttcttatcatgatatctatttatactttgttgcttcccccgtttatgcaattttcaaaggagatgctgtcgaaatt

SEQ ID NO: 28636 - DNA, 324 bp, Zea Mays
ccacgaaaattcccagaaatccctagaactactgctgttcacccactcacaaaattcctggacagcacctctaccgattcgcaaagataaacacataatccaattgattgcagcacaaaaacaacaaaagttaatcacaaattcaccttaggttcttcccttcctccttccttcttcctccctccaaactccaattgagattgcagccacacgacggagaaccacacgggagggctgcaccttggaggagggagagaaatgggggggcggctagggttttgggtggtgagggctgcaaaggtttgaggaggaagaagatgggag

SEQ ID NO: 28637 - DNA, 394 bp, Zea Mays
caaagctctacatgattatcccactgattcccactaattaccccacgaaaattcccagaaatccctagaactactgctgttcacccactcacaaaattcctggacagcacctctaccgattcgcaaagataaacacataatccaattgattgcagcacaaaaacaacaaaagttaatcacaaattcaccttaggttcttcccttcctccttccttcttcctccctccaaactccaattgagattgcagccacacgacggagaaccacacgggagggttgcaccttggaggagggggagaaatgggggggcggctagggttttgggtggtgagggctgcaaaggtttgaggaggaagaagatgggagaggggggggggcgtccaagagaaagggg

SEQ ID NO: 28638 - DNA, 2521 bp, Zea Mays
cggacaccccccgttacctagtcgccctcccggagtctctcacggaagccggtgaagtgcagacgtggggaagaagttcactgcgtcgcgtcttggtcaaagaccgggtttgggaagccatagcacctcgagtgtgtgtcgcgcaagttggtgtcgtggctgggcgtggtcggaaccgagaaccggagctcggcgttacctcggctttgtcccgcgcgagggggattggctccagtaccgcaccaccgcaggtatggccacttctgtcgtcttcgttgaccagtccttgacgtatggtgagccgcgggagagggaattatacatctgcgggttttgaattgctcgtcagagccaattgactctgtggcaccgagccacgccgtgggcagggtagtgccatcactcaaacattaaatcgggggtctcgtctgtttcgccttgcgtcaggctgtgtttttagccaccggccgcgggtgcaggcgtcggtgggtatcgaatcgaggaacgctagtgtggtcatcgccatgaacacggtggcgcggtcgtgcttgaggttgggcatgggtagcgcggcatccgaccgtcgatctgaaagcatgtggctacgattagaacgaagataacccttcgatgcttgtgatcctagccactggtgggtgatctcggggtggagattcaatcatcgcgtcggcgtattgtgggctgtacaatttggatccaaggatccgtatcacgcaccggtcgactcagttatgtgatctaatctcacccatgaagatctgatcgggcgactctagtgcgccagtaccccttcggtgtgggcgaacttgtaaaagagaccctgagaaattggctaattaacccgcagtctagcacaaggagttctcagtcttatgatgttttacgcagaggcccctacacttcctgaatatagtaagcgcaatccatacatttaataaaacagagaaattggtttagaaaatgatttttagtacacaactaattgcaaaaacttgtttaattcctagaaaattcattttagctcctttttaatccattccagttcctataattttgtattaatattgtttatcacttaataacattgttttagcatgaaacccatattaagtttgatcacttaattaatcttgtaccaaacacataaaaccttcggaaattcaaaactcgaaatccgtaactctgaatgtagtgattctttttcctatgatctcgttacaacacatagattattattatgtattctgtattcatgtttggtgtgatgttattttatccctcgtaccatgtttgtttgcattatgacgagtagacgagccagtggccgaggatccaggtgttcagcaggtagaagttgctgagcaggagctcattgaaggcatgttgtgcccttgaccactttatttacccaataatgttctctataatcattttatcatgaataggcttaattttgatgggacccaataggccaccctagtctggttatctttataccttgtttaaccctgaattttttggtagtccttgctattgctatatatggttttgagtgttgagacaactattacacatgatcactctttattactgttctatttctattcatgataagacaactatgttaattggaacatcgatcttaacttgagaaacacgtgccaccacaagggtggaatgggacgcccttggctgactaactaggaaagctagtggaggactacctttcccaaaaggggcaagggcagtaggggagtaggcgtgtagggaggttccggggttgattttgctccgatggcggtcagacgggggattcctgcattgctcttcctagaaactgtagcgggttttctgaagctagtggaactttgtaaaagccttgtagtggatccctagctattcacctcggaagtgtctaagggtctagctaacactggctagatgggatacacgacttgtgggtactgggtacgacctctgcagagtgtaaaactggtatactagccatgctcgcggtaatgagccgctcaatactcttgcatgattaatttatggaattaaattcaatttatcatttgcatcgcattgggatttattattaattctgatctactattactctggtttggttctacttacatttagtaactactaataaaatttgaccaacttattaaaagcaatgctcaactttaacccttatttattggtcagccttactcttcacatgaactcccacctttggtaagttcatgcacgttattccccacaacttgttgagctatgatcttttgtgagatcacccttgcgagatataaccccccacaggagaagaacatgtgatctaggaggagccgtacaatgaggagtacgagttgatctaggtggcgccttcgagtcagctttgtggcgccaaggaataatacttagttcgctttattattatcatttattttgttaagacttccgctatgtaataatgacatttatgatatttgtg

SEQ ID NO: 28639 - DNA, 1187 bp, Zea Mays
gcggaattgatctacctatcaacccacacaaccagagggtgcttagacaacaacaagcagaaatgaaccctctgaatcctccaccggctgggatagatccagtggttgcaactcagatgtagatgctgcaacaaatggtgaatactatgacggatatgcaagctcagatgcgacaagaacgtcaagagatgtgccaggaaaggcatgagatgagagaggaaatgaggcaagagaggatggtacgacagcaacaagcaccaatgccccccaccaccagttccaccctaggacaagcaccgggagttcatgagccacaagccaccgacattcaccagctctccagatcctctacacgctgatgattggctgaagtcagtggagaagatgttgaatatcacccaatgctctgaccgggagaaggtgctttatgcttttggtcgtcttacttgtcccgctactgattggtgggattcttacactgctgctcatgatgctgccaacaatatcacctaggcagaattcactacatagttcagaaactaccacattcctgctgggttgatgaagataaagaaggagtttctatcgctgaagcagggcaatatgttagtcagtgaatatcgagataaatttattcaactatcaagatatgcttcagatgaagtggatgatgatgaaaggaagcaggaacacttcatagagggacttaatggaccactgcagtatgcactggttgctcacaactttccatcattccagaggcttcttgacaaggctctagctattgaacacaagcgtgttcagctgggggatatgaagaggaaggctatcacccaggggtaggggaacaatagcgttcgtcctcgctatgtttcgccccagggtaaaccagctcgtactggaggaggtcagcgcccagctcagtatgcactgtagaggactccacagaatccacacactcgtcaggctacccccactggcaccccggtgggacccacaggatagagtgcagtcaccacatgctacaagtgtggtcaggttgggtattatgccaatgtttatcgcagaggattgccaatacccccatccaaaacaagcaacaaactccaggttctggcaagggattcagcattgccagagtcaatcaagtcagtgttgatgctgccgcagatggagctgacatcgct

SEQ ID NO: 28640 - DNA, 237 bp, Zea Mays
acgaagatgatttcctgtattgtctcccagacaacaaagacatatatgtctgccgggagatggctaaaagtatgggatttccgaagctcgagataggcctttccgccatgtcgaaggatgatcttgcggacaaccttgcatacaacaacctgaaggtacataatttgaaaacttaaagtttaagaatttgggaataatgcttttattcttatgctaaacctttatccttctttttcg

SEQ ID NO: 28641 - DNA, 504 bp, Zea Mays
agaagttgtataggaacacaaaactatgtgttactgaagaacactgtaacacataacatttgtttagtaaaactcttttataggtaacaattacagtaacacaaaattagtgttacacctgaaatgttacgaagatattggtgttttgtaacacatataaaatagtgttatgactaatgtgttgcaaagaaacctatacatatactttacacattttattgaaggtatatactgtaagaaggaaaatggacgtcaatatatttgaaatagcaatctgaaactctagtgttcgaaccaacagagagaaactctagcgtttcgaaggaaaaaaacaaaaaaatctaatgttcgaaccaacagagagaaactcttccgaaggaaaaaaacaaaaaaacgagggcaacaaacgagtacagagaggactcaaacccagcacaccaggcaacccaaagagacgacacaccactgcactacgtgaagattaataacaagttaacgaagcgc

SEQ ID NO: 28642 - DNA, 466 bp, Zea Mays
gtgggcctagggagtcagccggtcagcacgaccagtgaacacgtgaatcaagcagataggatgggcctgcctgtcggcgcggtgtgacgccgagttgggccgagcaacggagagtgcgaatgggccgagggacaagtttgagcacagcgcggtttgtttgtttttattttttttcttttctttttcttttctgttttcttttcttttataatttcagttgtcaaattcagattttcaaacttaaaattgtatcataatttaaagtacaaatgcaacattacaagaacttcggcatgagatgcatatttctgtatttatttatttgttatttgaccagcataattccatgaattgaatatgtacaaagaaaagaaaactaaataatctctaaaggttcctaaatccaaaatgccaacatatgcatagatttatttatttactttatcatttttctcttacataattt

SEQ ID NO: 28643 - DNA, 73 bp, Zea Mays
gtttatcgattgtgcccttcacacactaatttgcattttcacttagacatcacatgaacactactacctttca

SEQ ID NO: 28644 - DNA, 550 bp, Zea Mays
gttattttattcagcactctagttcattacaagcataacaaccaccacaacactacgcacgagcgtttcctactaatgtgtccccaaactccctgagaagatcatcaaggctggccagggacacttcctcgacgtcagaaaggttctttatccctagagagggcaatgttggcggggcttcttccttcggatcagtctggcatccttggcttttgaaacacttccggatcttcttgatgggggcgagcctcttcagccttctagcgtagttcatcttcaaggtctggtatgcctcacgagtgttggcttcctcgccttctgccatctcgagactgtcttggagagctgccttttcttccttcaattccttgatttgccgctctaggctttccacccgagagtttaggtgggtgcagtgggagaaaaggccatcaaagtggttgtcaagggtgtggagatatctgaccatgttgattatggtagggtcatcttcattatgctctctccctgacaaagtctagagtcttttcctccatgcagggttgttttt

SEQ ID NO: 28645 - DNA, 313 bp, Zea Mays
cggaatttctttattacaaaaggttacaagttacaacaaatttacattgtttatcagagtggttacaaaagtggttcaaagtgataaactttgaactgttataaattatttataagtttgaaatatatgctagctcaagtgaccatcctcaataagaagtatagaagaagtacttagagtcttagacttataaggaggccgtgcccatcggcgcttaacaccatccaaagcagcacaattctagtacctgcaacaacatgggttcgaaaaccctgagtacgaagtgtactttcgcaagtcttacccgtctaag

SEQ ID NO: 28646 - DNA, 865 bp, Zea Mays
aatcacacgacatatgtagcacttaacccttgcatatgtcaactcgccactggggtttttaagaccagatcgggttcacgccaaccgagagcacatatacaccaccgtccagcctcttgccacggagggtacacgctactctcgccatctctccattcccattgcgtgttgtcatattctagtattagtctgcccgaggcaaagcttacccatgatgaggcatgtgaccagttaaaaggtccttgatcaacaagcctacagcgagacggtcgttaatcgactcagacggagacactacaccgagattcccttctcgtgcaagtcaaccgcacggtctcagctttattatttaaaacccaaagtttggtacttggcagaggtacatcttttccgatgttgaacccatcaaggcctttgacagattcaccatcataattattttctttttgaaaatattcccacccactgaagcatcgcttttgttttaaaacaaaacattttgtttttctagagcaaggctaagcataaaaaatccttttcataaaagggtatcaaggaagagtaatcaattatcaaggaaggaaatgcatcaatggtttagcacacaactcctatcacctaatgcatcaaacaaggtgataaagattttaaaaacagcaaggaggtggcaaatgcaccggggcttgcatggataacactaggttagtgttgttagacgtcaatcacttgacgatcatccttgttctagcacttgatcaggcaggttcatccatcagcatcaccatgcggagtagcccgcgcttagggtcgacttggcttgtcttccgcatcatgcgattaattaacgtacctgaatgaaatgcat

SEQ ID NO: 28647 - DNA, 1860 bp, Zea Mays
caagtttatacggaaatactagttatcgatatacgactatgcgcaataattacacttctctagattaaccgaatctaacgtaaacatcacaaaacaacaaactatacacatttaatacaattagcctaaacacaacttattagctaattaattaaattctaaacttatccctcgctttataaattataccacatcgctcacaaagaattattttaattttatttcacacctcatatattttacatgttaacaattaatcaaacatgtcaggtttgactaccaagatatcctacaaaattaacgatgatatccttattggataatcgtttggattactaaatcaattcttcacgctattaatcctccttacacaataattattttaaacttgagtttcgtttgacacgaccactttatacttatgtacataatctattcatcaaaccaataattaagctaacaaaaaatatgaatcgtcttaccatactaactctgacgctctatccgcgaactcggcaaggattctgattcagctcttgtgtcgagcacttggtaaacatcatgctgctggctccgtcttcgcccaactcttgggatttcttgatgacgcacggaacgacgacgacctttgattaaagtctttgaccgagcacttgattagcgatgcacacggacctcgcttacatttggccaacatctgggattcggggttcaacgaggtcgagcagaggatggcgagcgcgagcgcacgcgacaactggccagggagggaattcgaggaggcacggactgtggctaggataatgcaagtgttgggtgagctcgacgaatagtgacgcgaggagcaagacaaggtcgcggcggctgggcgagctttatggcacggactgttccacggccaggacggctgccgcgacgcgcacgacgtcgccacgccacaacaccaccacggccaagaacagaggcacgcgcagggagcttcacggcacggtggcgtccgagacatggacgagcacaaacaagttgacggccgggccggacgaggagctcgcggccggcaccaagggcgagagcagggagggctcgggttcggaacggcgaccaaggaaggagcagggatgggagggactcgccacgaaaaattgggcgcgcgcaggagctgtcaccggcgagggaggatgtaggggcacgaccgagaagcagaggccgaggaggagcgcggttaggcgaccacacaaagctcgactagaggagcttgggcgcgacggttggagcaggcggccatgggcagaggcacacagcgatgggagcaggcgcgccatggacgcgcaggcaaccgagaaaagcaggggtgagcagggagcttggggaaccgcggccagggggaggtggccaagcttgagggagcgacggctgagcctgagccagcgcgcgcgaggatctcggctgggcgcaggaaggaagaagatcgagctgggtgcagtggagaaagttcagggcgcggcgctgcgcagaggggggagaggaaggagatggacgcgcgcggcgagcactggcgagcagcgggggcgcggtttggctatggaggagctcggtcgggcgccatgggggcgagcagagagctccgagcggagctaggacggcgcgcagaggaggaggaaggaggagcgcgacgctgggcagggggaacgcggtcgagcatgggcctcggctggagaaaggaaaacagggcgccgagagggagatggagaagagctcatcggggcggcagcttgaagatgaagactaggcacgcacgtagaagataagaccgcctgaaagaaaatctgagcaggacggctggatctttttccatgagcg

SEQ ID NO: 28648 - DNA, 816 bp, Zea Mays
ctctctctctcctctatctctcctctatctctcctctatctcttccctctctctctctcctctatctctcctctctctctctcctctttatcacaaaatgctgtgggcacctctagagttcaatgagaagtagagtatataatacctgtggagatgatcgataaagcctgatacgacattcagacatgtcgccgatcagatagcctgcctggtgagacgacaacaaaatgcaacttctttgattgactcgattgatcaaagaagacttcgacttctgcgctccagtgctgctgcagcagtacactttcccccgccggagtagtcgaggctcaactcaagagaactagagaaggctccaatcctagggctaggaagcagaaaccgccgaaggtgccggagtatataatacgtcggaaacggctgacgggcaggcctgcgcggcctcctcggctcctccactcagtgagagcattcaattgcagtgtttaaatcctatgtagtctccttgcttcgcgtatctttgtcttcactcccactgtatgaattaaatcctatgttgtctcttggctttgcgtctctcgtcaccgttggagatggttgtttcttactgcctgatatatattagtcgaataatcttctctgcttttatttacctttctaggtgataaaccatgactgggaaaaagaccacggcttcctctgccggccgcactctaaagaaggctgcactctaaagagacggggttggaagatgaggaagaggcgactgtgacactatccgtggagaaggacgcgctggagtgcgacatctgctgc

SEQ ID NO: 28649 - DNA, 1028 bp, Zea Mays
aacagattctgtacagaattaagagactgaaaaactgctataatcaaactgcaataactctctgatctgatgttctattgaggtgttcttcgcggccacggaaagacctacaaattatctacgacttatatatagactttttatttttttgaggcctctaagaccacggaaaactgggattaacagaaactgtcgaatctgccattctgcagaaaactaaattcgagatcaaagcctaaccccacatctaatccaacctctaatcccttaattcccatgatccacaacctccaaaagcacataattacagggaggaacaaggatctcatccatacctagggtttcccccaagaaattctgcaagaagagatggggaagaacatctccttgatcctctcttccccttcaactcaatgtgctcctcctcttctcgatccttgctgcgtggggggagatctagagggaggaggaagccgtggagaggggctgccatgggaggagagggcagccagcccaagggaaaaggagagaggggcggccaagtgttggagggggggaaagggttggcggccaagcaggggcaaaagggggaaaaggccaccactagggttttctttgcgggagaaaagaagcgacgccacagatgactccgacttagcatccaacggcccacaacccttttcccacatccacgcaccgaagatcaaccctttggcaacatttttttgggatattacactctacccccccttaaaaagaattcgccctcgatttcgtccactccaaacaaaacatccatggtaccccatataacaccaccattccaaaacatgggtccattattggtcttaattaacacaagaacttcgacctcagactaaatgtctaaggaaactacaccacctgacatcaagcatgaaccaaaatgtaatgaagctcaaaccaagtcatagatgcaatcaacactacgatttcacaacatcgaatttggatgcagccatacatccgcatcaatgtcttaaaacgac

SEQ ID NO: 28650 - DNA, 509 bp, Zea Mays
cgaagatttgtggctggtttcggtataatctgcaaacctttgactaacctgttgaaaaaggatcaactctttgtgtggactagtagtacccaacaggcttttgatgcactgaaagaggccctcattcatgctccagttttggctataccgaattttaccaaagagtttgttattgaaactgatgcaagcggagttggaattggagctgtgttacaacaggaggggcacccgattgctttcattagtaaagcattgggacaaaaaaatttgggactatcaacttatgagaaggaatgccttgctattttgtttgcaatagaacactggagaccttatctgcaacatgctgcccttgtcatcaaaacagaccagcagagcctcattcatctagatgatcagagggtaactactccttggcagaaaaaagcattaaccaagcttatggggttgaatttcactattgtttataaaaaaggagtagagaacaaggtggctgatgctttatccag

SEQ ID NO: 28651 - DNA, 555 bp, Zea Mays
tgcccctgcgccagcgtgaagtgtcacacccgggctttaaggaacaaagttgggtgcatctcatacatgcgccaaagaagacaacatatataataatagagtgtatagagataaatgtcacaataatcagagtaattattacatagcggaagtcttacaaaaataaaagataaatataaaacgaactaaggatcatccttggcacaagtcaactgggaaacgccacctagatcaaatcaaactcctagttgtggctccacttgaaccacctgttcttctcctgtggggggtgtgagacagcaagggtgagctcacaaatgttaatcgctcaacaagttgtggtgaataatatgcatgaactcaccaaaggtgggagttcatgaagtgtaaggctgatcaacaaaataaaggttgaagctgagcattgcttttataagctggtcaaattttattagcagttactaaatgtaagtaaataccaaaccataataaaagtaatataacaaaattaataaataataccatgcaaatgcaaatgacaaaattgagtttagg

SEQ ID NO: 28652 - DNA, 563 bp, Zea Mays
tcgtttggtcccaccatagcgagcagcggacccgcggcgattccgatgcccggcgacaaactaccggcggtctggagcgtaatccccccaggcacagcaacgaccatgaccagtgaagctccctgccccaacctcgaggtcccaatggcgatgagttcacgatttaatggtggcggcgagctattctccctctctgttgtttctccctatcgggtggaggcacggacgccgactaaggccgagggggtattgcttggggcatatatgggcgaagaacgagctcgaggtgctttatcgcgacagctcgcgccgttgcaacaaatccccgaagaagcgacagcagatacgggtagtgcatgtggtctgttgacgccgtagggagaggaggcaacagcgcaccaggctccacctgcccacgcgacccactagtgttgtcccgagaagctaacgccggtgaggaagcagatcgaggtgttcaccggacggagggggagtttatgcgggcggcgcggtccatctctatttctcaccccgtcggtgaagcgaacgtcaatgaaactgcg

SEQ ID NO: 28653 - DNA, 238 bp, Zea Mays
cgaaggggtatctgccaaccacgaccactcatatctaatcctacggcccagattaaaccatacaacttaatgtatcggtacgctctcgggtcccttggatacgagattgatggtcgagggagttccatgtctacgactcgacctagccctcagatctacaatctacggctcggattttatctaaaaagcggtacgcggttttctaatctcgtacgcacatctagatcgaacggtcaat

SEQ ID NO: 28654 - DNA, 800 bp, Zea Mays
cccccttctacatgctccggcgccctatttctagttcaaacagatgctacacgttgctcagtgcaaggcgaatggagcgggtaacaacttaccagaaactagatcatgtgcgacgcggcccagggagaagagcggcaccgaggcggcgacttaaccatagcgagaaatcacgtgctcccaagacacggacgactcagtgcgatgccgcgagcaccatccgagcaccgcaatggagcatcacaggtggtcttccaagggttgggaaccggcgcaggcgtacaccggcgtatgcgcacagattccctccccaaagctcgacggtgggcgcgcctgggtcgaggatgcgacgaggccaagcaagggcagcggcgacaggactcgggtgcgctgctggagagcatcaatcgcgaggacgccgacaccaacgaccttagcgagaaccaatggcccgtccgctagtcacagggccagagggaggaggacgaagggtgggcgccgttcaccggagagcgagatccacggccatggtgtttgggaggtgagcggcgcgaggcttggggtcttatagcccagaggcgagggcgtaacagccacgatcgaagcaagcggggcaggtagacatcggtcaagcatggtgttaccgtgcaagatctgcggcgagttggggaaggcgacctgagagtgtggtcccatttaactgcgaccagggttctccagcgcatgtgagggtgaggaggctggtgattgggccgcgatgtcagcaggcgcgaaagcgtaaagggatgggccacgcgagcgat

SEQ ID NO: 28655 - DNA, 150 bp, Zea Mays
cctagttagatggctcctccacttgatcagtagccactggagtagactcctccttcaaacaccacttcttctaggtgttctacaagtcaattacaaatacatgtatgcttatataatgatatgaaatgcaaactctcacaaggagaggtg

SEQ ID NO: 28656 - DNA, 444 bp, Zea Mays
cccctctgctcgtcacgcacctgctccatctatggccggctccttgcgtcggtctcccctgcaaactccctagcacgcatctccctggcatgcctggctcgcccgtccgcgctccacctcgtccatggccgccagtcgagtctctctgtccctgctcggatggcgcacgcccctccctctcggctccttcctcttacttcccatgggcgctttcctcgcggggttcacgcagctcgtcgagtggtggacgaggtgcgccaccgcccaagccgaatcgagctgcagaaaccaccttgccatggcgacacaggccggccgtcgtgtgcccctgtagcacgcccttgtcttctccccatcgtccgaccgtagcccagctcggagtttcctctgtccatctccagctcatcgaattcccttgcttctccctccctgtcctctgctcgc

SEQ ID NO: 28657 - DNA, 1175 bp, Zea Mays
attttatcccgtggtttggccaacgcctactccacgttgtggtgacctccttcggtcaaggattgcactcaatccctctcaagtgatccaatgatcaaccttgagtaccacggttttcttccttatagtagaggtttcccattgtgagtaatctccacaagttggagcctctcacccttataatattgatcacaataaaaaccacaggagtaagggagggaatagaaacacacgcaagagctagagtcgcagcaacgacacgcacacaagtcaataaacgagcacacaaacacagcgcaatgaattcacaactcaacaagtgctcaaatctaaaacacaatgatctggatgcgtgcttgcggagtctaggtatcttaggatgttcaatggatgcttggtgtactgctccatgcgtctaggggtcccttttatagccccaaggcagctaggagccattagagctccatttggtaggcaattcttgccttctgtccgttggcacaccagacatgtaacaccccaggttccacaaacaacccagaatgctactgaactacacttctgacgtccatatataaaatttcggcagcatcccctttgcaagattgcataaataagggggcaacaggttataaacatatatcatgaccaaaaacatactaagtattattaatcggctagcaagggaagataaacgtacgacctgaactgaattaatcagtgtgcacgtctatataaaaaacaaacttcccttgacaataagtttctaattaaatcatggctgcgcctgggcagcgttattgtgagagtgtaagtggacgtgctgctactcccctcattcccaacatgtatcaagtacctgcattgagtaatgcaagagtgagatgacatatctcagcaagtaaaatattatcaaactattcaaccacataagaacattgttttaccaccacctgattccaccaccttcttattaccaagatgcagcacgtatacaacgtacaacacacctagttaccacacctcgcaggtagaaaccacaatagtaacatagtaatgtcacacttcatatattcctcatgaatgcaaatgtctgcaaatgcaaggatgacttctgccttcatacctctaaggatatgaagccgcatcgtacccctcctcgggcaacatacgat

SEQ ID NO: 28658 - DNA, 598 bp, Zea Mays
atcgggtttcttaagaccagaatcggttcacgccaaccgagagcacatatactccaccgtccagcctcttgccacggagggtacacgctactcttgtaacaccccgggttccacaaacaacccagaatgctactgaactacactttcgatgtccatatattaaatttcagtagcatcccctttgcaagattgcataaattagggggcaacagtgtataaacatatatcatgacaaaaacatactaagtattattaatcggctagcaagggaagataaacatacgacctgaactgaattaaccagtgcgcacgactatataaaaaaacaaacttcctttgacaataagtttctaattaaatcatggctgcgcctggccagcgttattgtgagagtgaaagtggacgtgctgctactcccctcattcccaacatgtatcaagtacctgcattgagtaatgcaagagtgagatgacacatctcaacaagtaaaataatatcaaactgtttaaccacataagaacattgttttaccaccacttgattccacaaccttcttattacgaaggtgcagcacgtatacaacgtacaacacacctaa

SEQ ID NO: 28659 - DNA, 1048 bp, Zea Mays
gttgattcccatcttggatgaagttgaagtatctttttgaatcatgttgtatgaagtgttgtaggcatgtcatgcacatcgcatcatccatattgcattttgaagttatgtcgtgatcttatggtccgaccgtaccggtacacttttagcatcgtacgttgcccgaggaggggtacgatgcggcttcatatccttagaggtatgaaggcagaagtcatccttgcatttgcagacatttgcactcatgaggtatatatgaagtgtgacattactatgttactattgtggtttctacctgcgaggtgtggtaactaggtgtgttgtacgttgtattcgtgctgcaccttcgtaataagaaggttgcgaaatcaaatagtggtaaaacaatgttcttatgtagttaaacagtttgttattattttacttgctgagatgtgtcatctcactcttgcattattcaatgcaggtacttgatatatgttgggaatgaggggagtagcagcacgtccactttcactctcatattaaggctgcccaagcgcatccatgatttaattagaaacttgatgtcaaaggatgtttgtttttttactagtcatgcgcactggttaattcagttcatttcgtatgtttaactttcctttgctagccgtttaataatacttagtatgtttttttgtcatgatacatgtttatacactgttgccccctcctttatgctattttgcaaaggagatgctgtcgaaatttttatatacggatatcagaagtgtagttcagtagcattccggggtgtttgtggattccgggatgttacagaagaagaatagagcttggccgttggatttggaatctgtgaccacagttagatatgcggcttgaatagatctgagccgtgggataggaatcaaccgtcacaattagatctagataagtcatgggtttcgaccttcggatcgaatctcggcggccaagatctgtttgcatgcaccgctttggtgtgtgcgtggtgagccatccgatgcagatcggacgtgggagaatcgat

SEQ ID NO: 28660 - DNA, 313 bp, Zea Mays
gcgctgcacaggcatcttcgacacggacaactaggttgctgcacaggcgagccatgccggaccgccgcgctggatgggccaccagccatctcagccaagggagcagaggcggggctagttccgctcggccggccacggtgcatgggcttggagagggctacgccctcgaccgcagggggctacgttgaggggagctcgaccacgacctcgccggctgccaggcaacggcgccactgcccaaccagcgcaagggtagcgaacgcgatggctgcacataggccaccctggcctcgctcgcatgggggatccgctc

SEQ ID NO: 28661 - DNA, 171 bp, Zea Mays
gaacactatgcccttgtttgttttaattaggtgtgcaacgctcgcatgctggctcactgcacctgataagtgataagtcgatcatgttggttggtcgatgcatgcatgcatgggcttctgattaggagaccctcatgatttcaagctgagaccagatctcgcgcgccatgc

SEQ ID NO: 28662 - DNA, 502 bp, Zea Mays
ggggtctaaaacacgggcgcgaaataaccaccaagtgtgttaggatcaaatcttacacatatgatgactcatggtacagaaatgaatgtcacaacattaatatataacggagttctctacaaaataattaaataattacatcatacgaagacaatgatccagcaaccaaagttgactgggagacgatggcctagaccactcacgaactcatcacagcatccttcatgcacctcatcccgtggtacctgttcttgacctaggggatgtgaatacaacaagggtgagctcacatacgttcatcgctcaacaagttgtggggaataatgtgtaactcaccaaaggtgggagctcatttgaagtgtaaggcttaccaaataggttggttgaagcagagcaatacttttaaagttggtcaaaattttattagcagttactaggtataagtagataccaacccaaataaataagagatcaagatcaataacaacacccacaatgtaat

SEQ ID NO: 28663 - DNA, 575 bp, Zea Mays
gattgatacggattggagatgattttgacttactagggattaaaaccccctcaattcccctcaattcatatggattggggtagaaccgaacaagccctcaatgatggcgtagagggcccatgcggcggcagcggccatggttggcaaacagcactggcaccccggtacaccattatcatgaacgatcggttctacgctatgaacatgacaaggcgaactacaggggcgggtagttaccagctattgggccgcacagacacccatcgacgatggatggtggcagggctgtcctcaccaagcccagcaagcaattgccaccgattcttggccaccaaagctcaacgataaccatcgacacgctcctcaagagaatgcgaagctccctgaccccatgtttcagctcgagcgatgacgttccccagtttccctcgcggcggcaactcttcttccgcactgatcccctcggttctcggtgacgaggcatgacgcgatcttggggcgcccatgttggtagggggctagaggcctcaggtttttatagcgcggcggtagagttcgtagcggcagaatccgcg

SEQ ID NO: 28664 - DNA, 626 bp, Zea Mays
gttttcttaacgaggctctcaaatcggatttgggcatatgatattgggagctgagtgtcacacccggatttcggggcaccaagacccgggcgcgaacataatcaccaggtgtgctgggaccaagtctcacacatatgatgattcatggcacaggatcgaatgtcacatctttactatataacaggagttctatacaaaataaataaataatttcattataaggagacaacggtccagcaacccaaagttgactgggagacgatggcctagacctctcacgaactcgccacagcatcctccatgcgcctcatcctgcggtacctgttcttgacctgtgggggggggtgtgagacaacaagagtgagctcacatacgttcatcgctcaacaagttgtggggaataatgtgaatgaactcgccaaagatgggagctcatgtgaagtgtaaggcttaccaaagaggatggttagagctgagcattgcttttaaagttggtcaaagttttattagcaattactaagtataagtaaataccaacccaattaaatagtagaacagaagtaacatcacctgcgatgcaatgcatatgacaaattgaatttagttccataagttaatcatgtgag

SEQ ID NO: 28665 - DNA, 131 bp, Zea Mays
gccttttggacgatgatctaatattggagcaacccacaccgtcgtaaggagtatgctggccgcaatagcttcgtgggggctccggacacctccagcactaatcaaattgctcctatcgtgtgtggttcgac

SEQ ID NO: 28666 - DNA, 665 bp, Zea Mays
atgtgcaccaaacaacttaacaggatctgtctgagtgtcccaatgaccccggataaaccacttaccgcagagatcgcaggattaagtaaacacaactcacacacaaacacttgcagcggaaataaactctttattgcaaaatgattacaagtttatcaagattttattatacctcatcggagtgattacaaaagaaagtgtttcaaaagaattacactttaaaatgttatagaatatttgtaaatttgaaatacatgctagcttaagtgacaatcctcattaaagaaactataggagggatatacttatataagaaggccgagcccaccggcacttagcaccatccacaacataacaaaattacaacctgaaaaacaacagggaataaaaccctgagtacgcaattactcagcaagacttacctgactaaagaaaagactctcaagggtatgctggtttgtcgggaatcaaggtaaagcttatcaaatttcaaagactcatttttgcagaaaagcttactagtagtggatccttatgccaaaattttacatcataagttaagtacttttcctgaatctagatttgcctaatctagagcattcacttgtcctatactaactttcttttaaatcaaaagtttgtttcgcttgttatctacgatgaag

SEQ ID NO: 28667 - DNA, 798 bp, Zea Mays
ccatatgctccctttcgtttagatggtgtccatgggatctaggtggctgcacacgtgcaagtccaatacgcggagggtgtccaccttatcttatagggtcaaaaaatcatatttggaataataagataagtcgagatgtaaaaggcttgtcttctaggtgtctggttttgggtcaagtagactcggtctttgagtacccgtcatgttgcagctcgaggacgagctacttgtccaggaggggtgtagtgtcagggcctaaagaggccaaaggaggggctacggcagcagcaaccatgggccctccaaagggattagataaggataattagagataagtgtcagggcctaaagaggcccacggaggggctgcggcagcagcaaccatgggccctccaaagggattagatgataattagagataagtttagaagattagttgagattatctagtagattggttgagattatcttggaagattatcaattagtagtttgttgagagtttttaggagatttttaaggagataaggataaatagctagaaaggggcagctagccggtctatttatgtaatcaatggatgagaattaaagcaggcaagaattagaagggagaaaccctcctcttgctcggccatgggcagaggcccccggccggtgttcctacctattgatacccctctccaatccctcatcgatctagcgagcataacaactggtatcagatagcttgggtttcgatctgatcccatggcttctgctgccaatttcgcggcgtcatccaggcgatcgatgtccc

SEQ ID NO: 28668 - DNA, 1199 bp, Zea Mays
gtcaagtagactcggtctttgagtacccatcatattgcagctcgaggacgagctgcttgtccaggaggggtgtagtgtcagggcctaaagaggcccacggaggggctgcggcagcagcaaccatgggccctccaaagggattagataaggataattagagataagattagaagattagttgagattatctagtagattggttgagattatctaggaagattatcaattagtagtttgttgagagtttttaggagagttttaaggagataaggataaatagctagataggggcggccagccggcctatttatgtaatcaatggatgagacatatagcaggcaagaattagaagggagaaaccctcctcttgctcggccatgagcagaggccccgaccgatgtttcctgcccatcgatacccctctccaatccctcaccgatctagtgaccataacatctggtatcggctagcttgggtttcgatctgatcccatggcttctgttgccaatttcgcggcatcatcatggcaaccggcatccccatctccatggactgtgctgcatctcaccttcgtcacgccgtcctggcaaccgacgtccccatctccatgggctgcgttgtatgccaccttcgtcatgccatcctggcaaccgacgtccccatctctatgggcagcatcgtctaccaattttgtcaccacatcctagacaccggcgtgcccatctccagggacaacgccaaatttcgtcacatcatcttcgttgacgacgtctccatcccaatgggcgacgccactaggggcaaccacgactcagcaatcaccagctccatcgatgggggacttgtggaccaacataagggctgatctcgcaaagatgcaagccacgctacagaaggttgagcaagggctgctgcaaatcaaggtagcagtgcaacatgagtagcaccagctggcgttgtccgcacggctctagacgtcggcggctgtgggcatacaagctgctgctcgtggcttccttgcacaacatagagtgcgagagacgcgtcggcagatgctcgaggcagccttagtgacggttgacctcagcacacgggggtgcgacctcgccctgtcggacaaccatcagcaacggcaccgggccgctatctctaagtgcgagcatggtacgtgtcccgcggacggtgaacttcaactctac

SEQ ID NO: 28669 - DNA, 1559 bp, Zea Mays
atggatcctccactacatgaacaggtccacgccacccgagagcacaccaccccttttaggcgatcctttgccaggagggtacgtgccactctcgccatctctccactcccagtgcgcgattgtcttttcatgtatggaatagccgggttcaagcttaccctgtcccatatccaaggcatgtggctagttaaaatagtccttgatcatacaggcctacatacgcatccaatccttaattaacctgggtggagcatcacctgttcctaacccaagtctcgagttaagtacttccacccttaggattgttttgtgttccttaggatgaaaagagcattatagggaactttgcagtaagatcccaccatgctcccaatgaacatattcttgcaggtagaagtcatccttcctcaggataacccctgagctaggcattattgcaaagacaacctctatccacaagatctaagcagggctaagcatttttgtaaatcatattttgatacttcatccgaagcatctataaaggtatggatatcaaggtaggcaatgcatccaatagttttcaagcaactcctataaacttaatgcatatttcattagacttaaagtgtataaaaatcttttaaaaacacaaggaagtggtaaaatgcaccggggcttgccttattgcagtgaagaggtactcgatccctctattaaaccccagttagatggctcctccacttgataagcagctactggagtagattcctcttcagtcaccactttagcttgaatcttcactccttctggtaggagttctatatgaaatgacatgatcatggatgtttatgcttatgcaacttgaaaagaaaatactaagaagcatcgcaaggcttacatcactctaatggtgcacacaaaaactaacaaaaccttaagagagctaaatactctaatatcacaactcaattcaccaaccaaactaggaaaccttgcctccataaccaaccaagtacttcatttacgccttaagcaaggatccaacctgcatgaactacaagttatagtgtccaaaaataagccacaattcattgaacctgctttcagttctctgaattcatcttccattgctccattcctttcccctctgttcaatgccttttatctcataaactcacatgacaagagacccacttacttaaccaaatctattccctaagtattgctcttccactttggcataacactccaagctgaaaatacacattgcaaattcagtttttaggcagctgaatgaaattcagtctctgcaactgaaagtccatcttttgggcagtctttacaccactttgtgtgtgggatctaccctaactcacctaaaggatgttgttatctaacacatgttcttcaaactttctgtaaaaactttggttcaaaaccacctagaacaggcactacacagctccaaaactgcactaaaattactgatttcagactttcagttctgaataaactaagtcaccaaccacctgacagtcaaacttttggtcacttttactctcaaatttatgtgaaac

SEQ ID NO: 28670 - DNA, 435 bp, Zea Mays
cttatgtttagctttggagggttcctaccttcctgctattgtaataagttatgcactttgagtatatcaggacttgtaataaatgtaactgttcctatgtaataaccttccattttagaaatgaaaagaatattttgtaaagtcttcctctcttatctccgaagtgtgtattgaatgcgattactgtaatatgcatgtatggtgggagatccttgggatgatgagttcaagctgttgaactcgtgatagccttgttaagttacctggtacacgtgcatagccatctgaggtcatcaaggcaaggattggtgcacgtgggcctgatacttgggagggctgccacagttcatgtccggtgcgcgatctccttcctattctagcgcagacgaccgttgcagattcgtggcaattggcgcaccggacagtccggtgccc

SEQ ID NO: 28671 - DNA, 7868 bp, Zea Mays
ccaaactttcccgagagtggcctgttcaccggacagtcccgagacagtccggtgtgccaagccaagctagactttggctataccaagccaagtctttttcttttttttcttctcttctttactctgtttctagcactcagacaatacatgttagtactaaaaacaatgtaccaagtctagaaacatacctcatgtcttgatttgcacatttctcttcatttatctcataagaacttaattatatgtgttgggcacttaatcaccaaaacattatagaaatggcccaaggacacatttccctttcaatagtgaacagtacctgtccggtgcgccaccggactgtccggtgtgtccatcgcaagcaaaaccagcctacgactaggaagtgattggaggctataaataccccatcaaccacttccttcaatggcatccaagttttctgaactccatattcattgcaagagcaaagccaaacactccaagacacattcaaagcattcaatccactccaagctcccaaaatcaactctagtgcttagattatttatgttcttttattgctcttgttgcttggattgctttctcattccccattcttattctcataagtgctttgtaaagctagcaagagacacctaagtgtgtggtgatccttgcggggtcttagtgacccaagtgattaaggagaaagctcatccggtctaagtaaccgtttgagagagggaaagggttgaaatagacccgacctttgtggcctcctcaacagggactaggttctttggaactgaacctcggtaaaacaaatcaccatgttcacttgcattgatctttgcttgatttgtttggcctctttcctcactctaaagttcccttgctcacatcaatttgagtttgcgagcaactctaagcaaggagaactatctttcgaactccgatttaattctaacactaatcccggccttagtgcgagtttaagttcataatttttaggtttcgcctattcacccccctctaggtgactatcacatgtggagcttggtacccatcaaacgcatgagctcgcgccaaaacatcgaggtgaataccgggtcatggtcggacatgatggtctggggcacaacatggagccgcacaatgccgatgaataaggcttgtgcgacggactcagtagagtacgactgcgccagggggatgaagtgacagtacttgttgtacctatccaccaccatcatgaggacgaacttgacatgaatgcgaggtaatgttccatgaagtcgagcacaatgttcatacagacgccctagggtacgagcaaatgaaggagaagacccaccaggtcgaggttctccgatttataccgcttgcatgtcacgcaagagcacactaggtcttgaccagttgttgcatgttaggaaaatgaaagtcgcggcgaagacgatgaagtgtgcgttggaccacttcatgttcgtccccgtgtacggcgaccataatcccctggatgagcagggatgctaggggaatgtccaggcacccgctgaactggaccatgttgtctatgagcgttcagggcacgccgcgagagcctatgcagagttcgtctcgtatggtgatgagggtagggttggtgtcctacacttgatggaggcgcgtgctgaagtcaaagtgtggagtagagatggcgaagatggcctccgcctccgtgtcgagttgggacaaggcatccaccaccacatttgccacactaggcttgtattcgattgagcagtcaaagcccaacagtttcccccacctagtggcgctaggcatcatggtgaggcgctgatcaaacatgtacttgaggatataatgatctatcttgacgaggaagtgactgcctcataggtacgacctctagtgccgtatggcatggacaagggcgatgagctcccactcataagcgacgagggagcaacgacgtgaagcgacagggcggctgaagaacgcaatcagatggacatcctgaatgagcacagcatcaaactcgtgcgaagaagcaccacactcaacgatgaagtccttggcgaaacccgggatcgccaataccgatgttgatgtaaccgccaccttgagtgcacaaaaatcatgactactgcgtcagtccaagagaacccttccttcatgagaagtacggtcaacggtgccacggtgaagccaaagttgtggacgaatttgtggtagtagtcggctaggccaaggaacccacgcaccgcccgcgctgactaagacaccagccagttatggatggcctataccttggccaggtccatggcgacgccctccttaagagatgacgtggtcgaggtatgaaaccgaggtgacttcgaaggaacacttcacccgcttgacgaagagttgttgctgtcgcaacatggaaaagacgacatggagatggcaaaggtggtcagccccatgacctactgtatatcagaatgtcatcaaagaatacaaggacaaatcagcggaggaagggttacaaggcgtcgttcatgagtgcttggaatgtcactaggtgaaagggaattaggcttacacctatttcctaattgattttggtggttgaattgcccaacacaaatatttggactaactagtttgctctagtctataagttctacaggtgccaaaggttcacaataagccaataaaaagaccaagaaaagggttcaaacaagagagcaaaagacaacccgaaaggcaccctggtctggcgcaccggactgtccggtgtgccaccggacagtgttcggtgcaccaggggactccaagctgaacttctcaccttcgggaattctcagaggcgcttcgctataattcaccggactgtccggtgcaccaccggacagtgtccggtgccccaagggagagcgactctgaactcgccagcttcgggaatccgctccgctaaaattcaccggactgtccagtgaatcaccggacagtgtccggtgcacaccggactgtccggtgagccagcggagcaacggctacttcgcgcgcaacggtcgactgcagcgcattaaatgtgcgcctgcacgcgcagacgacagagcacgcgcgggtggaccaccggacagcctacagggcctgtccggtgcaccaccagacagccaggcgggcccacaagtcagagctccaacggtcggaacccaacggccaggtgacgtggctggtgcaccggactgtccggtgcgcccgtcgacaacagcctccaccaacggtcaagtttggtggttggggctataaataccccaaccacccccacattcaagtcatctaagttttccaccttccaactacttacaagagctctagcattcaattctagacacaaccaaatagatcaaatactctcccaattccacacaaagctctagtgattagagagagagatttgttgtgttcttttaagctcttgcacttggattgcttctttctctcattctttcttgcgatcaactcaattgtaactgaggcaagagacaccaattgtgtggtgatccttgtggggactttgtgtcccgtttgattgagaagagaagctcactcagtccgagggaccgtttgagagagggaaagggttgaaagagacccggtctttgtgaccacctcaacggggagtaggtttgcaagaaccgaacctcggtaaaacaaatccttgtgtcacactctttatttgctcgcgatttgttttacaccctctctctcggactcgttcttatttctaacactaactcagcttgaagttgtgtttaagtttgtaaatttcagattcgccctattcaccccccctctaggcgtctttcactagggcattgcacagcctgaatgacatcaccaagaattcgtagaggccctcgtgtgtgaagaacatcgtcttgtggacatcaccagaccgcatgcgaacttggtggtacatggatctaaggtccatcttagaaaagaatcgggcactatggagtttgttcagcagtttgcccaccataaaaatgtgaaacacgtccttgatagtgagggtgtttagggcgtggtagttgatgaaaaaatgctatatcagaagacaggctttctccgacaagaaagatgagaggaaccgtggagttggaccaatacgttggaatagatagctctgttgcttactttcaagctttagataggatcaatttgcccgtgcttgctggtgtcagggttgcagataagttgtttcggtgccatttcctttgttatgaatgaaattttggagctcagttgataccgaatgacttacatcacgatatctttttcttcctcattctgattttggttttcgtatcacggatgttggttcgcgctttatggcatttcaagcagaaaaaggactgacgtcttggggcgcgctagcgcgcgtacttacgcttacgcttaaggcaagaaatgttcttggtggatgcaggccttggtaccccaaaaatccgaccgccttcttgacgagaagggtcggtgaagagaatgccgacacgctactatggacaatgccctgctccatcatgggaacacgttgccgctccaactcgtacttgtgggacgttggatacaggtacggtcgtattgccactagttgcgcacttggcttgaggacgatgctatggtcatgggcgcatgaaggcggtagccccttgggctcagtgaagacttccctaaagcagtccagcagcttatccaaaagacactcgctggttgtcgtagtctggacgttgggcgttgccacgcctgaccaacacacgacgcccataggtgctggaatgacatttccatgctttaaagtcccaaagcacctagcccaaggtcgccagccactttgttcctaggaccatgtcgtacccggcaagtggatcacgaagaggtcgatgcagaacgtgtcattgttgaaggtgagcggggcttctctgatgacaccaaggcagatgacgcgttcgccattctccaccgttgccatgaggcgtggatgacgctgcagaggcaacacgatgtagagagtcgcatcgtcagtgatgaagttgtgtgtggagcccaagtccaggagcactgtgaaaatggtggtgccgacgggcacttggacctgcatggtgtcactaaaggaagccctcgtgaccgcgttgagggagaaatgtggggtctcctcctcgatgacctcctcatcatcggctgcacccatgatggtgtcatccttgatgacatcatcaaggaggaacagtcgcttgcaaacacgattgtgaccgcgaccgaacttttcatcacaattgtaacagaggccaaggtggcgatgctcctcctgcttcgcctgagtcagtggatgaatcgatcggccctccactatgagtgtggctagagcggccttgtccgctttgtctaacaagggcgccggtagggtgagctgtatgtaggcatcagtaggagcgatcgatcatgtgggggaagcgcgtaacacacgtggttgtttcgaagctcgatcttgtgggagaggctcatggtcgcctccaatgactgggggttgtggatctccacatcatggttgagtggacagaggaggccgacgatgaacatctagacatgttgcacttcatcgagacagcccacgcgcggtagcagggcctagaatgtgtcatggtactcttccacggtgctggatcagtgacaagccgctatcttgtcgagtggatttgatcggagaggaggcccatggcgtaggtggaggagctccttgaaatggagccacaaaggagtaccctcgtcttgctggacttggtagtaccatagctagacgtcgtccttaaggttgtacgatgccatcaagaccttctcctcctccatgattcactgttgatgaaaataagattcacaatgattgataaagatcaggggatctgacttgcaatctgtcggtgtttggactcgaggacctaactgactagtgatataatgttgcacatccaaaacctagatgggtgatgcaagatgacacaagtctttatcttggttcgggtaaaagatggccctacttccaacagaggagggatgggacttatattacctacacctaagtgcttgcagtagggaatacaagacgagtgggagagggaaggatcccaagtccgtggagttgattgagacaagtgccaataccgtggtagaggagaaaaaatgtgaagtgttcgcctgctaaagccgtaggctatcctatttatagccccaaggggaactggttgtaggactagagttggtcacgtactgtgaagaggtgtcgccgtacccctctagacggtatgtcttgaagtatggtcttatacttgttgttgacttatgcccgctccatttctactgagagccgaggccagggccgagggctcggccacgcacccggccccccctagtgagggggttgcccataccgtagtggttgacacagtactaagtatgggaaaaagcccttaagtagtgtgtcagccctgcagtgtttgatgatgttaggcgccttcctgtcgcggatatcgaggtctaagccgggctcggacgaggcggaagtccgcccgaggtcgcgaccgaacccgttctgggattcgaagacgtgcgcgtcacagtcgaaggagtggcctcctacggggttcgcgaggagcaggtagccgaggccaggctcgaacaaggtagagtttatcccgaggccgagctttacttcgagcgaggcggagtttgcgcccgagggcttgcctatgcttctgtcgctttgtacgtcccgtcgggagttgacagtcggcgtgcaggaacagtggtcgcatgcataatcatggttggtgaatctttgacaggatcacggtcttgttgctcctgtacacatgcaaccctgcgcggggtaggtatgcgcattgaatgtcgttgtcccggtgaactttagatgagtcttgtcctgggtttgtcctgctcactcgaggcaggctcaggcgaggcgacgaccgccgtcctggggaaaggggacctcgaccgggacgagaattctcccaagaacacaccctgtccgagggcaggctcgagcgaggcggcgaccgccgttctggagaaaggggacctcgaccgagacgagggttctcccgagaacacactccgtccgagggcaggctcggacaaggcggagttatggtgacccctgagggggagggggggcgtcggacgaagcgcggcttatgatcattcgtcctcgggagacgtacctagatggtggtctttcctttaatctagccactttctaaactgagccctgcggtcccaacgcttgcgtcgtcttgacgctctgttgcgtgccgcacgtctcagattgtggatggacagcacgctgtttagactggtgtgcagctgtacaattaataaagacaaaggaatatagaaatagtataaactgtaacaatttggaattcgctgccaagatctgaaaaggcctgcaaattaaccaaagacttgcaagtaggcttccgatgccgatgcatgcttcgaatggagcacctgtatttctacgcaacatgtacaacaagaatcaagaatgcatgcatgtaggagtactaggagacactgacacgcacacaacagtcctgttctaccgttcctgtccttcaggttcgtcaaagtcaaatcaagaatcaacacggtttcgcctacacctcctctcctagccacctactggcacgtcacgtgacacggtcaggctttgcgctgttgcacgaacagcctgctaatgcttgacagatgacaggacgagcatcagctgaaaccccggccggcggccgggcgatggtgtgggtgct

SEQ ID NO: 28672 - DNA, 366 bp, Zea Mays
gtgtgcttgtgcgcgccccacgacgacgatggtcgatggatgattggatcgcgatcgggggcggtgaacttctcactggaggctgatagtgaccggcgacgtgccaccaccagatcgcgggcggcgccgcgccacagagagacggtggcccatggccgatcgcgcgacgcggatgatgatgatggtggcctgcagtgcccgccggtgggctcatcacatgtatccgccgcccagccaaacaggcgagtcgacgaatgcgatgcgctaacggtcaccaaaatttacttgtagaagaatacaatgggcagtcctcgtgctcccgagagaaaaatggttctgcaaaatctcactatatgaattatccat

SEQ ID NO: 28673 - DNA, 484 bp, Zea Mays
aaaaggaaaaaggaagggagggatgatgggccagtggggcatagaaagccgagatgggccaagcaagtgggggaggaatgggcctagggggaggagaatcgggccaggtcgtggctgccttgctctttctcttttttttttctttttttcatttcttttttttcaaactgaattcaactaagatctaaatttcaaactcaattataatgccctttcaaaggaatctagcatgagatgcaaatctatctatcttagatgtttatttattattttctttatctaagtagatgcttcaaattagtgatgcacacacacaaacattcttttaaataaataaaattattctttgaatgtgtaacctaattaaaatataattcaattaatcagtcatttgttacttatttactttaagaagataatccctaatatataatctttattaaaaggtatcttaacttaagtttcttgtttaagagtatctcca

SEQ ID NO: 28674 - DNA, 1135 bp, Zea Mays
agctcgtggaagagaatcccgccgccctgttgattttttcagccatcgcgggataaaaatcgcgtgcgcctttggtctctgcggccgccgtcgattctccctggctccagctcggccatggcgtggggcaccagcggagttccttcccctgcgcgcagctcgtcgagttctccctccagccgcgcccctggctcctactcttccagcgcgcccaccttcccagctcgttctccagcctttctcaagttcgtcgcgcgccccctgtatttctctgtggccgacgctcagctcctagctccggcgcgtgtccctctgctcagctccggccgcgagcagctccctggtgcttggacccggctcagcgcgctccctgctcctatcaccgcgtacgcatctccctgcccaatcaccccctttcttcatctccctcgagctcgccatggagctcgcccctgcctcagcttggactgcgtcgctcggctctggtcaaagaagatccctctgcccagcccctctgctcgcctgccgtgttcgtgctcgagcccttttcctgccgcgcgccgagtcctctgtcgtgctaagctcgctcacctcgtccatggccatcgtgccaagtttgtcctacgcgagctcctctgtttggcccgtcctctgtttggcccgtcgtcgttttccagccccttaccgcactcggctgttgtcgtcgtcgctcggtcgcgcgacaggctgactgcgtgtcgtgtgtcgcacatcctaggtcctcgtcgttcgccttcgcactgtgtgcgacagcatcgtcattttccctatccggtgctcgcgcggttttctgctcgcccgcgtgtcctctcgactcgctcggctttaattcctaatcgcgtcgtcgatctcgtcgtttgccgtcgagtcgttaaacacgtcatcccgcctcgatccccacctcaccagcttaccccagacttcaatcgaaggtcgtcgtcgttcgtgcatccgcaagaaaacccaagaatcgggtgaagacgaattgagcagcgtgattttccccaagcgctcaaccaattgcctggatcggaaaatcgctaccgatctcgcggattcgtgtcagctgtgaaaatggtaagctgataaattattc

SEQ ID NO: 28675 - DNA, 872 bp, Zea Mays
acattccccgaccgagaagaaaccctaggctcaccctgagaggaggcgagttcccagcggtagcggtggaggacgacgggatcctcagagggagcaggatgcgagatccgggatgtgagatcctcagagggacgggatttcgtgggggagctgggtcctgcccgcccgagcaggcggcggcagaggcgtgactcgctggtggatgtggagtcggggggagagaagctcagttgcccagcgacggagaggagaggcggaacacgcctaacagcgtggccagttgcgcagtaacatcgcggaggggaggggaggggaggcgggaggcgacggcgtaccttcgcgttgagccttggatccccgtaatcgcgtagcagaggcccgtaatcgcgtagcagagggggaggagggtggggatcctcggcaaccttccatgactggcgatgttgcctacgatggagggcgttgatggcggcattggtccccataatcgcggagcagaggggaggcggtgttgcctgcgacggaggagtgtggggcggatctgcgttgacgacggggagactagcagaaccaagtttgtggacgcctacggtactctcttaaggagtagtaatagatgagggtcaagggatcactgatttgagaagcttaaatcgctgccacttagcgtcccagattttaagatatcatttaaactaacatactttgtggacctagattgtggatcacaaacataacatgaaacccccaaatatgttttggtgtcccatgttgagagcatcacctttatggcaaggtgttcttttgtaatacctaaacttcctaatttgatatttaactaaagttctccaaaagaattaattgaataggag

SEQ ID NO: 28676 - DNA, 1516 bp, Zea Mays
ctttggccctacaagtattcgcaagttaaaagacgctaaattgagttcatagacagatctctttgacaaactaagcacataccttatgtttgaaccgggcaatccatttctctcaccctatctaagaagggtatcatattcctgtggagttgggtcccttgatcgacgctagaattcatgaagaaattgttccatatatggcgtcacctcttcaaggttggtcaatacatatagcatgatatgacaccactcttcctgtgtcagggtcttggtggtcgaaccacttgcacttctgagttggcctcgaaatatattgaggttcgattcattaccgccatcattgtaacgagggggtggattatgcacgctcggcagtttgtcaccatagtaagttgttgtgaagtttgacacctcctctagaatgtatgcccctacaatagaagtctcgattttgtatttatctacatttctttcgaatagtctttaaacatctctcggttggatagcacgaacatccctgcacaggccccccattcgtgcctcatagggtagatgaagaatcaaatgttgtattgaattgaagaagccgagtggaaatatcttctcaagcttatacagtaacacgggtgtcaatctttccaagtctgcaatcatagtccgagataactcttttgcacaaagctagcggaagaaatagctcaactctgaaagcgctagccagacattctagggacatagcttggaaccatcgctggtctacattgaaactgttatatggggtgaaaatgttatatgtgcgtcaagtgggatttacgaatacatgtaattcattatgctttcatgcaaaaaataaactagatgaaagtgaagcaagtgctgattagggtgccacatatgctgaaaaactggagacctctcttcaagacaaaaggtttggtgaagctggattcatatgttagaattggtcaccaccaattggcccaacgaccaactgcacccttgatctcatgccttgatcaggggagtccagcccaagacgatgctgattggcctctgttgtgtatccctataaatgaagatgagggggcgacgtctaaatgtgtggggttcgctatcttttattcccccttaaaccctagactgatctataggggtgggatgttagcaatggaagttcactacctgtagagagatcgcttccccgaccatcgctactcaatataatggaagttcactacctgtagagagatcgcttccccgaccatcgctactctagcataaagcttcaccgacgaatgtgacaatgtcggatctaacaaggtacaatttgtgtttatgttttgatctagtgcttagggttcttgggatacccaaatgatctatcaatggcatcaagaactaggtttatttcccaaatccctaaccatgcaaaggaaagtttaagtttggttttgccaaattgaagaacagaaaggttgactcgatgaaaatctaagagaaaaatctctgatttgag

SEQ ID NO: 28677 - DNA, 163 bp, Zea Mays
ataattttgggttaatttgtataaattttaggggtacttaaatatgtattttgaaattaaaaaaaaagaaaaaaataaaacctaactaacactagcccattaggcccatcagggaccagccgccccctgccctaaccctaaccgccgccgccctggttccctc

SEQ ID NO: 28678 - DNA, 118 bp, Zea Mays
gcctcgtcttcacccgattcttgggatttcttgatgacacacggatcgacgacgatcaggagggtgacatatatagagctgtattcgcgacgcgatgacgaacgacgctaaccggcgg

SEQ ID NO: 28679 - DNA, 674 bp, Zea Mays
gcgcccgagagctgcgcggtccgagcaccatgggacgagcggagttcggggaggagctcgactgcggtgcgtgcgcagggagttgggatcggcagggaaggaagaagccgcgacgggcagtgaaccttggccgggcgcagaaggatgcgccatgcgagcaccgcgcgcagaccaaggagaaacaggggacgcgccatagctgagagatgagctcggctgggagctacgcgcggccgggaggaggaagaagcagagcgcgcgccggaggagcagaggagatggacgcgcgcgcacagaagctggagcagaagcaccacgcaagggagaagcttggctggagattgaagaagaggctccatgcgtataaaaaggaaagcaggggcggcagaaaaatcccaggcaggggcggctgggcggcgtagggataggaacggtagtttttttattttattttatttttctttttttacagaatcctagatatttttgaattgtgatttttagcgacgattaaagcgtcgacgcgtaacacggcaaacggctatacactctattttctgaatcacgaaacggaaaatcagagaaataacagcatagacggttctgttcgaatttcgttgggtaatttttgtgactattccggtcacgatgtaaacggaccaatttgcaacgag

SEQ ID NO: 28680 - DNA, 233 bp, Zea Mays
tgaatctttaaaataaaacctgaatagtaatgactaaacatgaaagaaaaggtcactctatggagacataatataacaggaaaataacttcatacagctgcaagcttggccctaacatgaaaaaacattaacttgttaccaggtagttattgtcttaaaaatttaattacatgcattctgaaataactcatatttgtacttattgtatcaaaattgcaattccatgcattctg

SEQ ID NO: 28681 - DNA, 633 bp, Zea Mays
ttgattggcagtatgtgaggtattgcaaggtatgtgccttactgtttccttttgttttcggttgaactacaatagagagcaaccaaagctttgagcataagggctttctgtcagttttatttgtaaaataagaatctgaccgatttctatccttttagggagatgaggtcaccttggcaatggtagttaatctttttcatgcaaacaaggatgattatgttgatgtagttttctatgcctcgtggtgcccattctcacaagaatgcaaccaaattttgagtcactagcctccttattcccaactatttgacatttgcatttgaggaatctgcaattaggccaaggcgtcctacacaggtatggttgttggctgattcctcactgcgtcttgttgctgtcatagtgtcgttcaatcattaagggtacccattagtcgccaaagatgttgtcttgttacaaacattctaatgttcctgagaactaataattgaattatagattatttttctcaaccatacgcaagagtacatcaactaagcatagaaggacatcgaagcactagatcgtcgtcccattgatcttcttgtaggtacattttcccatgttgtattgcatttgtcgctgctcataaac

SEQ ID NO: 28682 - DNA, 59 bp, Zea Mays
aaaaaaaggaaaaaagaaaaaaaaaaggagaaaaggtccactggggtctggccgtctgg

SEQ ID NO: 28683 - DNA, 246 bp, Zea Mays
tcttgccagatatggcggcgaagacaacacggaagtcgcgctcagagagcgggcccttgctgagctgagcctgcagcagggtgtggtgccgctgtcgccacggcaacggcgccatggccctctcgctcgctcggcaaccggcatcggggttcgggagacgggaaggaaaccgccgcgggatgggagatgagaggtcgtagggagggagggagagggaggtacggaagggaaattgatcgtttgttg

SEQ ID NO: 28684 - DNA, 874 bp, Zea Mays
ctgatttggatctttgattgagtgtgatgagttgtggagtagtgtccacaattgcatctacatatacttaggcataaaaaaatatttaagataactaatcaaacttagattatctgtcattaaaaatatatctagcttaatagatccatctcattttaaaagagtccctcttatcttaatagatacatcttatcttgaaaagatcttatcttatcctaatagatctaactgacctcaaaagattccaccttatctttatgaattcatcttgccctaataagcacatttatcccactctagaataacaaccataaactaatccaaaatttatttagatcctatagttatatcaatttattccagatctgatccaatctaataggttaatctaacctaacgaagtctaacctaagttgaactaacctaaggtcagtcgcttaaccagttaatagtaaaataaatgagaccctactcttgtaaaccttgttctcccctcatgcacttaaacctaaaattagtgcaactcaaccgtgagcaaaaaaagagctaacccagccaatagagttatgatggattgcataatctatcaacccctacatcaaacaaacttttgatctacatcatgtagtctatctcatctatatctatcctaaccatattcccccaaccccgatgatatacactaaccccgaaacaaagaaatcaagactggagaaggaaagatcgacatcgacaaggaaggataaaatagtcaaagtgaatctcgaggtgaatcaagacttaaacattatggataaagtcttttcttgctataacctttcttaccccaacctgtccagcttatatcctacataataagtggctagataccttt

SEQ ID NO: 28685 - DNA, 144 bp, Zea Mays
gaaaatctgcaatagatggggggggggggtagaacatcttcttgatcctctcttcctcttcaatccatcttgctcctcctcttctcgatccttgctgcgtgggggagggggagatctagggaggaggaagaaatggtgggcatc

SEQ ID NO: 28686 - DNA, 374 bp, Zea Mays
gtttaatatcaattcattttaaaagagatactagtacttaaataataattaagtattatagtaattattagtctaaaaacaagtactccatttataaatatttttggtaattttttttatgatttttagagttctttaaaaatgaatttcggaattttaaaaaaaaaagaaaaaaaaacataaaaccacccagccggcccactagggggcccaaaaccccatccccaaacactattcccagccgcgcgcgcgctccccagccaaaacagccgccgccgcctctattctctctctccctcctctgatttcctatctctctctctccctcacttctctctctctctcacgccgttctctcagcgccagcgcccgag

SEQ ID NO: 28687 - DNA, 548 bp, Zea Mays
gagaacacatggctcatggattccggctgttcgttccacatgactggaagctcaaaatggttctctagcctcgaccccgtgattggtaaggaatacatcacattcagggataagtcaagaggtaaggttgtttctcatggcaccattcgggtgaatgagagctttattctcaaggatgttgctttggtctcgaatctgcatttcaatctgcttttagtttcgcaactccttgaggatgactatgaagtgcgctttaaaaagggcttgtatcaagttttggatgcccgtggagatcttatttgccagatttcccctttttgtcgagttttcagtgttgatttttcacattcttttggcccttctcgatgtttgttggtaggatcttcctcttctgtttggaagtggcataggaggctaggtcacttgagctttggtcttttgtgtcgtttgagctcacttgacctcatctaaggattgcctaaattaaaatttgagaaagatcttgtttgtcacccttgtcgtcatggcaaaatgattgctgcttcccg

SEQ ID NO: 28688 - DNA, 714 bp, Zea Mays
cgacttctctcgctactcttgtgtgttctttataacggtgaaggatgaggcttttactcatgctcgagatttgattctttggttgcaaaatgagtttcctaaaaatgccatgagagctatacacagtgacaatagcacaaaattcaaaaatactcaatttgcaaccttttgtgcttctttaggacccgagcattagttttcctctccgtatgtgccccagcagaatggtattgttgaacgcaaaaattagacccttgttgagatggccaggatgatgcttgatgagcataggactcctaggcgaaagttgcctagaggggggtgaatatgcggaatctaaaatttacaactttaaacacactacaagccggggttagtgttagaaatgaattcgagtccgaaagagagggaaaaatcaactaagaaatagagcgaatgaacacggtgatttgttttaccgaggttcagttctaaagaacctagtccccattgaggtggtcacaaagaccaggtctctttcaaacctttccctctctcaaacggtcacttagaccgagtgagctttcttctttacttctcacgggtcaattagaccccgcaaggatcaccacacaattggtgtctcttgcctggcttacaaagcacttgagagtaacaaggaaaagaaaataaagccaaccaagcaaacaagagcaacaagaaacacaagtgatc

SEQ ID NO: 28689 - DNA, 107 bp, Zea Mays
tgcttttgcagtcgaccattgcgccgaagagccattgctctgttagtgcgccggacagttcggtggcacaccggatagtccgataaattatagcgaagcgcgccctg

SEQ ID NO: 28690 - DNA, 555 bp, Zea Mays
taccaattggaaaaacaaacttttgtaaataaaattcaaatttttgaagttggtggtgcggtccttttgctttgagctaatactttctccccctttggcattagtcgcaaaaaacggagacttggagagcccttgttatttgctcccccattggtataagtaaatatgagtgaaagattctaccaatttgagagtgatgcggagtgacgacaaagggtaaatgataccgttagagtggagtggaagccttgtcttcgccgaagactccatttccctttcaatctacgacttagcatagaaatacacttgaaaaactcattagtcatagtcaggaaagagatatgatcgaaggtatataaatgaggtatgtgtgcaatgtttcaatcaaaattccgagaatcaagtatatttagctcattcctaagtttgctaaaggttttctcatctaaaggcttggtgaagatatcggctaattgttctttggcgctaacataagctatctcgatatcccctctttgttggtgatccctcaaaaagtgataccgaatgtctatg

SEQ ID NO: 28691 - DNA, 387 bp, Zea Mays
tcggcttcggctgtagaaagagctactaagttttgtttctttgaagtccaagacaccaaggatctccccagaaactgacaagtccatgatgtgctcttcctatcaattttacaccctgcccaatcggcatcggaatatcatattaaatcaaaagtggatcccttggggtaccaaagtcgaaacttaggagtataaactaagtatctcatgattctcttcacggccctaagatgaacttccctaggatcggcttagaaccttgcacacatgcatacggaaagcataatatacagtcgatatgcacataaatagagtaaagatcccatcatcaactggtataccttttgatctatggacttacctcccgtgtcgaggtcaacatgccca

SEQ ID NO: 28692 - DNA, 2043 bp, Zea Mays
ttgcgatagttttagtaaagagagtaggatcggctttaccgactttgaagccactagtgataagaaaatctcttaggcattcatgccattctcttggggcttgcttgagcccataaagcgcctttgagagtttatacacatggttaggtataatacccaaatttgtaaaccagggtaatgaagataattctcttatttgctttgtttcaatgtaactaagcatgtaaacaacaacgtttaaaggggttaaatgactaatgtgaactaaaccacttgtgcatcatattggagatttgtttgttgtgcatataataataatagcaacactattaatcaaaatataccaataagaaaatttaattggaacccaagaggagattagggtttgaaaatagaagtgggaaaaaggagagaaaagaaaaggggaaaggtataaaataaaacaaatatatatatatatataaatatatacccaaaattattacttttaattatgcaatataattagtgaacaatctgcaaatcaagtatgaaattcgaataatagaatttgaataaatagaaaggaaataagaaaataaaaaaagaagaaacctacccacgtcttgggttgaaacccccacgcctcggcccaatattctgtcctttttgcacgcaacagcccattccaccccgcgtcggcttcactaatggcaccgaccggtggccctgcttggtcagtcgcccatgcacgcgtttggatccgctggcgggtggagcccgctgaccaatcgcaccagccgctgttgactcggtccctgttgtcagtcctttcttctccgcggaagtcgcgcgcaggttgttgggatcttacacgatccctaccggcgtaacaactccaccgcctcgacgcggctccttggccctatataaaaccaagccgccttcctcttcccccaccagctgagcccatgctgacagaaaaccaagcgcaccatcggggagatgagcgtcaccgtcgcggtatgaacggccgccgcgttggcgttggggctatgtgggcgctttggggcaggcgttaggcgcaggatgatcgctggtgcgtgaggatggtgtgtgtggtctcttcaggcgggtttggtcagccgaggagcggtgatttctcgtcggagacattggggcaccatggacccgccccgcgtcgtggattggggggctacgctacccgattgccggtgagtaccctacacccgtgttcgcaatagcataagcatcgtgtagacctatccaatttggttttgtcgctcggagttggctaatcgccgtcgcactcgcgtgctccaccgtgtgagcttggcggcgacgcctctgctcgggattggtggggaagaaagctggtggccgctggatccttgatggggggttgtgatgtgttgtggtgatcggccgttggatcagccacgaacgatcaggatcatacatgtggataccccttcgccccattaaatactagtcgttgatttctaatcttgcgactcacagcgcgtatcggttcggataaagggggggatctaatccggtccctagattcaggatcggacggctaagctctacctgtaccccttcgacgtgcgcttctttcaaaagagaccctgagaaattgacaaaacaacccgtcgtccgtgccctgtgtaaagtatttatatctgtgccctggaaattcataaaacagcccctaaactctgtgatattagtggccgcagtcctgaactagataaaataggataatttcatatagaaaatagtttttagtataaaagtaattccataaaattatttaattcataactaattcatcttaattcctttttgacccattccagttgcattagatccataataatattatctatcctttggtagctttatttcccaaagaaacctaaataagaattatgtactcaatctcttttgtacccaacacttaaatcttcgaaacataataacttgatgaccgtaactccgattttagtgattctcgagcccgcgatctcgtagcaacgt

SEQ ID NO: 28693 - DNA, 313 bp, Zea Mays
attaaagtgtatctattttatatagatccctcttatctcaaaagactcactcttactatattggatccctcttaacctaaaggaatctatcttatcttaaatgatccgtcttatcttaaaagattctctcatatcttaattgacctatctgatcttaaatgattctttcttaccttaattgatttgtcttatctcgaaaagattctgtcttattcttagagacttatcttgtcctaataatcatacttatcccaaccactttgcttatatcataatagtgtaacacacatgatctattccaaaataaattaag

SEQ ID NO: 28694 - DNA, 147 bp, Zea Mays
ctgcgctacccgattgccggtgagtaccctacacccgtgttcgcaatagcataagcatcgtgtagacctatccaatttggttttgtcgctcggagttggccaatcgccgtcgcactcgcgtgctccaccgtgtgagcttggcggcga

SEQ ID NO: 28695 - DNA, 78 bp, Zea Mays
aggatggagtgcagtggcgtgatctcggctcactgcaagctccgcctcccgggttcatgccattctcctgcctcagcc

SEQ ID NO: 28696 - DNA, 920 bp, Zea Mays
agctgcaattattctttggttgagtcagtttctgaatgaacatgaaaaaaacatatagagagaaatgtcagtagctctacatagaaaatatggggatgggggattgtatcaaaattagtaagggaggcttacctttgagtttgtctgttggacttggtgcaaaaaaatatagaggcagagctaaaccgactaatacctttcatactacatacttgatcagaaagatgaggcatcgttctgtgtgactagggatgtgaccctaacagggattggctcattaaacattattcttctttatttctgctttactctctagaaaacagaatggctttactctagctgcccttttttgtccgtgattacaccaatagatttttttcctgtagttgggtgaatgttgttcatcacatataacacgcgagcaataagtttatgaacatgttcattatcagtttatatgcatcttcattagtattaactttgtcagtgcttgtgatatgtgatggggactccacgaggtcattttccgagcgctgatgtgagctacgatgcctactgcaatggtgcttgtgtttggtgtttcttgtgatgcatctacattcagtcaaataggtgataggggtcagtcttcaaagttgttaatactatctctgacttgatgacttggaacttcatctccttttttttcctcaaagtgtgaggtgatgactctgcatgttcttaatgctgagtattttagttgttctgtatcatattgtttggatctataataacaaccttacactcacatatttaggcataagttgttgctcgggtgtaggccggtcaacagcggcgaaggcaaacacgatgactgtgggatggagtttgggttgcccatggacgtgcaacgcatggtgcacatcatgtttgataggttt

SEQ ID NO: 28697 - DNA, 355 bp, Zea Mays
gaaaaacctagtaattaatataataattaaataatataataattattagtctaaaaacaagtattttatttataaatagttttggtgaaattttatgaatttttgagatatctaaaaatgtatttcggaattagaaaaaaaacaaaaaaaaacaaaatctcctaatctaaaccggcccactaggggcccatctcccaaaccctaacaccctgcgcaccccgccctggctgctggttccagccgcagccgctctcttctccctcctctgttctctctctcccaagcgtctctctcccatgctctctctactctccctcacgcgcaccaggaggccggctcgacgcccctgcgcccc

SEQ ID NO: 28698 - DNA, 50 bp, Zea Mays
ttccttcagcactttttcggcagcttcatttagcagtctgtcgacggctt

SEQ ID NO: 28699 - DNA, 256 bp, Zea Mays
ctcccatgttcttcatcatttcctgacagacagagatctctttattgtctggtaggcaatagagaaaatcatcctcatcattgccgctgtacaccaaggatccttgcggatactttaaatccttggcgtactgccttgtttcggcaatctgctcctccgataattgtttccccgaagcatgtcgcacaataaactcaaattctttggcaggcgcttcggaagcaagagacttggacttctcaggggcaccttcttt

SEQ ID NO: 28700 - DNA, 911 bp, Zea Mays
ctcgtcgttccctctccaagaggggtcgaggctctggtcgggttgagggggagggaccttccatgctctctcaaccctctcacgggggatgttagaaggttggctcctcccgccctcatcgtagcacctcctctgcggggtacttcccttgccaagaggaggatggagccttcgacaatgaggtcgaccctccgtcgtccgatgctccattcatcaccggtctccgcatgcatccgaggaccatatcctagggatcttgtgaaccccaaccgacttcacatcgaagggagtggactccctgtagaaattaaggttcacaaaccccactcttacccccagacaccctggtgtctaggacccttggttcgggaaccttttccatactgatttttacaactccgttattatatccaaaaagcacccagtcgtccgccatcggttcattgattgggagtgttgtcagggtatgggggatgctgacatgacatcagccctccataattatgagagaaaggggttgaagaacataatgactatggaatacccctggaatgatgaagttatagcccaattctatgtcactctctgggtgaagagagtagatgaagaggctggtgggtatgattacccagttatgtacttgtttatctagtgactctcgcataaagtaagctatcatcgttttgcccatatattgggcttttctcatgaggacatttagggcagcaacctaaaagtccatgacattaggctgccgatgcgggaggaacaagaatttgttcacatttctaaggaacaggagttttgggtgacctccaacatgcataggtactataggtaccttaactctttgtctaggataaccgttctttcaaagggcggagaacgtccttgcggagagtcggattctc

SEQ ID NO: 28701 - DNA, 395 bp, Zea Mays
attcatttctttcagaactggtttctcaacataaacaatcattctttgcaaagatagttggagctatccaccaaccgctcaacaacttaaattcaaattgatgattaccttgtaccccaaaacacgcaattcacactcctcttagaaacatcctcagtcaagcatatataacaatattattgtaataaaactcaaccatgaaaaacatagtgaaaacaccataggcatacttgtatatcacaagcataataacaacttcattctcacaaatgaccagcgatatctaccgcattaataaaacgatatcaaaatttcagaaataaattatatcaagcattaagccataaacaacttaccacatcaccgtaaaggaatcgggaggggtgaaattattg

SEQ ID NO: 28702 - DNA, 534 bp, Zea Mays
aggccactaagaccacggaaaactgacatgaacagaaactgtcgaatctgccattctgcagaaattaaattcgagatcaaaacctaaccccacatctaatccaacctctaatccttcaatccacatgatccacaacctccaaaagcatataattatagggaggaacaaggatcctatccttacctagtgtttccccaagaaaatctgcaagagatgggggtagaacatctccttgatcctctcttcctcttcaatgcatcttgctcctcctcttcttgatccttgctgcgtggggggagatctagagggaggaggaagtagtggagggtggctgcaaggggaagggggaggggcggccaagggtggggaaaagggggggttggcggccaagaaaagggaaaaataggggggcgaccactagggttttgtgggagaaagaaacgacgcctcagatgtctcttgactttgcatccaacggcccacaactctttccccacatctacgcaccgaagataaaactttggcaacattttt

SEQ ID NO: 28703 - DNA, 379 bp, Zea Mays
ctcgggaccacgtcggcgtcagccgcctcccctatcacgatggccgcctcggcagaagagccagcctcgggaacctgctcccagagataggcgacgcccgagccccctgtggtgaaacgccctgcgaaagggtcggctgaacgacaaggcccggggcggcgctggccgcacagaccggcgccgtgttaagggccttccggggtgccaggtcggtttggccatggcttcgcttgctgaataaaaaaaagaagaaaaaaaaagaaaaggaaaatcacggccgagacatatgaatgggaagccaagacgaagacattccgagatacttacccacttcgggccatgatccactgcgcctggggggaggtttcttggatcccgg

SEQ ID NO: 28704 - DNA, 349 bp, Zea Mays
gacaggcggttgccgaggtccatgcgacatgggtaggagactgtttggaagatgaatagtgtccctgacgtgcgggcccatggtgcaagaacatgcgaggcgctcgactacgcgtgacgagggatggggagccgggccgctcggatagtgggccgctcatggccgaccgtggggttagtttttgggatttcatttttcttttatttatctatttcaaaattctttttttctttttttttcttcacgtaagttattcgagatatatgaataaatgtatgttttttaaaatattccaaaattatagtactttcaagcaaaataatatttacaaacaaaattcaataaataa

SEQ ID NO: 28705 - DNA, 917 bp, Zea Mays
ctgggatttatttgaataacttaattgggccaagcccataaatcctaacattttggatacgtgaaacttaaatatatagggtgttttgaatttgttttctgttgggataagaccactttctgcagtggcagagctctctaaaattgacgtcccggtccactcacaaatcacaattcagttcgttgcaaccctaaaccctaaacgaccgtggaagctagaggtggagccgccgccgaccgccatggagtggaggctggatccttgtagggcgtgcggctcgtcgagctcgtcgtaggcacagcaggaagcgatcgtcgagttcgagcaccagcaagctggagcttgagccgccgtagagtggaggctggatccgagtcgccgacgagacagcgggggcccctagcggatccatggagggcggcggtgcgtaggcagggaagtcgccgaagcccagatctgtagagagtgggtggctcatcgagctcgttgctggcatagcgggcagtggccgtcaagctcgagcaccagcaggcagcactgcagcagcacaagcaaagcgagcgccagctgccatcgctagggattgagggaggctaggagcaaagagaccatccgcaggcagcactcagcactcgacgacacaggccaaatcgagtgtcattggtacaatttttgggctggaaaaacctaacgcttcgtttgaatcattggaattcaattccattctaataatagtaatttagacatatatcaattaagctaattcgtttttatgcaaaatatatttgtatactattattagtaagatgtcggagacatttatgtgctacatttttactatagatgagtgagacgaagagtgtcatgtaagttataaagtagaaacaaattctactaatgcataaaatcatttctca

SEQ ID NO: 28706 - DNA, 816 bp, Zea Mays
ctgatatcgagtccacttaaacccagcccaaatccaaactctagaaatcgaatacatatatatttatacacaaactattggaccgagaatattcaccaaattaaaggtagtctaaaatagtgttgttgaaattattttgattcagtccatttgtcttatgagatccaatttcaaaattcgtagttatctttatactataaaaaaaagaactacacagaagaacaaatgaaagaagggggaaaatatcctcacgtcactctctctctcccttgatttttttttctccagccgcagccctgattttctttcttttgccgtgcgtgtggcttagctcatggaggaaaaatcctgccgcccctgctcagatttttcaccgccgcacgcgctgcttccttatcttcttctcctggccgcagctcccttatctcctccgtgtcagctcgctcggcctccagcgctgcccgctgccatctgttgtagcgtcacaccgctgctgtggagggaccgagggagcagagcaccggagtagccaccgccgctgggggagttccaatcgcctggagtagccgtacagacaagcaacgatggcgtgcagcagcgcgtggtggaggccctccgacctccgatttgaccgtcgctccaagccctctgcacaccggcgcgcccctctggctcggttttgcccagcgctgtgcatcctcctctgcgcagactgctcatctccctcctctgctcggcgcgtccctggctctagctcggcctgtgtgcccctaagctctcccatggtgctaggcgtttctccttgacgcgcgttcc

SEQ ID NO: 28707 - DNA, 2035 bp, Zea Mays
gattttgactaaaccggtgtcatctcaaatattgtagctgatatcgagtccacttaaacccagcccaaatccaaactctagaaatcgaatacatatatatttatacacaaactattggaccgagaatattcaccaaatcaaaggtagtctaaaatagtgtcgttgaaattattttgattcagtccatttgtcttatgagatccaatttcaaaattcgtagttatctttatactataaaaaaaagaactacacagaagaacaaatgaaagaagggggaaaatatcctcacgtcactctctctctcccttgattttttttctccagccgcagccctgattttctttcttttgccgtgcgtgtggcttagctcatggaggaaaaatcctgaccgccgcacgcgctgcttccttatcttcttctcctggccgcaactcccttatctcctccgtgtcagctcgctcggcctccagcgctgcccgctgccatctgctgtagcgtcacaccgctgctgtggagggaccgagggagcagagcaccggagtagccaccgccgctgggggagttccaatcgcctggagtagccgtacagacaagcaacgatggtgtgcagcagcgcgtggtggaggccctccgacctccgatttgaccgtcgctccaagccctctgcacaccggcgcgcccctctggctcggttttgcccagcgatgtgcatcctcctctgcgcagactgctcatctccctcctctgctcggcgcgtccctggctctagctcggcctgtgtgcccctaagctctcccatggtgctaggcgtttctccttgacgcgcgttccgccttgccgtctccctgcgcgccgtggtatcccggcttttcctagctcggaccgcgttcagtccccagctcgccgtgcccggtcgagctctctgcgcacacgccgcgcacagccgtgtccctatgctcgctgtggccggtttcctgcgtcatgcccgggattttgccgcgcgtccttgcttgctgtctgtccacgcgtcgcgcgtagagcaatgaaacaaaaatccgtgcgcgtcgggctcgcgcgccgaatctttttctaactcaccagcgtgccctctcggctcgctcggctttaaaatccctatctcgtcgtcaacctcgccacgacttagttcatcgtcgcgccgttcaccgtcgagtctcgctaccgatcgtgaagtcccctgctgtcagcctccgcacatgtcctaagctgtcgtagccagtttgcctccatctcgtggtggtgttacgctgccgtcgagtcccgatatcgatctggttgtcgtcgaagtgaagctcagtttaacgctcgccaagggttcgatcaaagattttattcggagactgtcgacgttctcgcaagctttaagtcagagttaatggacgttaagtggattcgttattccagtcgactaaatataatatttattagactacttgaatcgtgtacagtgatttaatcggtagtcatacatgttgtcgatcccttgtgttataatagttattacgttctaggtagtttgcttgggttattagtttcgagtaaattaatattagtacggtatttaacatgtaattgacgaaaaacttggattcatattcattaatcaaagtagtaaatctaagctaaatttattattggcgcgcaagttgttagccgaattgttaggtagattaaataaataggtgtgatgcgaaataaaaattaaattagttcttggtaagcaaagtgatataatttataaagcgagagataagtttagcatttaattaactagctgatgagttatgtttaggctaattatgtttcaagtgtataatttgtttgcaatgtttgtgttagcttcgtttaatttagaaaagcgtaattattgcgcgtagtcgtatattaataactagtgttttcgtgtaagattatacaacgcctcgcccttagttgtttaatacgctatcgtatagcacaatttagatttgcgatattcttgtttatatgcattcat

SEQ ID NO: 28708 - DNA, 306 bp, Zea Mays
gggcccatgagtcagcgagccagagccacgtatgcggctggtggagttggcgtgggccaccagggctgaggttggaactgggccgacggtgaggattcggcccacgtcgcagggagaggtcctttctttttttttcttttttttctccattttcttctttcttttctaatttctaaatttcaaattcaaatttggttttgaattggcactccagttttaatgaacacacagaagaatttggaatgaatgcagatctataattttatttatctatttattttaccatatctataacaatgattttga

SEQ ID NO: 28709 - DNA, 685 bp, Zea Mays
caatttcttcatgcaaataagtttatacttaaactacaactaacaattatcgttccacacacaaaaacaaaattaattataaacatttctagtatgaaaatcactaagttagtgaatagtgaccgtgttcatttttagaattataaaatcatatgtatatttaaaatattgtcgcggggttcgatttaggttacacgtatatatcgaatctctaaaatcatacacgtgtatcgccaaatcgcatcaaaattacaacgataaatcgcaagattcaaaacatgatttagaaaataaatcagtgggttgtcttcaacccttgtgttctcgctcatgtgcagggatgaacgtcgacgagtggggagggttcggcgggtttggcatcaagcagggaacgacacgatccacgtgctgcggagctctgacggggttccatggatggtgagcacgaactctggcgaggctccacggacggcgggcaagaaatgtgagaaagagaaagagagctcggagaggaagagagctcggctgtgggtggaagaagagaggagcttggtttgggttttatagagagagggagggagagcagaggtcgtcgggggtgtttcatggccatcaatggcattcccggagcttgaatggagggagggagtaacggatgcattgaagctccaataacgcgccagaa

SEQ ID NO: 28710 - DNA, 2343 bp, Zea Mays
cgtgaacataatcaccaggtgtgctgggaccaagtctcacatatatgatgaatcatggcacaggatcgaatgtcacatctttactatataatatgagttctatacaaaataaacaattacattataaggagacaacggtccagcaacccaaagatgactgggagacgacgacctagacctctcacgaacacttcgcagcatcctccacgcgcctcatcatgtggtacctgttcttgacctgtggggggtgtgagacagcaagagtgagctcacatacgttcatcgctcaacaagttgtggggaataatgtgcatgaactcgccaaagatgggagctcacgtgaagtgtaaggcttaccaaagaggatggttagagctgagcattgcttttaaagttggtcaaaattttattagcaattactaagtataagtagataccagcccaattaagtagtagaacaaaagtaacaacctcacctgcgatgcaatgcatatgacaaattgagtttaggttccataatttaatcatgtgagtgttcgagctgctcatgaccgtgagcatggctagtataccagttttacactgtgcagaggttgcacatctttacccacaagtcatgttacccatctgccaagagacgaccaatcccatatacctctaccgaggaggcgaggcagggtaacactacgaggcctttacaaagttccactagcttcagaaaacccgctacagtttataggaagctccaatgcaggaatccctcgcatgaccgccatcgcagcaaaatcatcccaagggcctccctacactgaccactcacctactgcccttgcccctttcgggtaaggtagtcatccactagctttcctaattaatcagccaagggcgtcccattaaacccttgtggtagcactgttttcccgggtggttctccatgttccaattaacataatgatcttgtcatgaacagtaattaacaaactgataataaaagtataatcatgaataaaatgtatctctatacccaaaaccacataaagcaatagtaggtactacccaaaaattcagtggtgaataaggtataaagatagtcaaactagggtaacctattgggtcccatcaaaattaacctatgcagatcattatgattaatcagaacatgattgggtaaaaagaagtgatcaagggcacaacttgcctgggacttgagattccaggtaccagaatgatcttcaggtgacacgtgttctcactgctaaacgtagcaatacagacaaacatgtataggcaaaattaacatcacaccaaacataagaacaaactgaataataatgatctacgcgaagctacgagatcgtgggatcaagaaccactaaattcggagctacggttattaagttatgaatttccgaaattgtttagtgcttagaatagattaatccaaatgaacaattttaattcaagtttcatggctaaacagtgttactggttgatagaaaatattaatacaaaattataggaactggaatggactaaaaaggagctaaaatgaattttccaggaattaaacaagttttagatttaattttatactagaaaagtattttctatattcatttattcaattccttcaagttctggcctgatcgcactatttctgagaagtgcagggtcaattctgtaaaaattaggacctttctgtaattactttataactaggttggatggcgggttcatttcgcagatttccagggactcttttataagcttgcctcgaccgaacgggtacgttctattctaagccattcgatcaaaatctggaggtccagatcagatcgcgcgaaggggtatgcgcgccctaatcctcaccgtccaaagcaatcggacggttccgagttcgtcttcccacacaccgatcagagcaacagcgcaggggccccaatgcggcgatgcgttcgtcggagagcagcccatgtcgcaacatgtccaaatccgaggtccctaacacaccaaggagggtataaggatgacaggtaaaggggattctcaccggttcatgaaagggggggtcgaccagtccggtcatcacgtggggcggacagcagcgtttcggcgaggaattcatcctccccgatcgacccgcatcaaccaaccgagctccgcatgatccccacagcactgtgaagcttctattcccgcgcccgacggttggtgtgatcgacgatgtgcggctgctccttgctctcagcatctctgatgacatgcggctattggctagggtggctacggctagagtcttggcgacaacgtgcgcgacctcttcttttataggccagaaaggat

SEQ ID NO: 28711 - DNA, 736 bp, Zea Mays
ggagctaaaatgaattttccaggaattaaacaagttttagatttaattttatactagaaaagtattttctatattcatttattcaattccttcaagttctggcctgcttgcactatttctgagaagtgcagggtcaatgctgtaaaaattaggacctttctgtaattactttataactaggttggatggcgggttcatttcacagatttccagggactcttttataagcttgcctcgaccgaacgggtacgttctattctaagccatccgatcaaaatctggaggtccagatcagatcgcgcgaaggggtatgcgcgccctaatcctcgccgtccaaagcaatcggacagttccgaattcgtcttcccacacgccgatcagagcaacagcgcaggggccccaatgcggcggtgcgttcgtcggagagcagcccatgtcgcaacctgtccaagtccgaggtccctaacacaccaaggagggtataaggatgacaggtaaaggggattctcaccggtcatgaaaggggggtcgaccagtccggtcatcacgtggggcggacagcagcgtttcggcgaggaattcatcctccccgatcgacccgcatcacccaaccgagctccgcatgatccccacagcactgtgaagcttctattcccgcgcccgacggttggtgtgatcgacgatgtgcggctgctcctttctctcagcatctctgatgacatgcagctattggcta

SEQ ID NO: 28712 - DNA, 1331 bp, Zea Mays
caaaagttgatcttcggtgcgtggatgagggaaagagttgtgggccattagatgcaaagtcaggagacatctgaggcgtcgtttctttctcccacaaaaccctagtggtcgccccctccctttttcccttttcttggccgccaaccccccttttccccacccttggccgcccctcccccttccccttgcagccgccctccactgcttcctcctccctctagatctcccccatgcagcaaggatcaagaagaggaggagcaagatggattgaagaggaagagaggatcaaggagatgttctatccccatctcttgcatattttcttggggaaaccctaggtaaggatgggatccttgttcctccttataattatgtgcttttggaggttgtggatcatgttgattgaaggattagagtttggattagatgtggggttaggttttgatctcgaatttaatttctgcagaatggcagattcgacagtttctgttcatgccatttttccgtggtcttagtggcctcaaaaaaataaaaagtatatatatgagtcgtagataatttgtatatctttccgtggccgcaaagaacacctcaatcggacatcagaacagaaagttattgcagtttgactatagcagtttttcagtcacataattctgtgcagaatctgttctcttaagagttagtcaattttatcaacagaattaaactgtgggttggtaaaagaagttgtagataatttcataagctttctagattgttaaagagtgcattcatatgatctatgaaactccagttatgtttgttttactgtggctgtttctgtttgcctcacaaaaatgagtgggtctgttcactggtgggtttcatctagtaaatggccgaattggctcttccaactatagatacttttgtagagggataaaagttcttactgtcagcagaatttcataatttttggttcagtagtttgggagatatcgaattttgaagttaactaggctgctgtctaaaacagattcagtcagttatcttgtaagatgttttagaacttattgatggcagaatttaattatgcgttgagtaccgaagttgtagagtgttttgtgtagaatacttctagagtatttttttgatatcaccactgttttaattttaaagatacaaaattaacaaacaatgttgctgttgtatggcatgtggtttagggtggtagtctttccactgggtcttggtttcaagtgtaggagtgttttgttgatcgttggcaaatgtttgtgaaatatttgtactaagttttatgcccactagcaggtggctacactccagat

SEQ ID NO: 28713 - DNA, 851 bp, Zea Mays
ggtattgtatctgaaggtaaatgaagtattatttgaggttgtattgtatgtgaaggaagtgaagtatattgataaatgcagcatgccatatatattgcatgattcacttgcatatgaagttgggtcgtgacctatggtccgaccgtaccggtacaacttagcatcgtatgttgctcgaggaggggtacgatgcggcttcatatccttagaggtatgaaggcagaggacatatgcattgcattcatatgcattcattgaagtgatatttgcagatgatgtggttttataccctcagaggtatgaagacagagtacctacactttgcactcctatgcatacattgaagtgatatttgtaggttttgttgacgcagggaagtgttatagaacctagtgtggttatttgaggaaatgagatggtattggttatattgggactactgagttctatatctacaagtatttctgatcttaattgtgattcttttaaaatgttgattaattaaatatgtggtttaaatatctcgtcagaacaattcgcttgctgagatgtttcatctcactcttgcattactcaatgcaggtgcttgttgctcatccagggaagtgggaagtagcagcacatccaccttcactctcataataacgctgcttaggcgcagtcatgatttaattagaagcttcttgtcaaaggatgtttgtttctaactagttgtgcgcactggttaatttagttcatgctgttatggttgtcttcccattgctagcagattattaatgtcgattatgttttcttatcatgatatctatttatactttgttgcttccccgtttatgcaattttcaaaggag

SEQ ID NO: 28714 - DNA, 153 bp, Zea Mays
aaatgtagagagaaagtgacagttgtattgatctcatgaaatgtgtacatatatatacatagtgaagagacaccacgaagggtcgcatcccttggaattagatcacatggaatgttttctaacactcccccttgatcaattccaacttcattt

SEQ ID NO: 28715 - DNA, 1530 bp, Zea Mays
aaaatactctacaacttcagtattcaatggataattaaattctgccatctacaagttctaagacatctgacaagataactgactgaatgtgttttagacagcagtatggttaaatttaaaattcgatatctcccaaactactgaaccacaaattatgaaattctgctggaagtaagaacttttatccctctacaaaagtctccatagttggaagagccaattcggccatttactagatgaaacccaccagtgaacagacccactcatttttgtcaggcaaacaggaacagccacagtaaaacaaacataactggagtttcacaaatcatatgaatgcactctttaacaatctggaaagcatatgaaattatctacaacttcttttaccaacccacagtttaattatgttgataaaattgtctaactcttaagagaacagattctgcacagaattatgagactgaaaaactgctataatcaaactgccataactttctgttctgatgtccgattgaggtgttcttcgcggccacggaaagatctacaaattatctacgactcatatttagactttttatttttttgaggccactaagagcacggaaaactggtaggaacaaaaacagttgaatctgccattctgcagaaactaatttcgagatcaaaaactaaccccccatccaatccaacctctaatccttcaatccccatgattcacaacctccaaaaacacataattacagggaggaacatggatcttatccttacctaggatttccccaagaaaaactgcaagaaaagatagggtagaacatctccttgatcctctcttcctcttcaattcaacgtgctcctcctcttctcgatccttgctgcgtggtgggagatctagagggaggaggaagttatggagagggtagagggcagctgcaaatggggaggagaggaagagggaggaggcggctgcaacaattggggagggggagagggggtcggctagggttggggaggagaggggggggctctcatccatcggatcgagatcaatggctcgaactcgctctcccatttgagctcccgaccccagtggaaaaaatgccaaaagatctactgtttccctgaggaatgcctcctggaactccaaaccccaatgccacagaacatgaaagaaaagagaaatggaaatttaacttcttttcagaaaattggggtatcacactctaccccccttaaaaagaattcgtcctcgaattcgaccactccaagcaaagtatccaaggtaccccatatagcaccaccattcaaaacaggaatccattattggtcttaattaacacaagaacttctacctcggactaattgtctaaggaaactacacaacctgatatccaacatgaatcaacatgcaatgaagctcaaagcaagtcatagatgcaatcaacactacgatttcacaccttcgaatttggatgcagctatatatcaacatcaatgtattcaaacaacactcttttatgaaggggtaatatg

SEQ ID NO: 28716 - DNA, 346 bp, Zea Mays
gggaagcaacaaattataaatagatagcatgataagaaaacataatagacattaatagtctgctagcaatgggaagacaaccataacggcatgagctaaattaaccagtacgcacaactagttagaaacaaacatcctttgacaagaagcttctaattaaatcatgactgcgcctaagtagtgttattataagagtgaaggtggatgtgctgctacttcccacttcccttgatgagcaacaagcacctgcattgagtaatgcaagagtgagatgaaacatctcagcaagtaaattattttgacgagatatttaaaccacaaattgaattcatcaacattttaaaag

SEQ ID NO: 28717 - DNA, 186 bp, Zea Mays
ctaccctcttggccgcccctcccatctcctcctttctcaagcacttgcagccacacatcaaaccctagccaccccccatctcctcctcccatggtgccattcgttgccgctcggatctccgtcgcgtggtgcaaatcttcaacggttttcggtggagggaggaagggaggaagaaaagggagagaa

SEQ ID NO: 28718 - DNA, 331 bp, Zea Mays
atgaggagagtagcagcacgtccacttttactctcacaataacgctgcccaggcgcatccatgatttaattagaaacttattatcaaaggaagtttgttttctttatatggtcgtgcacactggttaatttagttcaggtcgtatgtttatctttccttgctagccgattaataatacttagtatgttttagtcatgatatatgtttatactctgttgccccctcttttatgcaatcttgcaaaggggatgctgccgaaattttatatatggacgtcggaagtgtagttcagtagcattccgggttgtttgtggaacccggagtgttacag

SEQ ID NO: 28719 - DNA, 62 bp, Zea Mays
cgaggcggatctccaggagttccaggtcttcgacgagtccgaggattaggctagtgacctcc

SEQ ID NO: 28720 - DNA, 162 bp, Zea Mays
cttaatcaatgaacatgatgtgactatttatgatacgatactgttatcctgattatgttgatgatcttgtgatactctagggggctcaggctgtttcctaagtacctctctgcaaggacctgttcgttgagagaccacccgggataacagtgcaaccatgag

SEQ ID NO: 28721 - DNA, 407 bp, Zea Mays
catatttggttctggggctaaaaatagtaagaatatactaaatgactcataaaaagactaaaatagcatttaacattctcttgctattagtacaattaaactaaatgaggggtaaatgtggaattaatatggtttagtcccttttagcacatatgtgaaggactaaagactaaattattttagtccatattttagtcctagtgtttggcaaaaaatgaactaaatgagactaaaaactagagactaatctttagtctctctaaccaaacacccctttagtttgtattcacatatgatgatgcagcctaggtcgttcccttttgtctgtaattaattggatgatagttattgtgcatactttgtcactaggctactctgctacagtgctactgattggataggttttc

SEQ ID NO: 28722 - DNA, 288 bp, Zea Mays
ctcccctattcccctttgtggctgccaccccccctctctctccctctccttcctccccatgtgattgcagcaccacccctcaaccctagccccccctcctcctctccatggtgcagcctccccgcttggtaccccgtcgtgtgggtgcgagtcttccattggagtttggagggaggaagaaggaagaaaggaaggaggaaaggaggaacccaaggtgattttaagatcattctttttagtatttgtgctgcaatccaattgattacatgtttacctatgcgaatcggt

SEQ ID NO: 28723 - DNA, 105 bp, Zea Mays
ctctctcctgtatttagccttggacggagtttaccgcccgatttgggctgcattcccaaacaacccgactcgttgacggcgcctcgtggtgcgacagggtccggg

SEQ ID NO: 28724 - DNA, 401 bp, Zea Mays
cggaggcaaccccgctagcaccccagcggtggaggtagccccgcgtcgacactcgatggtggaggcagcacgacggtgcctagctcggtcgcatccatgggccggcggcatggacaagatccacgacgacaccgaccaatgcaggctcgtcctcgtcctccgctgtgctgcctcgagaagctagtcaatggcgtggcgctcgagttcatcgagccagtcaatggcgaggagggcatgatagtcttttccatttccggctagtttcagctgtagagcgacaatctttgtgggacgaaggagtactcgtgataggcatctaaatacttaatgtaacatgtgttaaacttctctagaaccaaacggcctcctaaatccatgattccacatgggaattataggag

SEQ ID NO: 28725 - DNA, 1533 bp, Zea Mays
gtcgttttggaccaccaaggttgggggagatgtgttggggtcgtgtgtccgtggatcgacggtggtgatcgagcggtcgtagtgttttggccgaaccaagaaatagtcattgattctcgatccatggggtaggattgaaggctggatatcgcttcaccctgatggattatgaccaaggatcctcgtgtggacggacccgatgcaatcttgtgctaatgaaattggaaccgaagattcccaatcgtgcggtcatcatctcctactggttcgggcttgtgccagatctaatctgggtcgtagcttttaaatccaacgactctcgttcatccataccccttcggcctgaacgtttgctgatgatcccctcgactttattataataaaacccactatccctcgatggttggagattcctacatcgaagtccctgtgaccttatatacacacccccctaggagctaaattttaatataaaagctatattaaatgacctaaatcctattctatccataactttcacattttaactccgatttgatccgttcaaattgcgtgagctccgtaataaagtttttttacacattaaaaacattattttttaaccttcctcatacttttataattggatatttatttagcttaggttagttgattattcaatctagtcaagtcaacctgcccataattatattttagctaaaatatgatctcaaatgaagtgataacttagattaaaatttaattggctatgttcttgtaaacttttctcacatggtttatgatcaacataaaatatgattcactatttaatcacccaaaactccagaaaaccatatcttattaaccataactccgattttagtggttcttgaacccacgatctcgaagcaacacgtagattattattattatgcagtttgtttttatgattggtgtgatgttaattttgcctataccatgtttgtttgtattgctacgaatagcagtgaggtcacgagaatctaaagatcatcctggtacttggaatctcgagtctcaggcaagctgtgcccttaaccacttttatttacccaataatattctctatagtcattttattatgtaaagacttaattttgatgggacccaataggtcaccctagtttggtcatctttacaccttgtttacctctgaacttttggttagtctttgctattgctttatatggatttgggtgttgagataactactacacatggtcattctttattattattgttctattctgttcatgataagactattatgtaattggaacatggagcttaacttgagaaacacgtgccaccacaagggtggaatgggacgcccttggctgactaattagtaaagctagtggaggactaccttaccaaaaaggggcaaggacagtaggggagtaggcgtgtagggaggttctcgggttgattttgctgtgatggcggtcagacggggattcctgcattgctcttcctagaaactatagcgggttttctgaagctagtggaactttg

SEQ ID NO: 28726 - DNA, 389 bp, Zea Mays
gaaaaagatggcttggggcctggatggaagaatggttttatgtcaagaatgatctgattgaaagagaggacattaaggaaatcatccaacgccccatctggtctcgtttcggccttcggaggccgaaggtggcaatcgatcagaatgacgaagcatgccaaaaggcttttagcaacgtttgtgccttcattggcacaagggatatagttcaagagcacatagcgtacagaatatggccacttgtagaaaactgggatatgccgaaggatactaggggtgtcaacggatacttattcggatatcagttttttggtcttttttctttgattatgaattaatagaatataaaatctgttatgcaaatttatattcttgtttttagtattgag

SEQ ID NO: 28727 - DNA, 121 bp, Zea Mays
ggtttgttcggttattcctattatacatggattgaatgggattggaaaaaatttagaagaactttgacttgcttgggatttaatcccacccaatcccactcaatccatatggattgagagc

SEQ ID NO: 28728 - DNA, 657 bp, Zea Mays
atttcacacgggcatttcgtcgaacagccaaggggcatttaagagaaccgcaaggggcgctcagctaggggagggaagcaggggtgctgcgctacggggagagggagataggggcgctgtccttggaaggaagaagagctcctgcgcgtcgggggaggctgctcgccatggacgacgacgagctcgctgtggctgctgttttgtggggaagagaggaggagcaggggagggcgtcggggatccactgcggtatgcgcgctggggcttgggggagggagatgttgctgctgttgggcgtcgacaagaggtagaagaaggggcgctgcttcttgctgctgaaggtacaagaaaggggacgagcccatatgggagcagggagggagctcgcccgcaccatggagggcagaggcacggcgccgtgtaccagggacataggagcaaggagaagcgacggccgatgggggagttcggctgctcgagctttgccggcgccatgggagtctctgcgcacgcacaagagaacagaggggaggagaaggagctgtcgcctagcctgaagggggcgcgctggagaggaaagtctgggcgctgggaggtggaggcgtcatggctgctggcttgctccctgcgcgctagcgagaaggaagggaggaagct

SEQ ID NO: 28729 - DNA, 154 bp, Zea Mays
tgacagaatgattaggagttgattctctctcttttttttagcaatgtatcaagtccgcccactcgcccaaaaccgcggtgggcggcgctgttctgcttctgtgaccgtatagaaacgacttgttcttcgacattttgaacacgtgagtccccgt

SEQ ID NO: 28730 - DNA, 858 bp, Zea Mays
gggttatacctgcatattagaaattgattggtgtaaattgaactctgccattatctaagggggaatgcaaactgaaggataaatattaaatagtaactccaactaacaaatgacctaaaaatcaaattgtataatatgagcttttcactaattcaaacaattgtgtaagtatatcagcaagttttaatgcaccaaaaaataccacaactgacaaaggacaacaaataaaggtgcacaaaaaaatcaacactcacaacctacttgaacaggtagatgttttggtacagtttgaagcacgctcaagataaacgagcaaatctcaaatcatttttgagatttaaactgactaatcaattagagtagctgaagacgtctcagatagacatgcttctatatcaaaacaagatatttcaagctgaatgtcacggtttatgcatccaaactttcatattataactatacacaattatatgtccattcaagcaatcacaatatacaaacaaagttaaaattttttttgcagtttacctaggcctgaaatacacatgcaggtgcatggcaccaaagcaaactgttaataaatcaagttatttgtgattacacgagtcaaatggaaaaaacatgctttgttagcttagctcttcattcaagctaacaatgaataagcatgcacagataaatattttgcaataagaggagatagaaagatagctaatattttattgtgcttaattgtggcaataagcatgtaggctttataaagtttgcatcagttctcaaaagataaaactcacgagcaagttgactctgtatggagaatcatcagtgggaagtaattaatacataaacctccatacg

SEQ ID NO: 28731 - DNA, 1244 bp, Zea Mays
aacagacccattcatttttgtcaggcaaacaggaacagccacagtaaaacaaacataactggagtttcacaaatcatatgaatgcactctttaacaatctggaaagcttatgaagttatctacaacttcttttaccaacccacagtttaattctgttgataaaattgcctaacccttaagagaacagattctgcacagaattatgagactgaaaaactgctataatcaaactgtcataactttctgttctgatgtccgattgaggtgttcttcacggccacggaaagatctacaaattatctacgactcatatatagacttcttatttttttgaggccactaagaccacggaatactgacatgaacagaaactgtcgaatctatcattctgcagaaattaaattcgagatcaaaacctaaccccacatctaatccaacctctaatccttcaatccacatgatccacaacctccaaaatcatataattatagggaggaacaaggatcctatccttacctagggtttccccaagaaaatctgcaagagatgggggtagaacatctccttgatcctctcttcctcttcaatccatcttgctcctcctcttctcgatccttgctgcgtgggggggggggagatctagagggaggaggaagtagtggagggtggctgcaaggggaagggggaggggcggccaagggtggggaaaaggggggttggcggccaagaaaaggggaaaataggggggcgaccactagggttttgtgggaaaaagaaacgacgcctcagatgtctcttgactttgcatccaactgcccacaactctttccccacatccacgcaccgaagataaacctttggcaacattttttttgggatattacactctaccccccttaaaaagaattcgtcctcgaattcgaccactccaagcaaaacacccaaggtaccccatatagcaccaccattcgaaacatgggtccattattggtcttaattaacacaagaacttctaccttggactaattgtctaaggaaactacacaacctgacatcaagcatgaaccaacatgtaatgaagcacaaaccaagtcatagatgcaatcaacactacgatttcacaacatcgaatttggatgcagccatacatcagcatcaatgtcttaaaacgacactcttttatgaaggggtaatatgcactaagcacaacctttaccaacttcaacaattcattttaattcaat

SEQ ID NO: 28732 - DNA, 544 bp, Zea Mays
gatggcagcccctctccatggcttcctcctccctctagatctccccccgcgcagcaaggatcgagaagaggaggagcacattgagttgaaggggaagagaggatcaaggagatgttgtttcccatctcttcttgcagaatttcttggggaaaccctaggtggctacactccagatcatgcctagtacatttttcttcttcgatgaaggcaagtgaatgtagcggtggttgcttccgttctgacctgttatttctattgcctacactctaatatttagaagtattggattctttcataattggactctatggtgatgctttacttgcttgcattatattgatgctcaatcatatattgatgatgattatgattcgagtatgactcatgagattaattcacacccctgaaggtaaatgaagtattatttgaggttggtattgtatctgaaggtaaatgaagtattatttgaggttgtattgtatgtgaaggaagtgaagtatattgataaatgcagcatgccatatacattgcatgattcacttgc

SEQ ID NO: 28733 - DNA, 50 bp, Zea Mays
ccgatgttgaccgccgatgttccgccgcctgtgcagatcccaaagcgccg

SEQ ID NO: 28734 - DNA, 281 bp, Zea Mays
cctctctctccctcacgattcttatggcggtactggtgagctacacaggacgaggggaatagaagcgatggaggaggggaggtcgtgggcgcgcctggcttttatcccctgagtcctcggagtcggggacgtggtccacccgcgcgaaacaagggagagatccgcgcacggcgtccgggttgttgacgcagataggaaacagaaacaacgaagaagggggaagagatagagatgacaagtaggtcccaccatccagtgactaaacgccgcgcgtgagaggg

SEQ ID NO: 28735 - DNA, 464 bp, Zea Mays
ccgaatttccccctttttcttttatatatttccaaactctaacatttgaacttcaacttgagttgtgatcccttcataaaggttaggtacacaaaatatacagttcattagtctggaatagtattttgaatgggggataaaagtaaatgttatttcaaacttgaatattcatgtaaacaaatgattatggtgcatattcatttagttgaataggaacttttctattacttcttttccaaaatagttcttggttttcaaaattcattcctcacattcattgctcaagtataagttgaaatgtcagaatctactatttcatttcttcatatatttattttattattattacttttttttcttatatgaattttgggccttacaaatcctacccctcttaacagaaatctcgtcctcgagattttgtaagaaaagggtatataaccatgttatctcaaaacatatgc

SEQ ID NO: 28736 - DNA, 463 bp, Zea Mays
atttttgttcctaagagtaggtctcttattcctaaaggttactttaggcacaggatttcaaagtgtgaaatccacttttgtctttagaaaagaaaagataagaataatcagagtaaagcagaattagatgagaaaaggtttaagaaaagtttagaaaagaatcagagtagccaaggtaagtaagtaagggactaagggttatccatttctgtctaggtttcgtcctacagtcaacattcctctgataccacttctgtcacacccgggtttcgggggcaccaagacccgggcgcgaacataatcaccaggtgtgttgggaccaagtctcacacatatgatgaatcatgacataggatcgaatgtcacatctttactatataatcggagttttgtacaaaataaataaataattacattatatggagacaacggtccagcaacctaaagttgactgggagacgac

SEQ ID NO: 28737 - DNA, 434 bp, Zea Mays
ctcaacccattgctctcaaggaaacaaggagcaaggaggcgttacctagcaaggtagctcaagttgaggccgcagggctaaatgatgaagaaatgaccctcatcatcaagcgcttcaagacggcgcttaagggtcgcaagggacagccaagcaagaccaagacaaaggggaagcgctcatgcttcaaatgtgataagcttggtcattttattgctaactgtcccgataatgatagtgaccaggaaaaaggaaacaagaaggagaagaagaagaattacaagaaggccaagggcgaggcacatatcggaaaggagtgggattcggattgctcctcctccgactctgacaatgaaggactcgccgccactgccttcaacaagtcatccctcttccccaacgagcatcacacatgcctcatggcgaaggaaaagaag

SEQ ID NO: 28738 - DNA, 1186 bp, Zea Mays
atttttatggatttgttcattgataaacatggagttatcggaactatcaaattgcatcccattttctactatctcccatatacttggatgaagagaaaacaagtggctacgcattttgtgactccaaaatccgtagtcctctccatcaaagtgtgggggtttaccaagtggaatggaaagcaaatgagcatttgaattatgtggaatacgagaataatcaaaagaaaagtttgagttaaccattttctttttctcctcgtattcgtcgtccttttgagaagaggaagattcgtcgctgtcatagtagacaaccttcttgatgcgcctcttcttcttttcgtctttcttcttttgacttgagccggagtcattgactttgtcgtcccttggctcgttgaagatggactccttctcattgtcgttgaccaccatcccctttcccttaggattgtaacaccctggggtccacaaacacctcggaatggtactaaacaacacttctgacatctatatataaaatttcagcagcatcccctttgcaaaattgcataaatgagggggcaacagtgtataaacatatatcatgacaaaaacatactaagtattattaagcggcttgcaaagagaaattaaacatacgacatgaactgaattaactagtgcgcacgactagtaaaaaacaaacttcctttgacaataagtttctaattaaatcatggctgcgcctgggcagcgttattgtgagagtgaaagtggacgtgctgctactcccctcattcccaacatgtatcaagtacctgcattgagtaatgcaagagtgagatgacacatctcagcaagtaaaataatatcaaactgtttaaccacataagaacattgttttaccaccacttgattccacaactttcttattacgaaggtgcagcacgtatacaacgtacaacacacctagtcaccacacctcgcaggtagaaaccacaatagtaacatagtaatgtcacacttcatatatacctcatgagtgcaaatgtctgcaaatgcaaggatgacttctgccttcatacctctaaggatatgaagccgcatcgtacccctcctcgagcaacgtacgatgctaaaaatgtaccggtacggtcggaccataagatcacgacataacttcaaaatgcaagatggatgatgcgat

SEQ ID NO: 28739 - DNA, 239 bp, Zea Mays
cgcctttgttcttgatttcttccagccgcaagatttttcttcaccgtgcatctcaatcctctccttggtggcgcgtggacgcttgctgtgagcacagctcgccgtttgccgccgctcagcttcagaaagatctcgccgacgttctcctccgagcggttggctttaccttctccctgccgtgctctctttcttctctgcccctgctcgctctgctgctctgcgcgccccctgatttcact

SEQ ID NO: 28740 - DNA, 193 bp, Zea Mays
gtcagagtgttaaattattacatcatcatcatcatcatcatcggagtttttgcaaaagtaaccatcattgttcgaagtgcagcggaaataaactaatggtaaataaatagagggatggggaagcctgtcccatcactcctcatgctcctcctcagccgaggcagggtcccattcgacagtccaacccggtggc

SEQ ID NO: 28741 - DNA, 590 bp, Zea Mays
ctttttgctagctgatcaagttccagtgatcaacattaagttcaaaaatctacaaaacagaaatccctcctcatagtattgctatcaagaatcaaacttcatcagtagttcagtacaggtcatacttcagcataatataaagaccggatgtgatcaacaaaaggacccatctttattacatgcagcagaaatccatgccatacctgtcagcatggtccacagcaagaaagcaggaaaaatcattcatgcacgcccgcaataccatcttgtctcgggcacactagatctgaccgcacatgcacagtgcacttgtccaaacgagaaacggcttgcgtttagctcgagcctaaattccaggatttctacactaatgatcagaactttcccataatttcagtgcatgcatcccaatcctgtgcattcccccgttccagaacctcgagcgcgccacgaaatctcgcctaccgaagaccaaggtgagcaccatgaatgcactaaccagcaaccacgcattgctctccattgcccatagcagggaccccggaccacccaagaagccagattgtagaggaaggaaggaggggagtagc

SEQ ID NO: 28742 - DNA, 56 bp, Zea Mays
cttcgcttcgtgttgcgattagatcgcgattcgtttctaagcttcgaggaatcgac

SEQ ID NO: 28743 - DNA, 156 bp, Zea Mays
atctcctcctctctcaatccttgcagccacaccaccaaatcctagccccccccatctcctcctcccaaggtgccattccttgccgctcggatcgtcgtcgcgtggtgtgaatcttcaattgttttggtggagggaagaagggaggaaggaaagggg

SEQ ID NO: 28744 - DNA, 249 bp, Zea Mays
gggccgaaatgaagcagtcggcccaggtaagcttttatctttttttttctttttatttttctttctattttcttcattttcaaatccaatttgaatccaagtttgaattcaaacttttatggcttatcatttacactatgtttgtatagttaacagtaataagtttaagaatatctaagtttaggaatatctatttttttatatttttatatcatttctctttttcttattttcaaaaccctaaatttt

SEQ ID NO: 28745 - DNA, 262 bp, Zea Mays
aaatgaagcagtcggcccaggtaagcttttttctttttttttcttttttttttctttctattttcttcattttcaaatccaatttgaatccaagtttaaattcaaacttttatggcttatcatttacactatgtttgtatagttaacagtaataagtttaagaatatctaagtttaggaatatctatttttttatatttttatatcatttctctttttcttattttcaaaaccctaaattttaatttagggatcaattcaac

SEQ ID NO: 28746 - DNA, 123 bp, Zea Mays
ctattatcttactcgttgccctatcatttttcactattattttgaatcaaacttacatgttttgtaaatggtgagattcgaactcgcaacctctctctcgtgcatactctcccataccactac

SEQ ID NO: 28747 - DNA, 621 bp, Zea Mays
cctcattccaattggacgcatcgtattcgtttccagatgggaccacaaacaggcacagcttccacctcacagtcacaggcctccatcctttgagcccagctgttgtgctcttgctcgtgcccagccacgggcagacacaccgccacgagcaggcacacacacctcgacaaccactgaacaggcaaccctcctctcctcattttgaaggactcgagtgtctgactaatgcaacaaagtttgtgaaggtgacgccatctgtagcctgcgagttgaggtcgagctaggccgtccaatccactcgaaaatgattgccggatgtacaaattgaaaccaagattggtcctggtcgtaggggaacttgtcatcttgatggtccagatccatggaggccagcgagctttgatgggcgatggcaagcgagatgtatagggcgacggcggggcttggcttctgggcggcagggcaacacttccgggtgacggtgcaggtcggcaacgggggttgacgatggcgaacggcagcgacaaagccgacggtggtgcaggctggcggtagggtcggtgacgacgaaggccaggggcatggttagggctgtcggtgcctccattcatctatgaggag

SEQ ID NO: 28748 - DNA, 715 bp, Zea Mays
agcacagcaagggaaaggggcgagctgccgcagggaagccgcgcgccggaagctccacggctgggcatggcggccatgggcagggaactcgtggaagagggagcagcggcgtgcagaagctcagcgcacagggggatccgagctgaagctgagcacgcgccatggggaactcgccggcagggcagagagagctggaggcgtggcttgctgggagatggagagaaggaaacgagctcggctggctggggttggggctcggcaggggagccgccatgggagcaggcaaagggcgagcaggacgctccacgggagagctggaaggagcagagacgcccgcggaagatgaccaggcaggatatttgaagagtcctaggggcggcgccgtgaggaaataaacaccagcaaccaggatttttgcaagccaaagcggcgcagaggataacgccggcgagctggagggagaagaactgctgccggcgtgcagcagaggaagatgctgagcgctgaaatattcagggagtagagcggcggctgcaaaaatccaacagagagagagcagatcaggctgagggagaagttcggctgggtaataagaaactgtgttcagcggcaggatttttcagaaaacggcggcaggagagaacgaccatgaacaaaaatctacgggaggcagacgagcgaagaaatatcagggagagaaggagattgacgtgag

SEQ ID NO: 28749 - DNA, 2042 bp, Zea Mays
ctcctattataattggaatgactagcaactttcctattataaatgaaagcatgattcttttgattactactagccttaggggccttccctttctccttgttgggaatgggagtcctttggcttgttaagttcttggcttcctttcgataaccaagcccatccttaattgaggggtgtctaccaattgtgtaggcatccctagcaaattttagcttatcaaaatcatttttgcaagtcttaagttgagcattaagacttaccacttcatcactcaattttgtaatagcaataagatgttcattacatgcatcaatgtcaaagtccttacatctattacaaatactgacatgctctacacatgaactagatttattagcttcctctagcttagcatttaaatcatcattcaaaatctttaaactagagatagattcatggcaagcagataattcagaggataacatttcatttctcttagtttctagagcaagagatttttgaacactaacaaatttatcatgctcctcatataaaatatcctcttggttttctaacaatctatccttttcatttagagaatcaattaattcattgatcttttctaccttagctctatctaaacctttgaataagctagagtaatctacttcatcatcactagaatcatcatcgctagaagtagtatacttagaggtatatcgaatgcttaccttcttctccttggccatgaggcaagtgtggcgttcgttggggaagagggaagacttgttgaaggctgaggctgccagtccttcatcgtctgagtcggatgaagagcagtccaaatcccattcttttccaaggtgtgcctcacccttcgccttcttgtaaaccttcttcttctccctcttcccatacttttcttgttcctggtcattttcattatcggggcattgagctataaaatgaccagtcgtaccgcatttgaagcaggagcgctttccctttgctttattcttgggagggatattctttgcgtcctttgagcgcggtcttgaagtgcttgatgataagcgccatctcatcttcattgagtctggcagcctccacttgagctaccttgcttggtagcgcctccttgctgcttgttgctttgagagcaaccggctgtggctcgtagatgggtagtggaccattcaaggcttcatccacgtatcgtgcctcctttaccattatgcgcccgctcacgaattttccgagtatttcctcgggcgtcatcttggtgtacctggggttttcacgaatgagattgacaagatgggggtcaattaccgtgaatgatcttagcataagtcggacgacgtcatggtatgtccatcttgtgcttccatagcttctaatcttgttgatgagggtcttgagcctgttgtaggtttgtgttggctcctctcccctgatcatcgcaaatctccccagttcgccttccaccaactccattttgttgatcatggtggcgtcgtttccctcatgcgatatcttgagggtgtcccatatttgcttgacattttccaagccactcaccttgttgtattcatccttgcacaaggatgctagcaaaacagtagtagcttgtgcattcttatgaatttgctcatttatgaaaacggaattgttagtactatcaaaatgcattccgttttcaacaatctcccaaatactaggatggagagaaaataagtgactacgcattttgtgactccaaaaagagtactcttctccatcaaagtgtggaggctcccaagtggaattgatagcaaatgagcattagaattaaatggaatacgagaataatgaaatgaatagttttgattcactggtttcttctttgacgaggagtcatcatcgtcgtcgtgtggtgaagaagacgaggcatcactgtcgtagtagatgatcttctttatgtgcctcttcttcttcccgtccttcttcttatgactcgagctagagtcagtgggcttgtcgtcttgtcggcgtttcgaccccggggggtccctggaccgacg

SEQ ID NO: 28750 - DNA, 1147 bp, Zea Mays
gacgggacgagtggttcgcggggccgccgttgcgcgagccgttcgtggaacgggcgtttcgtcttcgaatctgaatttcgcagcgggttcaggcgaagcgttaaacgggtcttgcccgggcctttatatatccggaaggggggccggtggtggttctttactctgctgctcgcctcctgctttggtttccgcaacgcaagggaatagccagagaaagaaaaccacgcaccttgtccgctccgccgccacccccttcgcttggcgatggcagaccgggtaaccgtcgttccgccgcgcgacccgtggcctttctccaccgtaacggtggacgatctggaggcccttgtcgccgatggcttgctccgtcccctctctggtgacccgcagccggagtggatggtccctccgagcggggccgccccgaccccgccggcggggtatgtgctgagttttgtctccttccatgagtgggggttcggagtgccagcaagccgtttcatgcgggcgctcctgcattactacggggtggagctgcacaatctcaaccccaactccatcgcgcaagcggccatcttcgcggtggtttgcgaaggatttttggggattgacccccactgggatctgtggacccatctcttctctatggagccttttgccttgacgacggggaaaggagggtccgcatggcggtgcgggccggtggctgcatcctccagttgaggcaggcgcgcgcgcaatagtacatcctcgccatccttgtgtcttcgaacaaggggtggcagcgccggtggttttacctccagaatgacgatgggaggctcccgtcgttttctcaacgagtggtgactgccgctagcagcaactggcgctatggggctacgcacgagaaacagaagaatctccagccccttctagaggccctgcaaaagctacgagacgtggggcttaccgtcgcgggggtggtcgctgccatccatcgccggagggtgcttcccttgctagagcggcggttgctgctttcggagatgatgccgggggtcgacttggagggttcgcagatgtccttggtccccctctccgctgatgacctccacaggcgggtagctggcacggtagggaggctggacaccggcgcccttacccagcc

SEQ ID NO: 28751 - DNA, 570 bp, Zea Mays
ctgaggctgggccaggggtcgtcgagccagcccccgagtgggctggtgccgtcggtatctggggctaggacatcagggtcccggtccgaagaacaggggcaggctgagggggtacttgaccccttggccgaggtagctgaggtgaccctagggagtcaggccgacccgcctgttccccaagagccgttgcccgtgccggccgcacaggaggttgatcctcaggttgtcgtgactgcgcctgggcggaccgtcccttcggtgccccgggcgcccgaggtggggatggtgccgaagccggcagcggggcaaacctcggcagtgcccgcggggactgaggcgcgaggggcctcctcgcaggcacaattggccttggtccggagtgggtaagtatctgaggatacctttgtcccgactccttcttcatgtgtcctaatcctgcttttccttttccttccagcaaacggaggcacggttcgaccagtctggctccccggaaggtccttaagatggcgccggcttctgcagccggtgtcgcaccgggccacgtcggccggctggcctccacacaag

SEQ ID NO: 28752 - DNA, 157 bp, Zea Mays
atctgctctgcatgatgagagagaggcagcagaggaagaatattggcattcaccatgcacgcagtagctacaataacgaacgaacagacaaacaaaatggtggaagattacatgcatggagatcgagaggatctaaaagtccttttttttcttccgg

SEQ ID NO: 28753 - DNA, 845 bp, Zea Mays
agagcttacagcgaaaagtcaacgctgattccgccaaaagtaaaggcgaagaagctccaaagtcgttcctaagggaatgcagagctgaggtctgattgtttttaagaaaataatggctatgaatatggcttcggatacgtgtttgaccatttgcacattacattacatcatagcatttgcattcataaacattcatctaggcatatgtaggataatcatcttcatcgcataaaatggttgcttcggcaagaagagaaaaaagaaagggaaaaatttctatgaaggagagcttcggagaaaaggaaaatgttgttttctatgaaggagagcttcggaaaaaaggaaaatgttgttttctatgcttcgttgcgtacgaaaagaagggaaggtgttttttcgccttcggctcaaaaaaggaaatttcgtccacatcaaagcatttctcatacatcagtgaaaggttaaggatatattacaaggtatgaacagtatacattaaaaacaagtttttgtttacatttacaaaagttatctcaaaagtttttcaagtactgtctgtagtctactatctaaatttccaaggagcttcggcttcggcgttatttttgatcgtcagcttcggcttcgtcatcctacatgaataaggtcgttggaagtcagaatcaagtttacaggaaaaggtaagcacaaggtatgatttcttactggatcaaggtggctacgagcttcgtctccagctttctcccgaccaccttttgtccatatcatttttacaaatcgattcgagatgcttcgggcgagatcagggatgtcatccaggattgatggtgacaaagtaaaatttg

SEQ ID NO: 28754 - DNA, 2534 bp, Zea Mays
ctgctcagactggcggagaagcttcgagttcagttctgatatttttgcttcagcttccgccagtaagccttcgactgcctggagctcaaagttctttttctcaaaagcatctgattgctcctttattttgttttccaaatttccgattataatttcatgctttttatcttcaagatcttgctgcatttgcaaggctttgctcaataacatactctacacaaacataaccttcgtcagacatgtttttattagaagcaataaaggttaagggacaagtcattcaccttgaagttggagtaaaataaactaccaacgacatgttgtcgtcggtagcggctgatgtctgtttctagcttcgggaatccaatgctcctggacagagtactaataactttggcccctgtttggtcccgaatacactctaatttctcgtcatcaacgcctccgaagaggagtgccccaggtttgtatccacaggattgggcatactctttaagctcttctatttcagcttttgttagatgttctccaactaagttttggaacgcgaaggcttcgttttctgaagcttcatcagcaatttcttttcctttctttgacgctgcggtcacagtctcttcggcagcagtggcagcttcttctgcagccatgtctagcagcatttggtcaatatgttcaattgtgctctctaaattcaagtcttcagctgaggtaacttcggcggctgcggcctccgaaggtgcaatttcaatatctgccccctctaaagctgctcgtgttttttgggccgaagctcttggcggcgttttgtcaattacctctgtcacggtaatgattctttgtttccttgccttgattgttttcttcgatttctcgggctccttgtccttctgaaaaaactttgtcagttgaggacccagtggacttagcttcgcaggtaaggattcagtcattaccttcagaatttcctcaacaacagcagcagaaggtgatgcgggagtttcttctgcttcggaaatttgttgcttcggagaagaagttttccttttcttcggaattttcttcgttactggctctttttcaccttcatctaaggcttcagttccccttttccttttttggcctccggcacctttgttcagattttcgtagtctaggtattcgaaacccaaggcgtccagcactcgatttagccttcgtttcggacgagtgccgaaggctgcggtcatcaattgatcttctcttttggaataattgccaagtatttcattacacattgcttcaatcgtatctagccactcttggcaaggtgctttaaagtactttttaaacttgaaatagtaaggtaaacgtacgagttcaccttctttcttttccccctgtagcttcggcatttcccattctctcaaactgggaaaaactttgaatgctaaaaactcttgaaccaggtcccttgtgctaatatgctctgcaataattctgaattcactcattgcttgttgtgttggaccttcgggtgtcatattgaagcgaggtcgggtttctccgaagattaattccagcgggctttgtacaagcttttccttgtcgtcatcaaccttgacatagaaccactctgatttccagcctgctgcccacttgcttcggtagctaattacagggaactttgtagttttccgataggcaaagttgtagcaaccaaaattatcgtgtaatccatcttttctagcctttgtttgataatgtagctcgtgaacccggcagaagctgtctgcaaatggttccactgcttggcttcggagtgcccagatataaacaataagcctaacgatagcgttaggggtcagctgatgaaaatagataccgaacctcttcagtacctctccaataatcccatgtagggggaacctcaatccagcctttagaaaacttttaaaaataacaatctcatccttctctggcttcggggtagtctcttctccaccgaagcgcaacaacttcttctgattttcagtaaaaaagcccgcttttaccatcttggacaaatcagccttcgaaacagtagatttcccgaagtccaagtggctcggcttgcttggcatggcgatgcggtaatcatcttcggaatcagtttcttcaatatcttcttcctctgcttcagcgattgtttgttctgcttgttttgcatcatcatgagggaccttttctgaagtcactagacccgatcgttgcatggcttcggagatgggaagagtctccgaagcttcagtttcctccccctcgcgctcaaccctggcggtagagcggactctggccattcaattatgaacttgtgaaactttaaaatttccttcctccgaagcaggtttcaaactggagcttcgttcgtttctaacagacaagcttcggcgatggttaaaaattttggcaggaaaacagtgcaaatagcaatgaatgctgtggtaacttcacacctactcgtctgtttatatagtgctgcaggtaagaaggcgaagcgccagagtttttacacc

SEQ ID NO: 28755 - DNA, 3409 bp, Zea Mays
catgtatgtaattttgtatgggttataccccgtgcctataaataggtgaacagtacccccgtactgttcacgtggacttggcatttgcttttgtgtcacacttgtattttcatctccttccaagccgaaggtacatttataattcgatattgtctctattcctctataatgatataataaagttaaatgaatgatgttatatgattattcatgttgtcttttatgtttcatatgcttcgtctttcattatcatatactgtgatgatgaaggttcgtccttcatgaccttcgtccgaagatcgttatatcctaagggaaataatgcttcaaaggacgaaggactttatcgtttaacattctctgtgttgccttgttcttaactcatagcatttgagaacaagtccccaacaattcttttatgggggaaaggatgtaacacccctggtgttactataactaaaacttgagcatgacatcataagcattggcattgcatatgtgtgacacacctagagtgcattcactaggcaaaaatttcaaacaagttgtattgttttaatgtttttgcaaatggaaccctggttaatggacttaaccctaaatagtggttaaaggggtaaaacttaactcaagttaagaaaacctaaatactttagggtaaaagtcataaaatgaccctaagaataagcttgaatcacttttatacccctgagataccagaaaacctaattggaaccctgggaaaccctaaaactaaaacccaggggcttatgtgtaaaagtgatgaacctttggactaaagtgcaaaaactactatgtttaaacatataaagtcatttggttcacaaatgtgtggacttgaaagccaaatgttgagttctggacttaaatgcaaaatggacctcaattagattctattctaagtctgaaatttagtgttgagggctcaactttggagcattgtatctttcaacttctagggtttctgccctagatcaccacaccaaagttgtagagcattcaaaggagaataagtttgctcaagagtacaagccttgttcttgtgagaaattgggagataatcttgcttgaagttggactgtcaggctatttaagtctgaaaattcagactgacagtggactgatagcaacttcaagaccaagttcatgcatgatctgctgcctttttgtgacaataccatatagcaaagatgtagctggtttatagcactacaatattgctgcagagatttggacctgttgccatgaagattcgagagaaaagttgctctaaagttgctctgtcaggcgtcataaactgaaaatcgccatggtacagtatggcaactgaaatagatcagaccgccagcgcggctgtcttcaccgtcgacgaccttgcgccaagatcatcgccgccgttgagattcgcactcgctggtaaccggataacatcccggggagagggaatattcgtcgccggtgagctggactccattccggtgaacccccgtgctttccctctaccctgcggcttgtgccgataagaacgccggtgaccgccgcctcccggccgtgcgccgcgtggcctaacttttctaccgtgtcgccgtggcttcttacggccgtcaaatcagctccggtaagcttgccacgccgtttgccacgaactcaccgcgccagggattcttccctatctccggccgccagtactgctcggtcaaattcgccaccgccgcttaccctcgctataaattgaccgtacccccagctccgccatgcatccaagcatctactgcacccaccggcatcccgaaacccccaccagagcacgtgaatttgggatttccccaaaaccgttgaagaacaccgcgaagagcaacctcgccgtggccagctcgattccggttagctcgcattcctctgttgcctgttctagcgtccttaggccctcctaaagctcttagacccgcccaattgaactggaccgccccccctcgccgagaatgcgtatggtcatccgcctcatccgcggtcaccgtggtcagggcgtctcggtgtgtcattcctgaaattaacctaggggaaacatcgaataaggtgtgaatttggtgtcagtcgacggagagcgccggtcacagctccaatcggccggtctaggacctcgccggagcgcggtcgtgcgtgaacggcgtcgtgggcgtgtcgggtaaaggaatagaacttcaggggcatttctgcaaatcgtcagtggctatgttaaatagtgtttgggctcgttcacagtttgttaaaaccccaagggtccctgtgcaaagccgccagggcgcggccgcgcgcgggcacctttctgccttaactgggccgcctgggctgaattcggcccagcgctgttctagtgtttttctttttcttttatccctagagccaaaacaattatagaaaaatgtagaaaaatgctaaaattgtgaaactaattttcctaggtttgttattttccatagtatttaataaaaataagttgatgatttttagtgaaagtaagaaattttagggtatttaaaatagttaaaaatgttgattatagatttttagaaaataattggtaagtcctaaaatgcccaaaatttttatgagtgttatacaatatttagaagccttgggtaaagtttgaattgatttggaccttgtttgatcaccaaaccccaaaacaccccccctgccctatgaactcctttaccgactccggaaaccctaagttaccggaactccgtgaaggaaagttgtattcaagacataaataataaatttatgatatctttgcatcctcatgagcatcccatggcatccattcttatacttgtgaatggttatgattagaacgtgaagaagagatagaagtcactgaagagcaagtacaaccacctttggacactcaggccgggaatagtttctacttcgacatttgtggatccgagcctgaatcacctgtaaacgaaggcaagccccggtgcatttgccacctcccttgctatttcaaaatctttctcacttgattgctgcattaggtgataggagttgcttgataaaaccattcctgcattaccttccttgaatttgattaccttccgtgatcacctgttttacaaaagctttttgatgcttagctttgctttagaaaaacaaaaggttttgtttttacaaaatatgatgtggcaaaagtgggtgggatgtttttcgaaaataaaacttgatgatggatctatcaaaggccttgataggttcaacctcggaaaagatgtacctctgccaggtaccaactttgggtttgaaatgattaagctgagaccgggcgggtgacttgcacgagaagagagtctcggtgtagtgtctccgtctgagtcgattaagg

SEQ ID NO: 28756 - DNA, 2711 bp, Zea Mays
cctgtctcgtcctcgtccccgcgcggccaaacctctctaagagggccctggtccttccttttataggcgcaaggagaggatccaggtgtacaatggggggtgtagcagagtgctacgtgtctagcggaggagagctagcgccctaagtacatgccgttgtggcagccgaagagattttggcacccagctggtgtgatgtcgtggccgtcggaggagcaatggagcctggcggagggacagctgtcggagcggttgagtccttgctgacgtcctcttgcttccataagggggctgagagccgccgccgtcacagggtacgcggggcgccatcattgcctatccaacggagctagccagatgggacgccggtctcgttccctgcggcccgagttagctcggggtagggtgatgatggcgcctcctgttgacgtggctggtctacgccctaggttgggcgatgtggaagctcctccgaggccgaggtcgagtctgtctttcgtggtcgaggtcgagtccgagcccctgggtcgggcgaggcgtagttcgtcgtcttctagggctgagcccaagtccgagccctgggtcgggcggagcggagttcatcgtcttccggggctgagcccgagtccgagccctgggtcgggcggagcggagttcgccgtcttccgggacttagcccgagtccgagccctgggtcgggcggagcggagttcgccgtctttcgggacttagcccgagtccgagccctggtttgggcggagcggagttcgtcgtcttccgggacttagcccgtgtccgagccctgggtcgggcggagcggagttcgccgtcttccgggacttagcccgagtccgagccctggtttgggcagagcggagttcatcgtcttccgggacttagcccgtgtccgagccctgggtcgggcggagcggagttcgccgtcttccgggacttagcccgagtccgagccctgggttgggcggagtggagtttcctatgatgccttcggcagggcctgactgcctgtcagtctcactctgtcaagtggcaccgcagtcggagtgacgcaggcggcgctgtcctcctgccagatcggtcagtggagcggcgaagtgacggcggtcacttcggctctgccggctggggggcgcgcgtcgggataaaggtgtcaggccacctttgcattaaatgctcgatttggtcggttggtgcggcgatttggtcagggttgcttcttagcgaaggcagggcctcgggcgagccgaaaatatgttcgccgttggaggggggcctcgggcgagacggaaatcctccggggtcggctgcccttgtccgaggctaggctcgggcgagggcgtgatcgagtcgctcgaatggactgatccctgacttaatcacacccatcaggcctttgcagctttatgctgatgggggttaccagctgagaattaggagccttgagggtacccctaattatggtccccgacaacctcaaaaccagatactggtggagagggatgaagaaagagatagtacaatatgtggcccggtgtgacacttgccaacgaactaaagccgagcaccagaagcctacaggcctattgcaaccccttccagtgcccgaatggaagtgggaggaaataggcatggattttgtaaccagactgccccggacgcaaaagggaacgaatctatttgggtgataatagaccgtcttaccaaggtagcccacttcatcccagtgaaaattacctttggaggagccacccttgcccggatatatcttaaagagatagtctgcctccatggcattccaaggaagatagtgtcagacaggggaacccagttcacctccaaatattggatgagccttcagcaagctataggcaccaagctagacttcagcaccgcctatcacccctattcagatggtcagatagaaagggtcaacaaggtcctcgaagatttattaagagcctatgtgttaacgttcgacagaaactgggagtccagtttgccttatgcagagttctcgtataacaacagccatcaggccagtatcaagatatcaccgttcgaagcattgtatggacgaaagtgccaaacccccctaatgtggtctaacgtaggggaaaagaaactagaaggatctgcctttgttaaagaggccgaagagaaagttgccctgatccgcaaaagattacttgaacctcagagtcggcagaaaagttatgcggacaacaggcggagagaactcaaattcgaggaaggagacttcgtctacctcaaggtctccccgatgtgcggtgtcaaaaggttccaagtgaaaggaaagctagcaccgcgattcgtcggcccctatcccatcattggcagagtgggacccgcagcataccgccttgaattaccagaatccatgtcagatatccataatgtgtttcatgtgtcccagctccgcaaatgcctacaagtaccagaaattcacatcaaagaagagacaatccagatttagaaagatcttcagtaccgagaaaagccaataaagattcttgactcggcagtccgaaagacccgcaactcggaagtgagactttgtaaagttcattggaacagagaaggagaagaggaagctacctgagaaagtgaggactctttgaggagggaatacccttaccttttctcaagcccattctgaatctcgagggcgagat

SEQ ID NO: 28757 - DNA, 2078 bp, Zea Mays
gggagagataaaaaggggggttaggagattagagttccaaacctcgggttgaaattttgggatgttacacaaagccttgtaagcgaagcatgtgtggtggtccttgcggggtctaagtgacccgagaaatcaaggaaggaagctcactcggtttaggtgaccgtttgagagagagaaatggttgaaagagacccggtctttgtgaccacctcaacggggagtaggtttagaagaaccgaacctcggtaaaacaaatcaccgtgttacactcttcatttgcttgtgatttgtttttgccctctatttcggactcgaatttatttgtaacgctaaccccggcttgtagttgtgtttaaaattataaatttcagtttccgcctattcaccccctctagtcgagtttcacttacccttaagtaaatccactactcgcaaagcagtgtgtacttttgttaccttactagctacttacttttctacacttagcagggttggagagtataactctacccctaagcacactacacaagcattgcatgtacattcaacacaccacctattcttaagagttgttcatcacttagtgagaaggacatactaaataagttgggttataataacaataagtgttttcatcattaagtatgttttaaccatatcaaaggcaataatcacttctattcactttatttcctatactctacttaatgggcttacacaacaagtacaattttgcctcttccaaaaaatctacaaaaattacagtgagtagggtctatctcttagactccatcacagagagatcaacttatttggatccttattctttactgcacaaaaataacaaataacaaggcacaaaagcactttaaactacttcgtactaccaaacaactaatgttataatttttccataatttacttagcagttagcacaagaacatggcacacaaatttacataaacattctttccagaatttttttctgtgatttcctaaagaaaacaacattttctatttttaaatcctaactcaacatttctccatacaacaagtagctcatatttgattcagaggtgacagattacacgactaatgctcacaaaaagtttcacactaatatcagagagtttgctattttttctactaatttaaaagaaatcattaactccactttttaattcacaaaacatttttcttaacagaacatacccataatatatttatcacaagaaaatatcctcatgagagacctaacaaaactggaatcttatttttccgaccactattctaattactatgacctttggaaagaaaactcagtttctttgtttaaatcaagccctacataaaagtaccagaaactagacatgcaatattttcaaactgtagatccattcgatagaagtaccacaaaattggttccactgattttggtgccctgtaactgaagttattatttttccaaggatttctagcagattaacttgaagaaaacagaaaagaaaaaggggaaacgaccttgcgcaagggcctctgagctttacccaaaacagatcctcatgctcaggtcctcagacactattcccttgtgtctggcgcattccagaaaaccttgaactttttcatattctaaatcgagtccctcttattcttcctagagcagagagaaagagagagctcgatgggttcggtcggcagcttaccagtgacgagacgagcagggcgatgggtcagggagacgcgtcggttgatggtgagttcgacgacgtccttagctccgcgggaggcggacggaggcgctcggtcctcgcacgccggcgtgaaccgaagcacggcgacgttgacggtgaggcttcggcgtccgttgggcttgggaaaatggcgactaagattcatcacgcgaagaggaagacagtgcgaggcttggtttggctggaggagggctaagggggcgcaaccatggagcttagcccgcgccgtccatggcgagtgtgccgcgacgagggtggaagagagcgtgcgagcgagcagaggagagcagggcgagtgcggaagagggcggaggcgagagtgcg

SEQ ID NO: 28758 - DNA, 482 bp, Zea Mays
gttagctttgcattaatcacctgttcaacacttagcacacttgttagtcttttaattgggttgtcatccaaacgccaaaacccacaagagagctttcagtcacgagtgatgggtcgagcgacctatccttccggctcctactcctccgaaagctccgtactatggcttgtgctcccattgttgttgtctctgtcggggtctcctccagtggctgaggtgccctgtggtggtgcagggacgccttcagctggggcacagaggaggggcacctcacagactccacctcctgctgaggcggggaggaagagtcctgctgctccctctcctaaagtcagtgttcctgctcctcgcgcaggcggtggtgcaacatctttaagtgtctcgagtgtctggacaccgtgcgacaaagcagacgttctgcaaggcgagagggcaagaaagggatcacccgacttacattcggtgtgcctaaggcgagccac

SEQ ID NO: 28759 - DNA, 2433 bp, Zea Mays
ccggctgctgctcgccgtggtctagttcttggttgttgttgtgccacgtcgttatctgtgcctctcgctagagttccctgctcggagtaccgcgtcgtcgttcgccgagtccctgcgcccatactcgtgcaacgacctcgccgttgtcgaaagttccagtgaccgaagcctgttccctgcatgctactcgccggagctccgtgtcggagtttccccgtcgacatcccatgccccgactaccactcgtgcccgcaccagagatcccctgctgcgacgtcgaacgtcgtcgactcctcgctccacaacaccggaagcctgcacccctgctattgttgtggaccaaggtagaagacaacttctaatttttgcgagctacccctcgatgtctatagttaatatcgcgtagatcctgtggcgtttatattttgtttaactgaatatttgtaattcaaatgaaataggaatagttttattaacttcaaaaatcatgtgatgcgcagtttgaattagtgtttgctgcaatttttatattcttgtaatttgatttaaattatgattaatttagttgctttgaatataatttttctaaataagaaatcaaaagaaaagtataccacacttttcttagttaaaaatagtacaaagacatttatttagttatcttcataatttagttttataatcaaagttttatatgattatatgcataaatatattgttattcacactaagaaagagtagaatttataataatgttaaaatgacttaattgggcgctcatacttttctaatgaagaaattgatagttatgttggtaaacatagatttctttctaaagaattagataacttgtttctaatttaaaatgacatttttaatagatatcatatttaacaaggttcgttatagatgtttaagtatagccgtattaaatagaaacttaaaagaatatgtagacatatgttttttaataaaaatagaaaataaacatatgtccaattaatagagtatttacaatttcttaattaaaggataacaagggttattgcttttataaactaaaatgatagtttatacaaattttctttctaatgaattagatcatttattcctacaatagaattaaagataattaatagattaatgatcctttatcataatttattaatcaaacttatagtcaattgttcttaactagatttatggcatgattaatgattttatagaatttagtccacattatatacaaatcacttagcttttcctaaaggataaaataaagtaataagagtttaagttcttttataacttaaaatgttactttatatatggacttcaaatataataatataggctatgcgttttctaattaaattaaaagatagttatttgttcattatcttttacatgaaaatccacttaaggcctatagcctagtttttcataaaataagtgtttaataataatgatcttttcatataaaacctatttagacttatatcttagtttatcataagtgaatgtttaacaatgatttataagatgttccataatgcttctaaaattaataacgcgttttgtagcccattaaccttagatatataacttatatcttttcttaaaaggttaaaaagggtttaatatcgttataacgtgtttatcatgttataaacccttaatctagacatatcgcgtatgatgttttataaaagattaaaattgatgaacctaatatttgtatattttaattaagatatttttaagctcatgtcttgttttataaagtatagatcacacatttttgaaaagaatacctttttattataacccttgcgtgcgatgtttttaaaagcgaacgctcttttcgttaggctttcttttagctttacgtatggtgaatgttgtatgttattgaatggtgtttgttcttcttgtttgtttgtgtgatattcagtggttgatctagtagttaagaatcaagatctattcagatccgtggaagagcctcaagttttctataagcaaggcaagtggacttctccctctgcatactctgtttgatcccaaacaatgcatttaataaagtttattcttttggatatatatgcataatttgacgggttacctatttagataacctttccaaccttattccttgatcaaacttgggaattatactttaccttcgtagctatgctattgctacaacttaactttatgcagtcactcccgcttatgatattaatgttccaaaatggtaagtttacattattgttgttaacccgatggttaaacaagattattgcatattaattggaacatggagtgaccacccgggaaaacagtgcaaccacgagtgctatcatggctctggctttggtaattagctttatatgcttagtgcctggcaaccttacctgaaatatgggcaag

SEQ ID NO: 28760 - DNA, 956 bp, Zea Mays
gcgacattatggatttgaaggccgtcgtttcctctctccccggcgcccctctctcttcctctccatcccctataaaatctgtgttcacgtccctccattcgccccctgcttgctctctcgcgacccacgcccactgtactgctgatcgctgccattgccgcgcatacgtccctgttgccggctgctgctcgtcgtggtctgagaattcttggttgttgctgtgccacgtcgttatctgtgcctctcgctagagttccctgctcggagtaccgcgtcgtcgttcgccgagtccctgcgcccatactcgtgcaacgacctcgccgttgtcgaaagttccagtgaccaaagcctgttccctgcatgctactcgccggagctccatgtcggaatttccccgtcgacatcccatgccccgactaccactcgtgcccgcaccagagatcccctgctgcgacgtcgaacgtcgtcgactcctcgctccacaacaccggaagcctgcacccctgctattgttgtggaccaaggtagaagacaacttctaatttttgcgagctacccctcgatgtctatagttaatatcgcgtagatcctgtggcgtttatattttgtttaactgaatatttgtaattcaaatgaaataggaatagttttattaacttcaagaatcatgtgatgcgtagtttgaattagtgtttgctgcaatttttatattcttgtaatttgatttaaattatgattaatttagttgctttgaatataatttttctaaataagaaatcaaaagaaaagtataccacacttttcttagttaaaaatagtacaaagacatttatttagttatcttcataatttagttttataatcaaagttttatatgattatatgcataaatatattgttattcacactaagaaagagtagaatttataataatgttaaaatgatttaattgggcg

SEQ ID NO: 28761 - DNA, 1359 bp, Zea Mays
cctagccactcacctcggaagtgtttacgggttttggccgacccaggctagaggggatacacggcttgtgggtaaagttgtaccacctctgcagagtgtaaaactgatatatcagccgtgctcacggttatgagcagcctggactcctcacatgataattgaacttgaagatggaaataaattgagatccgatgatctaccaatggtttgcttaagtggtttcacttaagtgtttttgaaatactcttgtacctttgcttaatgggaatacttggattcacacttattagtaagacaggtgttgttaataaaatgttgaccaactaaaatgcttattgctcaacctcagcctcaccttgttagacttgcattagtttttcccccacttgctgagccccgaccataagtgagctcacccttgcttaattttgatcagaagtttgcagatgaagatatgatgctgaactccatggatgctagtctagtgatacccccggtcatcttcctgtggatggatgtccatgttacgctgtactttgatgaataaaggttaagacattatgtctgttcgaagtgtaatatgttaatacaatcgttatttacgcttttatgcattgttcttttgatatattacacttgtgacgtcaacatatgtgtggaaatagatcctggcacacatatgctatgcacccggctctaccctttggaaacgggtgtgacactttagtaactagtgagagagatttgcttgtgttcttttgagctcttgcgcttggattgctttcttctttcctgattctttcttgcgatcaaactcacttgtaattgaggcaagagacaccaatcttgtggtggtccttgtaggaactttgtgttccaagtgattgagaagagaaagctcactcggtccgagggaccgtttgagagagggaaggggttgaaaaagacccagcctttgtggcctcctcaacggggagtaggtttgaaagaaccgaacctcggtaaaacaaatccgcgtgtctcacttcactattcgcttgcgatttgttttgcaccctctctcgcggactctattatatttctaacgctaacccggcttgtagttgtgtttatatttgtaaatttcagtttcgccctattcacccccccctctaggtgactttcaagtatatttttcaaaactgtcacatccgtgcagcgcatgcaatgaatacctcaagacaaaagtgagatatcagcaaggatcaaaggaaagccaaatatagccggtaaagtacaagcctgattgacagaagcgacatgaagactagccaggggacgtccatcgaacgtccaatcagtcgcagatcaaataaattg

SEQ ID NO: 28762 - DNA, 154 bp, Zea Mays
cttaagcaatcatattcttttttttaggcaatagcaatcatattcatgtagatgaaacatcttaaaagctgctttgtatatagaaaaagaatgaaatgtcagatcatgcaaatcctagaaacaatggtttgcaccatctgttttaaattctaat

SEQ ID NO: 28763 - DNA, 417 bp, Zea Mays
gccgcaccggacaggcactgttcactatccggtgcgcctctgacgcctgctctgacttctgccgcgaaatgtagctctgtcagggcactgtgcagtcgaccgttgcgttgatagccgttgctccgcttggtacaccggacagtccggtgccacaccggacagtcgggtgaattatagcggagtgcgcctgtagaaacccgaaggtgaagagtttaaagtcgatccaccctggtgcaccggacacagtccggtggtgcaccggacagtctggtgcgccagaccagggtcctcttcggtttcttttgctcctttcttttgaaccctaacttggatctttttattggtttgtgttgaaactttggcacctgtagaacttatattctagagcaaactagttagtccaattttttgtgttgg

SEQ ID NO: 28764 - DNA, 157 bp, Zea Mays
gcgggaccgaggacgggacaggcgctctcttggggccactcgcttccctcacccgcgtggatgcttgtaacccccctactgcaagcgcacctgacctgggcgcgggacgaacacgaaggccgcgggacttacacctctctcacgctcgactccggcc

SEQ ID NO: 28765 - DNA, 426 bp, Zea Mays
agaatgttagtttttatggtatgaagaaggtgatcgtgatgttcgatgaaagaccctcttttggccagattttcgctcggtcttgtgaggagattagttacaatttaaacgaccctagcatatcaattgagagtttattgtcccatgttacatctgagatagttgcccgacggttgatctccattgcctcagaagatgactgggtgaaatatgtcagaattgtgaagacgattgttccaccatgtttggatgtagttgttcgaaagttattgtttagtcattgcgatgctccagtcgagttatctccacaaatgccaaatgcatctcgtagtgaagcacctttgcctgagcttccggaagaagtggttgtgccagatgctcaatcggccctgaacgagtttgagatttctcgtcctgttcgcggcg

SEQ ID NO: 28766 - DNA, 648 bp, Zea Mays
agcaacggtaatagatcactatgtgaatgaagtaattacaggactaaataaccgaaccaaacaacatcataattattacaaaaggactagaaataattcaacgaacccgacaaattattctccactgctaatgttcgtgatcaatactgccatcctatacatgaacggcaaacttattcaagctaaacacagtagttccgaggcggaggtccaagctccaaggttccaagttttatacagctagctagctttgctatggcgtgcgagttgagagcgaaggagggcatggagtgtttgggtcgtgcgttttgccgcaatgtggtatggacgaggccttggtaacggataccgacagctttggtgacggcggcgcagcgccgccgccggctccgaggaggcgccgcgctggtgcggtcgcggcgtcagcatgcactgatgctgccatgagcaccagcgcaaggaacaccgccgtcgctacggccacacctcttgctctccctcctccctgcatcttgatcaggacttgcgtgcactactgccgcaaaaaaaaagggtagctatagctccaccggtcgataaaagatctcgactcgaggtgcttgtgctgttgtgcaatgctatttagatcagtggtccagctgaggaaac

SEQ ID NO: 28767 - DNA, 635 bp, Zea Mays
cctcagctggatcactgatctaaatagcattgcacaacagcacaagcacctcgagtcgagatcttttgtcgaccggtggagctaggtaccttttttgcggcagtagtgcacgcaagtcctgatcaagatgcagggaggagggagagcaagaggtgtggccgtagggacggcggtgttccttgcgctggtgctcgtggcagcatcagtgcatgctgacgccgcggccgcaccagcgcggcgccttctcggagccggcggcggcgctgcgccgccgtcaccaaagctgtcggtatccgttaccaaggcctcgtccataccacattgcggcaaaacgcacgacccaaacactccatgccctccttcgctctcaactcgcacgccatagcaaagctagctagctgtataaaacttggagcttggacctccgcctcggggttttcctacggaactactgtgtttagcttgaataagtttgccgttcatgtataggatggcagtattgatcacgaacattagcagtggagaataatttgtcgggttcgttgaattatttctagttcttttgtaataattatgatgttgattggttcggttatttagtcctgtaattagttcacagagtgatctattaccgt

SEQ ID NO: 28768 - DNA, 676 bp, Zea Mays
gtccagcagctttgcatgcgcactagctattattcacacactccgagtccgagctcgagctgaccaacagcaacgcagcaagctagctagaggtataggtacagagcaccagagtagcgcgcggcacgacgcgatgatgaagcagagaggtggcaatggcacaggtgcttctggagcggcgacggcggtgcttctacttgccctgctggttctcgctgcctcgcaggcggacggcgctgccgcggcacgccgtcttggagttggggtcgctgacgatgtgattccgcataataatggctgcaccagtgacccaaacagtttggggccgccctgccacggccaaagcccgcccggccgtaagctactagcggcggagcaggcagatccgtcacctgcgacagggaagctagtctagaagctaggagccacagctccatgattatttaccccatgcatatggcatatgcttggcgaacaattatgtcggtttttataatttcggacgaatctttcgttggttgctatagatatttagtactgtcttgttgtatgtgcctcatgtaagtaacataaatcgtattaggaaggatgtagttagcacttaaaagtatatatatacactaagcttgtaagatttttcagagaacaaaataacaaagttcttcgcttatcaaag

SEQ ID NO: 28769 - DNA, 303 bp, Zea Mays
ttactctaatcaagtgcatggagccttatttactgagcacctctcaggtgacactaggcaaagtaattttaaaaaaatcgaaaaaataattgtcgagtgccagatctaggacactcgacaaagaacattgatttaccctaactgtgtgtggcttggcctcacacaaactcacacaccacacacgccgctcgcctccatgctgctgcttgccttcgtgatgcctgcgcctccccacaacccggctcgtcgcaggcgagcttcacgcctgtcacacccggatttcgaggcaccaagacccgggcg

SEQ ID NO: 28770 - DNA, 1287 bp, Zea Mays
taccaacttgctcttcagatgacacgtgtcctcacttatagtcgtagtaatacaaacaaacatgtatagacacaattaacattacaccaaacataagtacaaactgcataataatagcctacgcgtcgctacaagatcgtgggaacaagaattactaaattcggagctacgtttaccgagttatgattttctaaagatccacgtggttaaatatagaatagactaagtgcaacattttaacctatatttcatgacaaaacaatgttaccagaggataataaatattattgtgagactaatgcaactagaatgaatcaaaacggatttattgttattgagttatgaatttctggagttattgagcacatggtatagattaattccgatgaataattttaattcatgttttattgctaaacagagatactaggtgatagataataataaaacaaaattattgcaactaaaatgactcaatttggagctaaaatgaatttaatatgaattatataagtttatggatttatttttgtattaaaaattcatttctaatattaattccctatttcccaagtttctggtctgcgcgccaaatacagaaaagtgtagggtctgatctacaaaacctctctagactaagattgccttgctggaggacggcaggttgatttggttaaagtcaggggtttcttttgtaaaacacacatgctgaaggggggtatcggccgttcatagccgttggatgaaacgttgatggttcagatttgataagacgaaggggtaagttggttctaatttcagccgccccgccggatagaggaacaatcatgggcgagtctcaggggcggtggcccgcgacgacgttgcatcgaacgacgacgactgcaccccgccaaaacaccgtcagccgccccagcgacttgcttcttctccctgcgcgaacacggcacggtgggacgagcggtgagccccagcgtcaacagccagcgccggatcctagagcgccatccgccccgcatattcccagacggcggccatgccagagctttcccccatggccggcatgctgttgacgacgaacgaaggagttgctctgatctggtgaccctagctctaaattttctcgtacgacgctggctactgtctcaatgacttcaatagcgcaggtgatggttcggctgctcatatatatacttgtggacgggaccgattccgggcgctctgcgggcaggacgtccgacggttacgcggtggttctgttacgatctgctatagcgccggtttgtt

SEQ ID NO: 28771 - DNA, 693 bp, Zea Mays
gtggaggaggatcgggacgagatctcgtgcacgcatcgcttttgcttcggccgccggcatcgtggaatggttcaggtgcaccgcatggagtttgggcttccacttttacaagtctacaacgcatgtgatgcgagtggtcagggggtgatgcatgatgtcacagtgctatcctggtccacatgtctttgctagggcttctttgggtagatagagaataacgagattggtgccacatgcccgaaatccttcacctctttgtggaaggtgttgcaggcttcactacaagacctttaccaaggatctttattgcgtattagactacgacagaatactaaggcaatctcttgtaatatctctacaccacatcccgcatgtacgtactaaggcaatctcttgtaatatctctacaccacatcccgcatgtacgtaggcccttggcatcccacccaaggtcagccttcctctgtcccatctttcatagctaatgtccacacaatttctcctaattacttggtcaagactagagttataatagtccttgttgttatactgtttgtcccagatggtcactggatgaaccggtccttagagtgaggcacttgcaatcctatcctatgcatcaagtccttatggtttgctaaaaagcgtcttttacaaacaagttgttagggcgaaggcgaagacgtcaccctc

SEQ ID NO: 28772 - DNA, 236 bp, Zea Mays
caaggcgcctatagtcgatgtagagccgaagagaggtgaagattcgaggtagagtaaggctaaactagagctaaactagagctactcctaaatcatatggtaaaaacgataagtagatttaattggatcgattgtgaaggttcaatcgaccgtagcccttcatctatataaagggagtctgaacctattaaaaattggtttccaagttaatcttataggtttaactaacaaactcc

SEQ ID NO: 28773 - DNA, 613 bp, Zea Mays
tgcaaacaagctctgagtgtttttgttattcttatttgcaaacaagctgtacaaatgcatttgcttgaatgtgcaaacaatattggttacaaaatcaatttctgatcaaaatcaaaatgaacaagctgtactttattcctcctttcatatctcagggttacaggcttcacatgagccaacagaactcacgcctccaatgcaatctacacaagctccacatgagcaatctacagagactctaaacaaacaactttctataggtattggcctccaatgccatcagctgcaaacaagagcgtgatacagacgcttcactcttcatttattgagcgattcagataggcaccacgcttcttcaggcacgaatagcacgccatctccaagggtcgtggagagatgcgcgaggctgtgcacgccatggcaggggacccgaccgcggtcttggagatgggcgtgagcgcgctgctatcccgcgagcgctaccatggtaagccgctgcagggagcctacggacgacggctgtaaatagtcgaagcggccggcgacgtgtggacggtgggcggcgacatctgggcatcttctgccacaaccgcagctggtgagtggtgactgg

SEQ ID NO: 28774 - DNA, 199 bp, Zea Mays
gaacattccatcatcgagaacgaagaaacttttgttttattttttggagaacatgaagcctttgttaatgtgatcggtgatggtggtggctcttcgggaactcaatatggatgctcctcatcatgatgctttatcccgtgctcgtgatgggctccaaagatcggtttgctgggttgttggggttcatgagttggcaaaa

SEQ ID NO: 28775 - DNA, 267 bp, Zea Mays
tgaatatcatttcttcttaaattaaaattcacataaataacataataaatattagtctaagaattaatattttatttataaataattttggtttgattcttatgaattttatgattattaatatatatttcgaaatttgaaaaggaaatagaaaaaaaagaaaaaaaaactaactaacctaaccctaaccggcccaccaggggcccaatattcctaaccataagcagccgccgctccctgcctctggtagcgcgcgctcctctccat

SEQ ID NO: 28776 - DNA, 283 bp, Zea Mays
ccagactggagttgtggaattcagcctccagaagctgctgtgcccaaggcattgaccgcaccaaagcgtgtgactagacggctcctcgcgcctcccacggcgccacagctagccacggcccgcttgaagttttctcgccctagccgcggactggtcgtcgtcgcggtcctgccgtgccgacacgaaagtacgcgggggctcgcgttgcgtcgccggccgaagtaccaatcgctctgcagcttcaggcttcagccatggacatgtgtacagtacagaagatccc

SEQ ID NO: 28777 - DNA, 262 bp, Zea Mays
agccgagtggcccgcgcaggagagtccgctgttgggccgacctgagtgaaatcggcccgctcagtgtctaatctttttctttttatattttctgttttctgttttcttttctttttatttttttttcaattcccaatttgaacttcaaaatatgagtatgaaactagtacccaatttgaagttcaagtatgactttgaatttgtactcaaattagatttttaatcataccagtatggttaagtttgtgtatttataaacttt

SEQ ID NO: 28778 - DNA, 246 bp, Zea Mays
caaggtcatactagtatgtagcagtagcaatgcagtgggattgtcacttcaacgacgtcgcctgagtccaaaatccaaatgttggttctctcagttgtgagctgtgtggatttacttcttgcttgttgcgtgaacttgtgtggtggtagtattcgttcaatttttctctgatttttgtgggatttaagttaatccccgatcatataggagattctaagtttgcccgtacggttgtgccttttagct

SEQ ID NO: 28779 - DNA, 1567 bp, Zea Mays
ctttatttatgtgcatctcgaccggacattatgctttccgtatgcatgtgtgcaagattccaatccgaccctaaggaatcccaccttacggccgtaaaacgaatcttgagatatttggcttatactcctaagtttgggctttggtacactcggggatccacatttgatttgattggttattcggatgctgattgggcggggtgcaaaatcaataggaagagcacatcggggacttgccagttcttgggaagatccttggtgtcttgtgcttcaaagaagcaaaattcggtcgctctttctaccgccgaagccgagtacattgccgcaggccactgttgcgcgcaattgctatgaatgaggcaaaccctgcgggactatggttacaaattaaccaaagttcctcttctatgtgataatgagagtgcaatccgcatggcggataatcccgttgagcatagccgcactaaacacatagccattcggtatcattttcttagggatcaccaacaaaagggggatatcgagatttcatacattaacactaaagatcaattagccgatatctttaccaagccacttgatgaacaatcttttaccaaacttaggcatgagctcaatattcttgattctaggaacttcttttgctaatttgcacacatagctcataaatatacctttgatcatatctcttttatatatgctatgactaatgtgttttcaagtatatttcaaaccaagtcataggtatattgaaagggaattggagtcttcggcgaagacaaaggcttccactccactctactactcatccttcgccgtcgctccgcatcactctccatctttggtataattttcactcatatgttttatttaccaaaggggagcaagtcgttaggaaagggcctatatttcattccaagtatccgttttttggcgattcatgccaaagggggagaaagtattggcccaaagcaaaaggaccgcaccaccaccctaattttaaattaatggttttcaattggaaaatttcgaaatggtatctctttgtgttctaaagggggagcaagtagtattttcaaaacgtgatatctcaaaaccctcttgaacactaagaggagaatttatttgagggggagttttgtttagtcaaaggaaaagcatttgaaacaaggggagaaaattttaaaacttgaaaatgctttgcaaaaatcttattcatctacctttgactatgttgcaaaaggactttgaaaaggatttacaaaaagaatttgcaaaaacaaaacatgtggtgcaagcgtggtccaaaatgttaaaaataaagaaacaatccatgcaagtaacatttattggctcaattccaagtaacctttgcacttacattatgcaaactagctcaattatgcacttttatatttgctttggtttgtgttggcatcaatcaccaaaaagggggagattgaaagggaattaggcttacacctagtccctaattaattttggtggttgaattgcccaacacaaatgtttggactaactagtttgctctagtgtataagttatacag

SEQ ID NO: 28780 - DNA, 1699 bp, Zea Mays
cctctccctcccaggcaccagctcgaccgccctccaagtttctccctccctggtgcgcgcgcccatctccttcctctccctcctctgcgcagcgccgcatccctctgctcgccacagcgcgtcgagcccccagcgctgcggcccttccccagcttcttcctccctgctgcagctcgccgcgccctgaagctccctgcccgcaccgtgtccctgttcttctttccctctgcgcatcctcccacgcccagccgaagcgcgaccctaatcccagcatcgagctcaccgcgcgccatggaactccctgcgtcgagcacggtccctgctccaggctcggcgtttccccggccccagctcgcccaaggcagcttcctctgccgaccgtctatcttcctgctcggagctcgcgcccaaatccccgcacgcgtcgagcttcctcgccgagcttctccctgcgtcacgccctgctccactgtgtcgatccagtgaatcgtcgtcgatggatatcccctccgtgtttacccaaaaatcgcaacgagtgccgatcgccctgtgtgctcgaccttgtcttgtcgcagaaccccaacgccgttgatattcagctcacccccctgtgtcgccctcccttctgtcgtcacctgccgtgccccggacgtcgtgccccggacgtcgtgctcgttgtggtcggctctggtggtcggaatcgtcacgctgttcgtcccgcctggccctcaaatttactctgctccagccgtccgaactcgctagctcttgtgcctctctgcgctcacgtgccactcagtaccgcgtcgttatcctgctcgcagccagctttgtcgtgattgctgggtattgctcgacgccctggcatcatgtctatatttgtgtttgccatcatcgtcaagttccttttgtggttgcctcgcctgcatgtgtgtgggagtgagaatagagctatggttgaagataaaaataaagtctgaaagcgatgctcgtcagggaccccgtcgtcgacaactttggttctccgtcgccggatctgtgtttcagatagcaccaaccttgatgtcgtcgtgttcgctccaactctgcctctacgtgctcgccttcgatcaccgctgcaattttagaagtttgagtgaagaagtggaactcgcggggcgcttgccaggaactcgacagaagacatgaacaagaatcgtcaacgttgacttggaattctagttgaatcagtgaccgttctctagctcgctatttttattaattgattaagtcgatggattgaataggttgtgtacatacgtataaagtggtcgtgtcacgtgaaactcaagtttaaaatgattattgtgtaaggagaattaataacgtgaagaattgatttagtaatccaaacgattattgtgtcatcgcgcttagtcgtacatcgctagctagtatttgcttaatgttttgttataattgtttcattctcttcggtgtagatatctatcttatactctttatactcgtgctcatacatgtgcatcgtgcatctcatgaggtacgataaataatcacgtgatgcggaagatgagccaagtcgaccccaagcgcgggctactccgcatgatgatgctgatggacgaacctgcctgatcaagtgcaaggacaaggatgatcgtcaagtggacgtcgtctaacaacactaacctagtgttac

SEQ ID NO: 28781 - DNA, 1582 bp, Zea Mays
ccaattcgctctggtcccctgctaggctgctcctcctaattctcaatcacaattctcctgacatcaagcctgcaaaatcgtcgggcggctgctgcttgccggcccctacctaaatgcccctacgacctaatttgcactacacagcaccaagaagtacaacactaaggcactcatcaaggcgagagaagcaggtaattgctcaagatcatctattcataattcatctaatgtgtgtaggagtttagctctaggctctagtaatttgttattgtttacaagacatcagattatcaaaagcataagaagaaacaaaaaaattaaaatttaacttagtattgttattaagagttatattattctataggttttcttttagttttttttacagggccacaggtttttctggctcggccctgttcctaaactagtcctaaaatgggtacccgtgtttcgtgttgtatgatatgatatgatatccgctcgacaatgatcaggtgataaatgagattttctaggattcacacaaattctcctggagcaaatcgcgcgctcggggtttcaatggacgtctaaagtaaggttgggccttccacggccctgcggttcatattgtataacagacatatttaattaagaaaaattgggcctttcggctagagatatagagtaaatcatgaaaaacacatgaaacaaaaagaaaactatacctataaaacaaaccataacagctcataaatcagtaacttttgtataagtcgaataaagtttgtgctcctaatatagggaaataatatgcaaacttgctgaaaagcgtttgttcagctgcttgctgggtcaaactactctcgcccttagacggaccgaatcctgctcaacttgggccgaagtaagtgaagaaaatatcagaaaaaaataaagtaaaatcaattggacttgtctattttttttaaaaaaaaaacggcaggagagttgccgaaatttttattagaaggttgatctaattgaagaaaaattgtgctgacttgccgaggcaggcccatccaccaatcatcgatccataattaggtccctgataaatgaattaagaggaggtagaactactttttttttcttcttcacccgttctaacttgtctgagttctgtagcaactagcaaggaaccagaacaacaaagagtcgtcgcaatatgattttggcttctgtgaattcaattctaataacttctctaaattgttctagctactgtaggtcagtgcgcgtcatagcttgagttaatagacgcacagggtcgtcaatcctcttgccaacagtactcgatatactccatgcattcacaaaaaaaaagatgcaagttcaggttatttggttgagacaaacgatttaaagttcaggttaccggcagcacggcacgggcggcggcccctcctgacgtgtgagcaaccgcgcactatcatagtagggatgatgagcagctagcagcaagcatgctcccggcgcagctcctgcccccggagagatctcgtctcgtcgcgccgtccgacgaccctgtgattgaaccattaaaatctcccgtgctttaggg

SEQ ID NO: 28782 - DNA, 233 bp, Zea Mays
gggcgcgcggggctggttgggccggattcggcccagccgagggaggggagagagtttctcttttttcttttctttttctaattcttttcttttcctttttctatttttgtttctttttcttttgaatcaaaaattctctaaatgatcttgagtgataaatatagtctaggtgaggtgctcttgtcatttcaagtgtatgcacatgatggggtgatctaggggtagagttaaag

SEQ ID NO: 28783 - DNA, 333 bp, Zea Mays
ctcataagtaattttgaatattgaatatcatttcttcttaaattaaaattcacataaataacataacattattctaagaattaatattctatttataaataattttagtttgattcttatgaattttatgattatttaaatacgtatttcgaaattaaaaaaaaagaaaaataaaaaaaacaacaaaccctaactaaccctagcccattaggcccatcaacccccagtcgccctcctgacctaatcccagccgcctcccatcctcctctccctgtggccgccgtcactccttctcccctccccttctctctcttctctcctcctccctgcctc

SEQ ID NO: 28784 - DNA, 334 bp, Zea Mays
acggaagtttgattagacgcggtcgtcaggggcgcgatggtcgccctttttcaaattcaaatgctggaccccccaggacccgtaagcttcattggcggcctattttgcgcaatgggcctttcatgtctgggcctggcctttcggcctcttccacctctgcgaaggttggttcgtctggtgcggtttcctcagcgtttctctgccactattgtaaagttaaggggcatttggaattggacggattcttttaagtctggtttcttttaagtccaagatccctaaacctaagatttttcaatttgaaaacttctggctagaattggacggattcatg

SEQ ID NO: 28785 - DNA, 165 bp, Zea Mays
cctaggctcgcagctctcaaggacaccggtgggggagtgaggagtggcggggaaaagacggagacgctgatcccaccttgggagcgcgcgcggaagggacgggcgagggcgagggggcggagacgggggctcggggcacacgtggttgtgcatgcgcggagttgg

SEQ ID NO: 28786 - DNA, 1267 bp, Zea Mays
gtggatttcacattttgaaatcctgtgcctaaagtgacttttaggattaggagacctaatcttaggaacaaaaacaaaactattttttgatatctatgaacttgaatgtttgttcttatgatacttgtttgatttggatctttgattgagtgggatgagttgtggagtaatgtccacaattacatctgcatatacatataggtataaatataaataaataaaattcataagatagctaaacaacctggtttatcctccattaaagtgtatctattttatatagatccctcatcttaaaagactctctcttgtcttaattggtccatcttatcttaaaagatactctcttatcttaatagactcatcttatcttgaaaagattttatctcatcctaatagatctaactggcctcaaaaatattctaccttatccttatggattcatcttgccatcattagtatatgtatcccactctagaataacaaccatgagctaatccaaaatttatttagatcttatctaatctattatgatcaaacctaatgtgagtcactcaaaccgaattagctaatgctgaggaaatacattagaccctgccctataaacaagtttgatatcttagatcaacctgacccaacccatagaatcttgatggattgcataatctgtctatccccacctaaaacaaacttttgatctacatcatgcagtctatctcatccatatctatcttaaccatatcctctaacttcgatgatatacatgaccccgactcaatgagaccaagactggaaaaggaaaagatcaacctcgtcaagaaaaaaagagaagtcaaactcgatcttccgatgcattaccacccaacaaggagttctttctcaccggaaattttcttatcccaggctattattgccctaacttatccatctcttagatcctacataataagtggttgaatacctatgctctcctaatcaacccctattgactaaaaaatgagactctggacttttggtacaattataagactaaaagttgaattgcaaaccaatcctttaggatcccttttcttacaaatctcgaggacgagatttctgttaagggtgtaggatttgtaacaccctaaaatcttgattttgtgattagtagattttttttaacggaatcaaattaatgtgtattataaatttttatgaatgaaactagtttcctaaagttaaataagtagtaaaaaaattaaattttggctatgtacgtaaactattt

SEQ ID NO: 28787 - DNA, 1055 bp, Zea Mays
gggccacgtcgcggcggggcacggcggcctcctcgtcccgtaccagccgctctggactctcttgccggctcggctcagaccaatgccgcttgccgccccctactgtccctttcttcctcacctccaccacgcttgccaccctcgcgaagaaactgcagccgcaatcgccgccacgccacgcgcaagcccaggcctcgatggcgtctgcttcgtacgccgcaacgcatgcggctccacccgcacctcgctctccgcctgttcgaccacctgctccgctcgggcgcgccgacccggacctcccggcctacgagctcgctttcgcgtcctgcgcgcgcggaaggggccttggcacgggcgctgcaggttcgtccacgtctacgccgtatgccgatgctccccacgcgcgcagagtgttcgacggcgggacccacaacgacatggtcgcctggcacgcctactatggtagtaaataacatccggatctgcggacattgtcataatgccatacagtaacttctaagcaagatttctgggaggtgcataattgttagggatgaaaatcggtttcgtcatttcagaaaagggtcttgttcttgcggggattactggtaatatttttgatagcaacggtttccttcgttttacttatttgcatacactaaaatgtgtatattatatgagacaactgttattattgtccggagacatgaagctcctgactttattgcacgtctattgaatactatatggcacccttgaaccaacaacatgattgacatctcttgtgtctcatcaacttgaaacctaattattgtccttttcagtcaacatgattcaaaactgcacatgatcctgagatgtatgtcctacgcaaaagtgtcatggccctgtttggtttctttagttactaaactaaattttagtgactaaagtttagtcgctaaagtaacccgtttggtttcagtgactaaaccggactaaagagcattaattgttgtgaataatgactgttttacccctattaattaatggatgtttgctataagaagaaagtg

SEQ ID NO: 28788 - DNA, 384 bp, Zea Mays
gtgatgcgtatcagcgcgtgaggctgaaaaggggacgtgaacccaaccggggtccgggcgagatcgcaagcggggggcagcgacagcggagacatgccatcgccgaacacaccgtgtcgtgtccgtcggttgccagtccacactgccgcctgcgtcggcgtcggcgtcggcgtcgccgggccagacagggaagccagccagctactcgttgcagatggcaccgccgccgatggcctgatcgcgtcccggctctgaaaccgcctgaagttctctcgcgtcctcctgcctcactggactggattggaattggacccttctccagcctctgccggagttttctttgccgatgcgtgttacgcgtggtgcatgcaagataaacctgtg

SEQ ID NO: 28789 - DNA, 245 bp, Zea Mays
atattttttattttttatttttttttcatggcacccttttcctttctgaagggggagaaaggtttttaatggggccatcacatgtaatttccttttttagttctataagagcaaaatcccccaaggttgtaaatgtaaaagctaagaacgcaccatcgagtgccaaaaagtaaaggcgaagaagctccaaagtcgttcctaagggaatgcagagcttacagcgaaaagtcaacgctgattccgcc

SEQ ID NO: 28790 - DNA, 571 bp, Zea Mays
ctcattactagtaatgttttcatttctttgagtgtagacaaggacacaacacactattgcataactgtgcatctgaatcattctctgattttgtagacaattattgtctctaatatgtaattgtgtttgcaatggatcattctctatattctatgaattctctaatatgtattaataaacctttattgcactttcagtttgtattttctgttgggagtttatatatggacctgctgatatagtaattgacatattatcaaaatattttgtaggaagaggagctggaagcaaggatcggattgcttgaagtgtgaaaaatgattactcgcatgcgtggtagctgttggcgtaacatctaggcgatgtagagaatttagtttgctagatgaatctttatacttttgcatgtaatagaactgaaagatcacttcaaaatttaggaaacgtgttctaaacaaatatatgttggaatccaaacatatattctgagctacatattattcagttgtcctgcaattcttttagtaatcaaatttcatatattctgagctacatattattcaagttgtcc

SEQ ID NO: 28791 - DNA, 281 bp, Zea Mays
attgtgtcatggtgtagtgaaattgcatagatgtatgatgaattctccttttaacttagtgcacatcaagagagatatcgattgatagtatataaggcactaagaaacataagtgttaattgaagttattcaatgatcaaacaaataacagatgtgatcaaaagaacaacatatgcatttgataagataggagaatctagtagatatgctactttagcaatgaaactacaatccttgataaagatgacattactctaacaagatggattgatttgtagtag

SEQ ID NO: 28792 - DNA, 330 bp, Zea Mays
ctgaaaattataattctaaatccaaactagatccctagattagtggttagaacaagattcacaattatcggagtataaaaactaactcctttgcttgtaaagagtattgctttcaaataatgcggaattgataaatcaacacaactattaggtcttatgagaataaagcaagagggcttagataagtagagcaataacagaagttctttcttgcaaggtgttgctttactaaatgagaatttaacttgaagcaacaccaaatgatattagcaaagaatagtgcgagaaaaacttagaaagggaaagaacaaacaaatcacaagcaataag

SEQ ID NO: 28793 - DNA, 329 bp, Zea Mays
gttcgtggctggttctgagatccttcagcttcttaagtactcccattgcacccggccatcagtataacgtgtaaaattatggcactactactagtattttgcaagtgcgttgccagttgccacacaggtgaaaaaaagagagaacatatctagtatatatgatgcacatattaaatcaacatccctcattttatatctaagatctatagttgtttgttatattttgctaaggatatcctccgacgtggtgggttgtagtggtaagaggtatgttatttacaaattataatgatcaaccagagacatttgacctaagatggatagtgatg

SEQ ID NO: 28794 - DNA, 422 bp, Zea Mays
gggttgggccgcctgggccggggagagaaggggggaaatgagggcgcgcgcgagttgggatggaaatcggcccagccgagggagggggaggagtttttctttttctttttctttttctaattccaatccctttcttctcctttttctatttttgtttcttttttattctttttctttggagaccaaaaatattttctaagtgatcttgagtgagaaacatagtctatttgaggtgctctaattatttcaagtgtatgcacatgagaaggggttctaagggtagggttaaagggggaaaggtaaaataagggggaggtgaaattaggggggttagggtttcaaaccttgggtgggattttgggatgttacaaacctaccccacttaaaggaatctcaccctcgagatttagaccggatttgag

SEQ ID NO: 28795 - DNA, 300 bp, Zea Mays
aaaagaggagatgtataaagacttaagataaaaacaatgtatatataaatatatctccaaattgatactgttcatagcataatataaaattggggataaattttcacaggaatggaaatttaaatttgaagggagtttgaagctgaaaaaaaaggaaaaagaaatataaaagaaaaagaaaaagaaaagaacccctcgtgttgggcccaatgtgagcagaccggcccatttacatcaaccgcgcccactgttggattcgcgcgctgacacgcgggaccctcgcgacagcctctccgcgcg

SEQ ID NO: 28796 - DNA, 665 bp, Zea Mays
cctggtttcgtttgcctagggtttgttctactcctccccgtattccccatcgctgctcccctttcttgcccctctttggagctttggtctctgctgctagccgtcgccttcctcacttgagcactagatctgtgcgatttggctggttgttcgcctacagttcttcttcattcgatttggctggtcactggttgggtttgattatgccttttgtctcctccccattttccatcttgtttctttttagcatggcaaacaccgctgagaggtcggccttgaaatctgcctttgctgttgatgagacacgtaaagccttagttgttgcggcaatgaatacacaaggagacggcgcaaatggacgggaggaggaagaacagaggcagggacaggaagggaagagcatagatcctaacggagatcaggcggtgccaaaaccaaatctttaatgtgcactggattatgatgctaatattgtaattgacgtgttcgaggtaggggtgacaatttaacccccgaaacccgactggatgcaggtattagtgaaattttgatccacggatgcaacctacacctggtcgaagtttcgcgggtgtggttgatgatttctatttaaacccgcgggtgacccgcacccgacttaaaatttggtgtattcattattttgc

SEQ ID NO: 28797 - DNA, 206 bp, Zea Mays
aacgctgctcccgattcctcaagtcgcccttcttcgtcggtcgctcctgagaagaatgttgcaaaatagaaaaacattgcgtgttttgagcgcgcggttatcgtgctcagatatttcgttagaggacacctgcttgatatttgaatgctactgttattctcctgttgtttagaattcgacagtatcacattttgcagaagtaaaat

SEQ ID NO: 28798 - DNA, 348 bp, Zea Mays
ctgcagggagcggaaacggacttggatgatgatcacaatcttctatctaaagctctgctccatattttcttcatatatagtcaccttcaaattccacccacacgtcttcaagtggtatccacaaatggtaatcccatacaccagagcatcactaagtagagaaagggagacatgcggaggagaggaaacgaagaaaatgaaaggggtaaaaagatatgtcaaatgcaaattaagagatcccatatttcataaggatgtagtgaattgagaactgctgctatatatttaattaagcctagaaaactaaaccctagattacatgcatggagtcctcatactgctgctaat

SEQ ID NO: 28799 - DNA, 645 bp, Zea Mays
tactaattttgtttacaagtgtttgcaagaattccattttattttattttccttgtgtgaagatcatttatttaaatgataggaatttcctaaaataatatttctgcaaataagtttttattgtgttaataataatattatatttgttagaatatatataaaagaatgtttatacgccctatactaaaaaaacaaagaaatttgaaaaaaaaaccaaaaagaaaaaaaacacacaaacacacgcacgcactcatctaaataaagaaaaaaaagagaaagaaaaagaaaaaaaaggatttttggaaaaaagaaaaaaaaactcacgaaagaactcagctactcagcctcaccgttcagccattccctgaataaacgctctcctgtaccctctctcttggtcacttgcagctgggaccccctcgtcatctcttccttctacatccctttgactcctctgtactactcgtgtgggcacgcaatgcttctctgctactcgtgccttcatctcgcgcccacctgcacgtagtggagctcgcgccgctgaatccccttctttcactagctgttcaccttcctcttctccactacaccggtatttctttgattctccattagtggccgacgcttccccttcctctccctatt

SEQ ID NO: 28800 - DNA, 165 bp, Zea Mays
gagaaaaatgtcacaataaattcagagtacttattacatagcggaagtcttacaaaaataaaatatgaatatcgcaggaactaaaatttatcattggtgctagaaagctgactgggagacgccacctagatcaaatcgaaagcctcgatgttaggcggctcctct

SEQ ID NO: 28801 - DNA, 649 bp, Zea Mays
ggccctcaatggccggttcaaaagatagctctgaggtttccaccagcaatatcatcacaccgacatgggagaccttgtcggctgaagaacagctcctgttcgaggagcgccaggagcagctgatccaagaagcaaaagcaaagttcttgaccaacttcaaagtggacaggaacaacaaggtcgtccgacatcgggcgacggatccggcttcgttccgacccacaccagatatccccaatgtaagtagcaccaacgaactccaatctcttaaagcttacatagacgaacagcgagaacagttgcaacgtatcgtaggggatatacaaaatgatcataaacgtctagtgcgtgcgcttgataagtctactacgacaaatctttcttcgcacgaggttgaatggagggaatacacacataattcatcggctacaggttggcacgaccagtcacaacccctttatgggatgccgatggacatgtaccctaggcaacgacagcctcccacgcacatcggcgataaatttgccgatctgcggatgtccaaaccgtctgcacatgggcgcggaccgtccgggccagcggcggctgatcctatttttagaagcgaattaccgagacctgcacccaagccgccacatgccgtacaaac

SEQ ID NO: 28802 - DNA, 835 bp, Zea Mays
cttatatgctttgcagccagcatagattcaggtggctcgtattccttctgttgaaatccatgaactattatctgagggtttttcattcatactatcatgctttgccacacaagcttctgaaatccactcgattcatacatgtatgttttttgaagtgagttttgttattttctttttatggtgccacggaaatcaacttcaggttttgtggtcctttttcatttgttatacttatacccacagctatatatgaggcaataagtcaataacacagacaagcaacaaattatttggtattcgtataaaaaaaactgtagaactaaaagaataaatggaatatactagttgtttacctttcaagcctccactttgttctttgcctttactaactatgtctattaattctttcatagcgattggtatgcttgctagacaacacattgatcttaccagaggggctttgtatatggttatggtcttaattcccaaaggacagtgtttctcttattttcattctcctaaagcagtttgttcagaccaggagatgtgcacttctggtacctcattttatgcaaagataattttacacacatgatttagttatatgtggcctcccttgtgataaggaagatggtgtgcactgatggttgttcaatctttcagttggtgtttttatttgcttcaaagacaagtttggttttgtaaaaaaatgttatatgctcggtatgtcagtcttgtcatatgttatagatcggtttctgttcatagtgtgtgcttcccttttcctggtcaactctttgtcattcaatccgttcaatggatggatattggctac

SEQ ID NO: 28803 - DNA, 909 bp, Zea Mays
ggaaaatagtggacataaagagaattttaaaaagaacttgttttgtatccacttgtgcagtcagcgtcgtcttacagaggtaggtaatcaaacatgtgctctatgtaggtaatcaaatatgtgatctgataaagtcaatgcaaacggtggctcatgatgagactataggggtaatcaatcaggcggaaagagaaataaggaatatatgaataatatccaaaatttaacactatgcaacatattgtctttgtgccattatttttcttgatagaaatagtacaccattaaacagcaagtaaatctctagttggtttaaaaaatggaaaaaaagtactaaagattgtgagacggtgtccataattatgttgatactatgttataaactgaaagtctgaaacaataatgtcttcagtgtttatcgtagtatatttacaacagctttatccactcgataagggtagaaggaaaatgacaacacgtacaataatagcaagtaaacggaatacaaacaatgttattgtagcaagtaaaagtggaagagggtaacagtgcgcttcggccggtgctggctctttcttatcacgtagaaatggggaaaaaaggactacgaagatgacaatgttcgttggtttatgccaacgacaaaccgaaggatatgtagagtagaattcggaagaaagacgaaaccgcccgtggatccattgtggcctctccaactcccatagggaacataaaggcgtaggtgagacgaagcggcctccaagcctgatgcagcagcagcggctgagaagaacagcgtggttagtgtgcgggaaactcatctagctgtcgtcttgaagagctctccgttggtagaattagctttccccaccccgattctacaaagagcgttaagagctatcacggggt

SEQ ID NO: 28804 - DNA, 529 bp, Zea Mays
ccggtctccgtcggctgtgaagttggccacactcaaagacacgaacgggaggtcatcgtaggggttgggaggcggtgacgggaggggggcgatcaccacctgtgcgtcatggacattgcccggcgagtccggtctccgtcggctgtgaagttggccacccccaaagacacgaacgggaggtcatcgtcggggttgggaggcggtgacgggaacatggcggcgaggagactgaagagctgttgcttcttgctgtagccttgcgacgagggagcaccggcggctgcagcaagcgacggcgggaaagacacacgcaaggtgctcgatgtaatgcctctgtacagtaaacgtgaaggagataaatgactggtaaccactttggcatttcctatccttgcaaaactattaattaattcatgatgcaggagggtaacaaaggatgatgtagtacttttcctaatattacgttattttttgcagaatatttgtacgttcacaaatgtgtattattcgaaaaattattgatttcgat

SEQ ID NO: 28805 - DNA, 170 bp, Zea Mays
gctcaagaacgctctcacgacttcttcttatgcgtctcctctaatcaaacccatcacgtactccgtccaccgtcgccgcgtcagggcttgttcggttctactccaatccatatggattgaggggattgagcgggtttcaatccctattaagtcaaaatctctctcaatcc

SEQ ID NO: 28806 - DNA, 336 bp, Zea Mays
  misc_feature (335)..(336): n is a, c, g, or t
aacagtacaagcacagtgtttagagggcttgccacagccctccacatctagcggagcactgctcccagcgctatcactgttgcttgtaggggaaggtttagaggtggccgctgcacccatctcgttaccctaaacgtgcacagtgcaaggggagggggaagggcgcggcatgcgctgaagacagtctgaggcgctgcgggcagtctaacagcaccccctcctcgctcgcactccgttcgtctgacatctcctcccgtcctttcctttctgaggctcgcgaaccccgacaatggccgcaaccgcggtgtcggtcgacgagaagctcgacaagcttnn

SEQ ID NO: 28807 - DNA, 69 bp, Zea Mays
  misc_feature (1)..(2): n is a, c, g, or t
nnctggacaagctcgttgtgctcaagctcaacggagggctcgggacgaccatgggtctgcacccgaccc

SEQ ID NO: 28808 - DNA, 1281 bp, Zea Mays
ctctgctccatctctcttgctcgccggagctccctattcggccgcgcctctgctcgctcggtcgccaagctcccacggcgcccctgcttcgtgctggccgcgtcttcttctctgctcctccctcgccgttgctcctggtcgcagcatctctgctcgctcgcgcccagccggagcagcctcctacaccagccgctcctccctgcttctctctccctctcgcgtcttgctccatccatggccgttccctgctcttcctcccccagctcgctcaccagccgttcttccgaactcgccccagcccccaaccgccgtgcgccctgcttgatttcccctatgttacacgcccacgcatccgcgtgcttcctgcgcgcgagcttctgcacgcccgggtcttctccctcaagctccagctccatcgcgacccagccgagttctctctctctctggtgccgcgctcctgctgcccgctcctccttcagctcccagccgccgaagctctctgcgcgtgtaacgtaccaacaccagaatttgagatcgcgagcaccgctccccggtgctctccacctccacctctcacgaagtattcactatatccagagttggggtttacaggagttcaagccagtaccggtcggcacagccgccgttcgctcctagcacttccgtcctttcctcctccccctcttgcatacggttcagtctcccttattaatacgatagcgaccaacaggtgaacagaaacaatacaaggcaggaagcctactgggtccaatctggcccaaaaacacggctgttgggccgcacgactcgcttctccttcatctgttgtttgcttgacgccatggtcctgacattctcccctccttgagtggaggcttgtccccaagcctcagcttcaggaaaacgttgcttaaccactggttcatcttcccatgtaacgagttcttcgggccatgcagaccacttgatgagcacttgtggaacatcgccgaaggaggtgtggacgactcgacgctgcaaaatctgctctggccattgtaaggagtctgaaatggaaggtaaaatagagctaacctgatcagtagagcccactgctttcttgagcaaggagacatggaacacatgatgtatagcagatgtagctggcaattgcaatttataagcaacatgtccaatgcgtgccacgatttggaaaggaccgaaaaacttaaatgcaagcttgtggttggcgcgtttcaccaaggaagattggacgtaaggttgcaatttcaaatagaccca

SEQ ID NO: 28809 - DNA, 338 bp, Zea Mays
cgcgacatcagggagatccgaccgagcagaggacagagctcaactgcgcgcgcgggcctggagactgagcggccccagaacttggggcgcgtcgccatgggagacagggaccgactcggctgggcgggctgcagagacgcgagagagaagagcagagatggggctggtgccggcgttcaggagcagcggctgatggagctcagccccatggagaccagcagccatggctgaagaggagaggaggctatgcgttcctggtgctgggcaatgagaaccaggtgggagcggcggctgggagataaaggaagaagaccgcgcgcagataaaacagagtaggg

SEQ ID NO: 28810 - DNA, 121 bp, Zea Mays
cttccttaatttgctcctaaatccagctagtgctctagtcaaatacacccgaaacacgtgtattaaaaaaagtttaaataagaaaccacacgcacgcgacaccagacctacccgtcacgca

SEQ ID NO: 28811 - DNA, 51 bp, Zea Mays
gttcgtttccgtcggattggacccggaatcgttccagctaatcaaagttta

SEQ ID NO: 28812 - DNA, 1192 bp, Zea Mays
agacgcttcgctccaaatttgttgttgtttggattgattccatatagaatagagtggttgtaaaaataaaaattatgctcaaatgttaaatcaattggctcgccaaaatttctcagactgagtcgctctcaaggacgaagccgttccatcccaactggctccggaaccaaacactacctaatatgcacaaataaagcattctcataatactcaatttcctaggggggattcctccattagggaacggaaatgtgaaagtttcatctcccatgggatgtaaaggggagaaattcttcctcacacaggtaaacggggattggtccccgtttcccgcggggaccatcaaacatgtatactagttaataataaaaaataaataattatattgtcaagagatcaattattgtacaaatatattcatttcaatatacacataatgatttttcacatatgacataagtgaaaataatttacattaataatataaaatatatatgtcgtaattataatttaaaagataactagatttaccataccagctggccagctgggaggaaggttcaattcaaccaacggaactgaagcgccgaagcggtgcatgtttcctgcctgcactcgtaccgctccgtacccagaaaccgtaacaaattaacgtcgctctcggagcggtacgggtgcaatgcaactgcaacatggaagagagcgatctctcctcctaaaaataaaaaagggtaattaagcgcgtgacatctgctgccgaccgagcagctgagcacatgcggtgcgtacgaacccaaccggtacgcgtcgctaaaagtactggcagtagattccagctgatcaccattcagcacacgcatgatgcatccagtgtcccgatccagccatccagggcggctctggctggattataggcttcattagcaagtacttaccgcatgttaccgcgcgcgcgctgatggtttcacaccgtcccgtctccatgcccatggtcatactcagcaccacacgcaactaccagctcagcgagcaccgagcacgagcagagtaggcaggcgacggctggccggacggggaaacggtcgcccggctgaccggagtggcgccgacgcgacgacggagttgagttgagtccgggatgagatgggcgcgcgcgccattggcgccgcctgggcgtgttgttaggtaagtg

SEQ ID NO: 28813 - DNA, 277 bp, Zea Mays
ggctttattgtgctaactcctaatcaagtttttgtggcattaagtttcaagtttttacaggatcacctattcaccccccctctaggtgctctcaagtaccagctccagctttagcgccagcatctcaggctccacagtctgatccttccagtgtaccaatgtatgagtaagcaacaactctagcctctctagcagatcctggatctgagacaaactctgatactattccggactttacactgattgctcacctcgccatgatgcgtctgcccctcgt

SEQ ID NO: 28814 - DNA, 397 bp, Zea Mays
cgaacaatcatggatggatggagtagtatctcacaacatctctgcgtccacgggagcacggcgacggtcggattcgtcgtccacgggacggagtggccgcgcgtgtgctccacttgtctcgtcctgcttggccgtgacgtccatttatccgctcttttttttcttctttttttggtgctgcggggctagctggaaacttcttctcctgcgaataggatcgataatatttgcacctgttactgttaaaatcatctccatccagctcttgtggcgacaatgcatgcattgcccttggcgtggtgattggtacctcacttgtgggctttaccggccgttcaggtggtaacctttttcagtcagccagcaaattccccccacgaccgcgcactttgcgtcg

SEQ ID NO: 28815 - DNA, 520 bp, Zea Mays
cttctcctgcaaaaacaacaggggataaaaccctgagtacgcaattactcagcaagacttacccgactaaagaaaagactctcaagggtatgctagctgattgggagtcaaggtaaagtttatcaatgatcaaagactccttttttgcagaaaagcttgctaccagttgatccttaagccaagttttatttcactagttaggttattacctgaatctatatttgcctgatctagttcaagcacttggcctatactagctccattttattcattctcatatttcacttgctaactacgatgatggtcaccgggatgagtctccataaccgaggagcaacgacgattcgaaccgattatacccagctggggatctctaaccacacgacatatgtagcacttaacccttgcatatgtcaaccgttcccacggagtcctccactacatgaacaggtccgcgccacccgagagcacattaccctaccaagcgtgctactatgccaggagggtacatgctactccc

SEQ ID NO: 28816 - DNA, 496 bp, Zea Mays
aaacaagaaagatgatgaggatccaagaccgccacacccaagagtccaccaagcaatccaacgagatcaccccgtgaacaccatcctcagcgatattcataagggggtaaccactcgatctcgtgttgctcatttttgtgaacattactcttttgtttcctctattgagccacacagggtagaggaagcacttcaagatttggattgggtgatggcgatgcaagaggagctcaacaacttcataaggaatgaggtatggtatttagttccacgtcctaaccaaaatgttgtaggaaccaagtgggtcttccgcaacaagcaagatgagcatggtgtggtgacaaggaacaaagcccgacttgtggccaaagggtattaacaagtcgaaggtttggatttcggtgaaacctatgcacccgtagctaggcttgaatcaattcgtatattacttgcctatgctacttaccatggatttaagctttaccaaatggacgtg

SEQ ID NO: 28817 - DNA, 2098 bp, Zea Mays
cgaaacctgaaatttatagacttaaacacacactaaaggtcgggattagcgttagaattaaattcaagtccgaaagattatttatcttgctaggagttgcttaaagagtgcggatgacgtatgggagcaacctcaaattaatactagcaaggaaatgttagagagaggaaagagggcaaacaaatcaagcgagaatcaaagcgagtacacatggtgatttgttttaccgagattcggttccaaagaacctagtccccgttgagtaggccacaaaagtcgggtctatttcaaccatttccctctctctcaaacggtcacttagaccgagtgagccttctccttaatcacacgggtcactaagaccccgcaaggaccaccacacacttggtgtctcttgcttcgcttacaagcacttagaaaagaagtggggaaggaagaaaggcaatccaagaaacaagagcgcaaatgaacataaacacacactctctctcaagtcactaagtggttgagatgaatttgggacttggagagggtttgatatttggaatcgtgtcttagagtgaatgctctagctcttgtattgaatatgatcttcagaaaacttggatgccaatgaatgaggtggttggggtgattttgggacttggagagggtttgatctttggaattgtgtcttggagtgaatgctctagctcttgcattgaatatgatcttcagaaaacttggatgccaatgaataaggtggttggggtgaatttgggacttggaaaagggtttgatctttggaatcgtgtcttggagtgaatgctctagctcttgcattgaatatgatcttcagaaaacttggatgccaatgaatgaggtggttggggtatttatagccccaaccacttcctagccgttggcaagggctgctggcggtgggtgcaccggacagtttggtgcgccaccggacaacactgtgcattgtccggtgcgcgccatgtcagcacacctgttagggttcggagcagttgaccgttggagtcgtttgtcgtcttgctgcaccggacagtccggtgccacaccagacagttcggtgacctctgacttctgcgctctaacttaaacacacactaaaggtcggggttagcgttagaattaaattcaagtccgaaagattatttctcttgctaggagttgcttaaagattgcggatgacgtatgggagcaacctcaaattaatactagcaaggaaaggttagagagaggaaagagggcaaacaaatcaagcgagaataaagcgagtacatatggtgatttgttttaccgaggttcggttccaaagaacctagtccccgttgagtaggccacaaaagccgggtctatttcaaccctttccctctctctcaaatggtcacttagaccgagtgagccttctccttaatcacatgggtcactaagaccccgcaaggaccaccacacacttggtttctcttgcttcgcttacaaacacttagaatggaagtgagaaaggaagaaaggcaatccaagcaacaagagcgaaaatgaacacaaacacacactctctcaagtcactaagtggttgagatgaatttgggacttggagagggtttgatctttggaatcgtgtcttggagtgaatggtctagctcttatattgaatatgatcttcagaaaacttggatgccaataaatgaggtggcttgggtgattttgggacttggagagggtttgatctttggaattgtgtcttggagtgaatgctctagctcttgtattgaatatgatcttcagaaaacttggatgccaatgaatgaggtggttggggtgaatttgggacttggagagggtttgatcttcggaattgtgtcttggagtgaatgctctagctcttgtattgaatatgatcttcagaaaacttggatgccaatgaatgaggtggtcgggggtatttatagccccaaccacttcctagccattggcaagagatgctggcgatgggtgcaccggacagttcggtgcgccaccggacagtactgtgcattgtccggtgcgcgccacgtcagcgcacctgttagggttcggagcagttgat

SEQ ID NO: 28818 - DNA, 377 bp, Zea Mays
aagacctcggataaaccacttacaactaggaccatgattaagtaaacacaaatcacacaccaacaatttgcagcgaaaatcttattaccaaattttataagttacatcaagtttacattgtacatgatcggagtgattacaaaagtgattcaaagaaataactttgacatgttataaattatttatagttttgaaatatatgctagctcaagtgaccatccttagtaagaagtatagaagaagtacttagacttataagaaggtcgtgcccaccaacgcttaacaccaatcacaatcaaagtgacttgtaacctgcaggaacaatgggaataaaaccctaagtacgcaagtactcagcaagacttacacgactaaat

SEQ ID NO: 28819 - DNA, 1002 bp, Zea Mays
gttttattaaagagaccctcggtttattggaaatcaacccgccgtccctagttttcgcgcgcaggcccctgtaatcttgcagattgaaccttgtacttttaaatattcacagaattagccctaatttcatattttgaattcccaaccttgtttatttcataacttttgcatatgaattccaaatttagtgattcaaattgtaaaatgttcatagaattattctctgtccgaataaaatggtttcatttactgtctgcacactctatttttaggattgaatatgaactagtgtagatgtatttttatttatttgataaaataaataaaaggagaaccttaaagatttaaacatgtgtaagcttgcgagactaataatgtgtattacatgaaatcatctctggtctagatttaggtcacaataaaataagttgaactatgtttatgtacttgtaagtaacacttaggggaacagtaacctattttcaaataaagttgatatatgttatagtttatgttatactttgaattcattatcccttatgtagtactgtgtctttttaagaggtgttccaatgtttgtacatgtttggcgtgatgtttatttgtactttccaaatgtattgaatgcatgctcgctttatttagacaacaagcagtccgaggttcctgagtgtgtagttggagacctcccagagcagcaacttggtgaaggcaagtgtcctctaacccattatgtcctatctacttataattcattgtaccgcattacttaattcaaacctaaggatcgactagctttctatttacttatccttgtttaccttttgggttatcatggttagctttatgctattgctttactttaatcaatgaacatgatgtgaatattatgatacgatgatgttatcccgatgatgttcttgtgatactttaggggactcagactatttcctgagtacctctccataaggacctgttcagggagtgacaacccgggataac

SEQ ID NO: 28820 - DNA, 359 bp, Zea Mays
cacatatcttcattatataaatttggataattaaagatgatatttaattacatttgtaccttcggcttgacagaagataaaaatccagcgttgcgcacgagcgaatacaagatagcgtgaacagtataggggtactgttcatctatttataggcgcaggacacagcctgtgagaaattacattcatgccctttacaaatgtttacaatcataataccaactatcacaggcccattgctcatttcatctttaagtcggtgcatctgaaaatgtactccgaagctctttgattgatagcttcgactttgtgtcaatcttccgaaggtgttccttcttatgggaccttcggcgacgaagcag

SEQ ID NO: 28821 - DNA, 124 bp, Zea Mays
caccgaccatttatattcatttccaaaacaacactatcctaaccctgcaaaggtattcaccaacaaagcacacaatacaaggttggacaagcattctatcaacacctagttatctgatgacaac

SEQ ID NO: 28822 - DNA, 1047 bp, Zea Mays
gccgctgctgctgccgtcaccgtcgccgtcgccaccgtcgtcgtcgtcgtcgccgtcgtcgtcgtcatcctcgtcctcaccgccgtccgagtcctcctcatccgaggagtactccgactcatccgagccctcgagcccggagcgctcgacggcccggatgtacgtccagacttccgcggcaatctcctgggagtcgtctgaatcatcagacgacgtcgggggagagacgggagtcggagacccctcggactcggaggagaactcctcctccgagtattccgagtcgccgaagtcctccgacggaggagtcggctcgcgcttgcgtttgttactcttgcccatggcggaagcagacgggagagaagagaaggatgcagtaaagaacagcgaagagatgtgaaaaaaccagaggagcaacgacgttatttatagaagggaaagacaaccgctcacctccaaccgcggtcactgaacagtcgcaaagcattcaataagtactttcactcgtctgaagacacgtcaggcggctgacgccgtttcatgcaacactacacccattgggactccagtcaacagcgcaaaggatatgattacacccgccgtcccatcacattactactcagaagcagccggataaaacactcagcgtaccaagccgtcccttgcccacacccattgggggggacgcccaggaattatcagtatatttttcaaaacggtcacatctgtgcagggcacgcagtgaatacctcaagacaaaaatgagatatcagtaaggatcagaggaaagccaaatatagccagcgaagtacaaaatatggccgacagaagcgacgtgaagactagacagagaacgtccatcaaacgtccaatcagtcgcagaagcaaataaattgcactacctagcaagatatggatggattgcaaactcggctgctaaagacaaaatatatgctgacctctgcagcaaaatattgatgacataatgctgacctccaaagcataatgcaaataacttcatgccaatttctacaaacgaaagggatg

SEQ ID NO: 28823 - DNA, 548 bp, Zea Mays
cggcgacagtcgacacgccgcccacggaatcagccgcgcctacatgttcacttgcagcggcggaggtggttcaacctatgttcgtgctcgcggcgcagtggcttggattgcgcgcttgccgcgggacggcggcagcgcacggaagctggcctgcgcagcgacggcatgagcttcgtacgcaagtacgcaacagcgatggcctgtgctcggtcacgacggggctgcgtctgctcgtcagcacgcctttgaagcaacggcggcgcgacgccctcgtgccgtagaggtggtgctgtgacggctgcgtgcccacttgccggagcggcgatgtctggtttcgcctgcagtagtagcggctgggctcgtgctcgcgtgcctgcgtacgacagcgcggcctgctcgctcgcctgcggggcggtgccatggccgttgtgcccgcgtgctcgcctgcgcgcaaggcggtgcagtggctgttgtttccgcgtgctcgagcagcacttgaatcgaggggcgactgctgccttgcgtgttagaaacttggaatcaagaac

SEQ ID NO: 28824 - DNA, 211 bp, Zea Mays
ctcgtttctaaattcttatcgaattattccctatccaaccatgtcatcccataagcatggttcataatccagaaaactcctaaaatactcttatcccatattctgcctataatctctctgttcagactaagtcagacaattcattcgtcactattctcaccaacagtgaacttcactgtgctacaccacatacacccagctataaatacac

SEQ ID NO: 28825 - DNA, 664 bp, Zea Mays
aagccgagccagtagtccctcgacggcggcgccatcgccgatcgatcgcccggccggcacagcccggagccccggacgaacgcacgcacgcacgcacttgtgcctctcctagtagcagattaattttacgttccttttttttttccaattcgattcgattgattgggggtcttctttcttcggttctgttacacgggttcaggaacaggtgggggggagagagaaaagagatgcagattgccacgctcggacgcaacaactcgcgggcggattcaagaggtcacgagagaacccgaggaggacgcgaccggcgaaggagaaggcggcggcgagggcgaagaaaagggtttcctcctcctccggtcccttctatgttctctctcctgggctcctcccgggtgggtgcgtgactaattctgatgcttgccctttctacctgtgcctatctgccgatcccctcccgacctgcccccacaaaagcgagacgacgacgacgatacgagagggcagagagagagaaggcgaggtcgggccgtcggggcggtggtgggccgtgttgcggtgtttgtttgctgttgcgattgctcgcggattcgctcgcgagcgcagcgccgcaatccgggtgcgtgggcgtgcgctgccgtggcccgtggggaggaggaag

SEQ ID NO: 28826 - DNA, 272 bp, Zea Mays
caggattctgttgaatcggcatctgctcgagttttgatggccgtgctagagttgcaacttactcgagggcacagtcgtcaaaagtggcagcagttgtacactgggagttatgcagcatttaagatgatggaaacggccaagaatagggcttgtacctaggcacaagaacgactggaggaaacaaaggttcaagcagaacaggttattggactaaagcatcaggtgacagaacttcagacgcaacaccaagctgatcagaatcgcattaagga

SEQ ID NO: 28827 - DNA, 322 bp, Zea Mays
caaacataggtgtgtttgattggatattagcatgttgtcttcctccccattggtttgagttctgcggtgcattactatttaccctatacggttcataggactgaccatttctttctggccttttaggcggagccggaaagtattcgcccccatgggtttgggacactgtattaatgggctggtgcattgtatattgcgacgggaagtgctgctgagacggatgaggatttaggtaacaatcttcctcaaacatccctgtgccggatcgtccggtcggatacatgaaagtgcattcatcccttttgtgagttttggtgatttg

SEQ ID NO: 28828 - DNA, 203 bp, Zea Mays
gttctacttataatcaattacaaaagaccaagtgtcgtggagccttttcccaataagccgatatagcaagtcaaagtgacacaaattttcagaatttggagtgtcaatatggaggaatggtcgagtcctaaacaataaaatgtcaagtctaaagactttgggggctgcatgacataattagcgactcaaaccaaagtggaaca

SEQ ID NO: 28829 - DNA, 193 bp, Zea Mays
tttttcctttttttccttttttcttcttcttttttttgcaggggcctaaaccctttttttactatgacaacccaaacaataagtctactgctaacaaccccttttgatacacccaacccaggtggggttggctgaggcccaacaaattagggttgcccggagcccaacagttcattatgcacacccaactcag

SEQ ID NO: 28830 - DNA, 72 bp, Zea Mays
caaggaccaagaagcagcagcagcagcaccaccaccaaccaaaccggcgcgcgtgtccgtgcccgtgccagt

SEQ ID NO: 28831 - DNA, 302 bp, Zea Mays
ataaataattttggtttgattcttacaaattttatgattatttaaatatgtatttcaaaatttgaaaagaaaaaaaaagaaaaaaagaaaaagaaaaacaaaacctaatctaacctagctggccgaattggcccactcggcccaacacccccagccgaccgcgccccctacccctaaccctagccgccacagggaaatccccttctcccatttctgcgcacgggccccacctggccacctctccctcccccttctctctcttctctcctcccctctctcctgctcttcccaagcgccgccag

SEQ ID NO: 28832 - DNA, 310 bp, Zea Mays
cactaggttttactggagtgttacacagtatattattgcaaaactcctattttctttacaggattttaaggagattatacatgatggacaactgcttaagggggagtgttacaggatataagcagttactatgtacactcattttagtctacggttcctggtccacagggcttcttgggacgtgactgttgagcacgttcccacgttctctgtcttttcgtggcttcttgggacgtgactgctgagcacgttcccacgttctctgtcttttcgtcttttcggttcctagacgaagggtcacgacccttgc

SEQ ID NO: 28833 - DNA, 2288 bp, Zea Mays
ctggcctgcccctaagacatgcaaagagctgagaggatttttgggtcttgccggctattataggaagtttgtcaaaaattttggtatattggctaaaccactaaccaatctgctcaagaagcacactgtttttgtatggactgaggttcaggattcagccttccaagctattaaacaggctttgtcttctgcgccagttttggccttgcccaactttcataggccgtttgctattgagaccgatgcctcaggaacgggtattggtgctgtgcttcaacaggacgggcatcccttgacatttgtcagcaaggccttgggggtggctcatttgggactttcagcatacgaaaaagaatacttggccattcttctagctgtggatcaatggagatcttatttacagcatgctgaattcttaatactcaccgatcatcgcagtttgtctcacttaaatgagcaacgtcttcacacgtcttggcaacaaaaggtgttcaccaagttacttggcttgcaatatcgaattgtttataagaaaggtgtggacaatgctgctgcggatgcactctctcgtcgcccacaccatgaaaatcttgagtgttgtgctctgtcagtggcttcaccgagctggttacaggatgtagtggctggttacaacaatgattctgaagctctgaagttgttgactgcattatcagtgggttctcagcctccatacagcctgcacaatggtattatccggtataaaaatcgtgtttggttgggcaataattctgagttacacaacaaagtggtcgctgctttgcattctagtgccttggggggtcactccggatttcctgttacatatcgtcgcattaagcagcttttctattggccacatatgaagcagactattaaggaccttgttgatgcttgttcagtttgtcatcaagctaagcccgaccgttctcggtatcctggactcctgcagccccttccggtaccacaacatgcttggcaggcgatttccttagatttcattgaaggattaccacggtccggggtctacaatacaatattggtggttgtggacagattgtccaagtatgctcactttgtggcaatgcatcatccttttacagcactgaaagttgccaagattttcatgacatcggtataccgtctccatggcatgcctgaatccattgtgtctgatagggatcgaatatttaccagtgcgttatggaaggagctgtttcagttgtcaggtacatgcctccatatgagctcttcataccacccccaaacggatggacaaactgagcgggtaaatcagtgtgtggagacatatttgcgctgttttgttcaatcttgtccctccaaatggtcttcatggcttccaatggctgagtattggtataattgctgcttccatacttctctgggtcggtctcctttcgaagtattgtatggccattctcctcggcactttggtctgtcagttgatgattcggtgaaccatgctgatcttaagctctggctgtctcaacgtgagctcatgttacgagctgtgcaacaacatcttcttcgggcacagcaacgaatgaagaatcaggctgataagcgtcggtccgaacgcgagtatcaagtgggcgatatggtgtatttgaagctgcagccttatgttcagacatctgtggctgtgcgtgctaatcacaaacttgtttacaagtactttggtccgttcgaaatcttgcagcgcgtggggaacgttgcttacaagttgaaacttcctgagtcggctgcagttcatcctgtgtttcacgtatctcagctcaagccctctcttcatcccaggcatttggtgagcagctctcttcctgttgttccggatgcaatacgttttccggtacaagtcatccagcgacgtgtgattgctcgtggaggagctcaagtgccgcaggtgctgataaggtggtcaggttgtgatgctgctcttgacacttgggaagatgagttcgacgttcgtcgccggtttcctcgggcagccgcttggggacaagcggcaaatcaagaccaggggaatgtcagtattcagactgacgaagctgacgatggcgccaagaagactgatattcagaaggcaaaggaagtagttctgggccaacgtgtgcgacggcccaatgttcgttatcctaaggagatgtggtccagctagacggcccatgtggtcgttgtaacagtagcaggataaaggcaatagaatgtttcagaaacaggagaaaaaggataatagaatcgtattccag

SEQ ID NO: 28834 - DNA, 309 bp, Zea Mays
ataacaaaatcagtttttaagaaatattctggaattcagaataacagaaacaaaatttcaagaaattttatgttgtcaactttaaaatgaggaatgatagataaaagaaacatttagctggaaaaagggtataagttttttaaaaatatgctccatgtatctgttccgcccttctatgaaccatgaaaaccaataacaatatcgaacaattacacatttcagaggtaatgaaaactccagtagaatgaggaacatgctagataaaaagactctattggtgataaaagactatattgatgataaaagaaa

SEQ ID NO: 28835 - DNA, 427 bp, Zea Mays
ggctacttcaggcgccaacggctacctgcagcgcatttattgcgcgccagcgcgcgcagaggtcaggcacgcccatgctgacgcaccggacatcctacagtacatgtccggtgcgccaccggacatcaaggcgggcccagaagtcagaactccaacggtcaatttccaacggcactggtgacgtggctggggcaccggactgtccggtgtgcaccggactgtccggtgtgccatcgaacagacggcctccaccaacggtcatgtttggtggttggggctataaataccccaaccaccccaccattcattgtatccaagttttccacttctcaaccacctacaagagctaggcattcaattctagacacacccaaagagatcaaatcctctccaattccatacaaagcctaagtgactagtaagagtg

SEQ ID NO: 28836 - DNA, 140 bp, Zea Mays
ctttaatgtcctaagctgtgatatctaattattaagtttgtttgtgtggacttttattagttcgagttctagttcaatcatttatgttttcattgtactagactgctagttttgttctctatccaagtactatgtaacgt

SEQ ID NO: 28837 - DNA, 937 bp, Zea Mays
ggaagacttgtatacgtagcgtgattagtttatgatgcgaaagataggttaagtattttatctggctagctagtaagttctgacgatgttgccatgccgatttagtttgcttaaataaattaatgctttgctagtagacattttaattagctggcgggtgatgcaaagttgtccggtctggtagtttagaaagttgatgtgcttctgttcttgttctaagatttaaatgtcttagactaatgaatttagaattattaagtttttgatgtcgaactttaactaaggcacgtagaacgtatgcatagttattatttcttaatggttgatttagatctgggtaagctgaaggaacatgattgttatatttagtgagttaaaaacatctagtattgcttgagtgttgtaatgtttcacctctaaatgtttggtccccttcgttgtagccatatttagtcattgctactcctgctcctactcattcatgtgcattatgcatatcatttaggaacgttaattaatcgtgatacaaaggaaaagagccaagttgacctcaagatggtgcaaggagtggccttcttcgcacaacgatatcatctgtcggaccaacctgaagggcagactgaacaagtgccaacataaaaggctggtcgcgaagtgatcgacgtctaacaaacactaacctagtgttatccaggcaagtcccggtacatgcaaccccttccttgtgtttttaaataatttttacacactttaaatctagcgaaatgtgcattaggtttataggagttgcttggaaaccctttgatgcattgactaccttgatatccattcctgttataggtacttctttggaagtatcaaaatatgatttacaaaaatgcttagccctgcttagatcttgtggatagaggttgtcttttgcaatactgcctagctc

SEQ ID NO: 28838 - DNA, 158 bp, Zea Mays
ataatcaccaagtgtgttacgatcaagtctcacacatatgatgacttatggtacagaaacgaatgtcacatcattaatacataacggagttctatacaaaagaattaaataattacatcatataaagacaacgatccaacaaccaaagctgaccggag

SEQ ID NO: 28839 - DNA, 433 bp, Zea Mays
agcggaccaatggcggaggttcaactccggtgagtaattccggtgaccttagtggacttccccgcctgagtcggccatggctatatccagtgaacacctgtgaacctgcacggccaccgcacgagggaaatcattggtgtaaatgtgggtcgacgacggcttcattttccctcacggagccgcaactaggatagttcttgaggcgacgaaggaaggaggtggcggctcgagctggaggacaaaggggtcgagttttatagcccgagcaaggagccccgcgagtttcgcaaccacccccgacagatatggtgtgcgcatggttggggatccggtcaacacagctgatctcgtggtgtctgtttgggagggctacggactcgacgctggtttcacgggggagaaagagacgacaggctgtgtcgacatgatagag

SEQ ID NO: 28840 - DNA, 412 bp, Zea Mays
ggaggggcgcggagtctgtcgccggcaagttaactctgcaaccgcaccgcacggcatgggcgagcagggaagggacccgtgttgggagcattgccgtcctctcggcgagttctccggttcccgcttcccgcttcccgtgttccagaagtccagaaccagaaaaggaaacaatatggatccaatatgggccatcgatttggtggtactgggcgtgcagcgtggtagctcagttcgggcaggtttatgctgagctttgtttcgggtccgacaacgagttttgttttcggcccagttttccactgcatcacaaacgggccagaaaaggaaacgtcaaaaagaaaacgtaaatcctccctaaaaaacagttactactgcaggtttgtagttgtccggtttttattttccaccatgt

SEQ ID NO: 28841 - DNA, 836 bp, Zea Mays
ggaaaggctccaagggcgcatgtcacacccagttttggaaggtaaaccaaatgtgaactatatacgtgccaggatcagaactcacgtacacaacgattacataaatgactcatcatagcacagtgcttcgaatgacaataaagagtaagtaataatattacatactagagtcatttacataatataaatcaaagtacacagaatagaaatgtagccaagtaaataaacccatcacaggcagctgactaggggaggtcgctagcctaatcctcgaactcatcgaaatcctggaactcttggagatccgcctcgacgctttcttcttattcttctttacctaagcatatgtttcaccaaaggcaacctggagttttgtgaaagcaaggttgagtacacatcagcgtactcagcaaatgtcccgtttggctgaggtggactagctttatgtggggttgggatcaaagcaggttgcttttactttgtcaagttttattcattaatacaagccaagttatcattaatcccaagttattatcctaaagagtatctcctcatagaggaaagaccagaatccatagttagaaacatcattaatagaaccatcatcatcatctgcaaccattgtatcccgaatcatctgtaactctaatcaaaggagctcccaaggccgctcataaccgtgagcacggctgaaatatcagtttcattcctatgcagaggtcgcacactttacccatgagccgtgattcccgttctgcccggggatcatgactccccattgatcactttcaaggtgaaccggcagggtttcactacgtagcttttacaaagattac

SEQ ID NO: 28842 - DNA, 88 bp, Zea Mays
gtacaccgagcccccttaacggcacgacgatgaagcaaactacgcctcaggttcctctaattattcagctaagggcgtcccataccac

SEQ ID NO: 28843 - DNA, 1598 bp, Zea Mays
caaagcccaactcaacaagcctaaccttcagaatatcatagatcaggtcctcatcaagcaggcattccagtgggaccagttgctcataacacttcaacatatagggcatgctttaaatatggtcaagtcagacattatgccaacaactgcgctaacaaggttgcctacactactctagctctgacgaagcagtgccaagcctcaggaggtaaaagccatcccttatcagtcaatcaagggcaaaaaaacttctcgtgcggccaagtcaaccatatagaagtagaggcagaccccgaagaaccagaagacctagaagatatgcttggagaaaatgaagaagtctctcaagaagaaaatgaacagcaaaattagagtctcttatctccgtactaatctcgaggtcaagattcgctttaagggtgtagaatttgtgaaccctaaagtatgtctttaagttgttaggaagttccttcgttattcaagaaataatatttagcatttattctagaatatgaatctttatcaaagcatatccttctaaataaatatacaaataaaagtgatattggattttgatgtcccaaacctaaatttgagattttaaaattttagaatataattttgaagcttagaaaaataaacaatagaaggatttcctatttaatcgagtgaatattcccttcatttatattacatttataggcattcaattaaataagtaataagaaaaatttaaaaaaaattgtatctcttgctgagtttttgtcagttgcattcaatgcgagtttgaaacttaaaactaagtatgaatttgagttaagtttgaataaggaaaatagaaataaaacgaaaaaagaaaagaaaaggagaagctttacatgccccttggccacaaccccttggacccacttccccaatgcaccatgcagcccacttagatccctcagccagcccacctcctgcccgcgcgtgccagcaaccgacaggtagaccccgcgtgatagcaccaccaccgtgcttggctttaggcaccaacctcaatgttgtctcactggcatgcgggccctgtggcagaacctccaagttatcgggcccacatgcacctgtccttgtctcaaagacctcagacggccatgcatgtgcactagataacttaacaggatccgtccgattgccccaaggacaccggataaaccacttacaaccagaaccgcgagattaagtaacacaaatcacacacaccaatatttttgcagcggaaatcttattaccaaattttacaagttacaaaaattttatattattttatcggagtgattacaaaagtataagtttgaaatatatgctagctcaaatgaccatcctcagtaagaagataaagacaggttatacttatataagaaggccgagcccaccggcacttaacaccatcaaaagcagcacaaagttagaacctgaaaaacaacagggaataaaaccctgagtatggaattactcagcaagtcttacccgactaaggaaaagactctcaagggtatgctggataaataggaatcaaggagaggctttagcaagattcaacttagatacttttgcag

SEQ ID NO: 28844 - DNA, 116 bp, Zea Mays
ggatggagtggaaaatccacctccgcctgtgatccattgggatccgatctcgaggcgcggtgacgactcgcgcccttggctggctgccgcccaccgcggacgcacctgcttgtccc

SEQ ID NO: 28845 - DNA, 956 bp, Zea Mays
gcgcggcagaaatgtttagtcagtagtgtggtcatcaggatgtgatttagtaagggccggtggaatagattctttgcacatcatgcatgacttgcatataaaaaaaagcacccttctccggccgcagagttcgtcgtcaaactcaaacgtaatagcatctgaaaaagtcagaagtcgtccctgcatcacggtgccggccggaacggctgctactgtacaccgcccaagcggaatcttcctctcctctgcacagcactacatagtatagatagtgcattatttacacatgattttctgaaggaaatcaactgcattgatcttcctacgaccaaacaaggagcgttggtatgaggcccatgcatgtcgactttgtttgaacgaatggaataaacgcattccttcaatataagcaaagtacgtacgtacatgtggggagaggaagaccaagtcgtttggagtatgcggctgcctcaccctctgctgcaacatggtccctgcatcttaccaaaggtagaagatagatcgattatgaagaaaccaaaggggcgagagtcagagaacctccctaatgtacaatataaggaccgaaggtatatcacaaaaggtccccaaggtacgtcgtctacgtcagaggagtagtaaccttcgagaactcttgaaagttatcggcagtcagcacgggaagcatggaaaaagtccaatatgccgagcaatactgtggacatcttgtaaatgtagagtctaacgtacggttgtaagtgtggaagttgatactatttttttcaaccttcttccactatcatatatgccttcgtaatacttgtgaaaggctactgttctcttgatccttaaagccagcatcgagggtcttggaggaagcttttgccacttcaacagtttggctctgtcatcgtaaacactctacgagatccacaagcctctatcacaaatgtacg

SEQ ID NO: 28846 - DNA, 697 bp, Zea Mays
aaagcttgctgtcacagtcatgtaggcgtcttgctgctgtgaagtccaacagtctgttgttaggcaaactctctggcaggagtctttaagaaatttctttagcttcgctttctctttgaaataaagctgcacaatgtccctggtggaggttcttctagatggcacctggaaacgtggacaggccctagacatgaactttctaaatcctgccttctcaccaaaagcaaagggcaactcatcctctacgaccatctcagcaaaagcctctcttagtgcatcttgatcaaacctccaagtggttggagcttccccgtctgttgcttgcaaagtgccctgctttggatctttattgaaaatatttggattcctcttgcaaatgttgaagtgcttcctcaaagctgaagtaccatgtgaccttgtgtcggccttaatctcacgatgacaatacttgcatctaccagccctcaaatcaccactgtcattcttgaccttaatgaaatgctgccacatctctgaccttggcgccatttcctttcttgcttgacattgtccttccttctctacatcaataacaccatgttcaacccctttgtcatgttcaccaattgtttctactacagcatgactggcagcaaattgtgagtcagttcccacagactctacctctatgtccatgtccatattgtcttcaggtttt

SEQ ID NO: 28847 - DNA, 922 bp, Zea Mays
ccgccattgactttcaatcggtatcttttgagactatatttagtatcatttacatgtcttctccaatatttgatcagactatattttcatatcatatacttccatgttgctaaaaaatgcatatgtggttaactcatattctgttacctatgcataagggaagttagtctattcaaattatgtcttgcacctctaattttcacatgctttttcctaagtagaagatctctgtgagggggagtatttcttcgtctctaaaaaggggagaaacttctttctaaagagaacactcatttagggggagttatcatttgatggtaacctacaagtgtttcaattccttatgagggcaagacttatttacttcctacatgattttaatgtcttccttttcggtggttggtgccaaagggggagaagtttagggaccaacgcaatgaaaaatgtatcaaacaccaaacaccaccaatttaaaattttaaaatctgcaagtggcttttcaagtggttttggttatttggtccaaaataggaagtaagtgaattatagagttagggggaggcttaagtccataatatcacattatggggacaaacatgcatccaagcaagtagattgcatattttcattcaaatacttgtattatttgcttgctttggttgtgttgtcatcaatcaccaaaaagggggagattgtaaggaaaatggaccccgggccatttggcttaatgagttttggtgtttgatgattaacacaatccgtgaactaattaatttcctagtgtttgtgtttgaagttcacaggatgctagaattacttggaccaaggaattgaagaaagcaacacctcaaaagaagacattaagaagatccaagaaaagtccaagaatgaagatgtgtgttgcctgcggattgtctgtgtg

SEQ ID NO: 28848 - DNA, 572 bp, Zea Mays
cccatttttactatggtttggtgttcgaaaaacaaacaaaaataaaaccaaaaaagaaatgcaacacgaggacttcacaggaggtcacccatcctagtactactctcgcccaagcacgcttaacctcggagttctgattggatccggtgctttagtgctggtatgatcgcatcggtcataccctgtgtccttcctcttatgcccacacctccgtgctcggctcgcccacggcactgaacatccttcctccgcacaaagtacccgaaaaatgcacaaaacgccccttaaaacaaataaaacaaaaaaggtaatttaacacaaggacggtcacccatttttactatggtttggtgttcaaaaaacaaacaaaaaaaaacaaaaaaaaggaatgcaacacgaggacttccaaggagatcacccatcctagtactactctcgcccaagcacgcttaacctcgaagttctgatgggatccggtgctttagtgttggtatgatcacatccatcatatcatgcgtcctccttccccttatgcccacacctacgtgctcggctcgtcgacgacactaaac

SEQ ID NO: 28849 - DNA, 1066 bp, Zea Mays
aacacgaggacttcccaggaggtcacccatcctagtactactctcgcccaagcacgcttaacttcgaagttctgatgggatccggtgctttagtgctggtatgatcgcatccgtcatatcctgcgtcctccttcctcttatgcccacacctccgtgctcggctcgcccacggcactggacatccttcctccgcacaaagtacccgaaaaatgccccttaaaacaaataaaaggtaatttaacacgagaacggtcacccatttttactatggtttggtgttcgaaaaacaaacaaaaataaaataaaaaaaaaaggaatgcaacacgagggcttaccaggaggtcacccatcctagtactactctcgcccaagcacgcttaacttcggagttctgaagggatccggtgctttagtgctggtatgatcgcattcgtcatatcctgcgtcctccttcctcttatgcccacacctccgtgctcggctcgcccacggcactggacatccttcctccgcacaaagtacccgaaaaacgccccttaaaacaaataaaaggtaatttaacacgagaacggtcacccatttttactgtggtttggtgttcgaaaaacaaacaaaaataaaaccaaaaaaaaaaggaatgcaacacgaggacttcccaggaggtcacccatcctactactactcttgcccaagcacgcttaactttggagttctgatgggatccgatactttagtgctggtatgatcgcatctgtcatatcatgcgtcctccttcctcttatgcccacacctccgtgctcggctcgcccacggcactggacatccttcctccgcacaaagtacccgaaaaacgccccttaaaacaaataaaagctaatttaacacgagaacggtcacccatttttactatggtttggtgttcgaaaaacaaacaaaaataaaaccaaaaaaaggaatgcaacacgaggacttcccaggaggtcacccatcctagtactactctcgcccaagcacgcttaacttcggagttctgatgggatccggtgctttagtgctggtatgatcg

SEQ ID NO: 28850 - DNA, 643 bp, Zea Mays
ccaacgtcctcctttctcttatgcccacacctccgtgctcggctcgcccacggcactgaacatcctttctccgcacaaagtacccgaaaatgcccaaaacgccccctttttttgaaaaacaaacaaaaaaaccaaaaaaaggaatgcaacatgaggacttcccaggaggtcacccatcttagtactactctcgcccaagcacgcttaaattcggggttctgattggattcggtgctttagtgctggtatgattgcatccgtcatatcctgcgtcctccttcctcttatgcccacaccttcgtgctcggctcgcccacggcactgagcatcattcctccgcacaaagtacccaaaaaatgcccaaaatgccccttttttgaaaaacaaacaaaaaaaaacaaaaaaccgaaagcaacacgaggacttcccaggaggtcactcaacctagtactactctcgcccaagcacgcttaacttcagagttctgatgggatccagtgctttagtgctggtatgatcgcatctgtcatatcctgcgtccttcttcctcttatgcccaaacctccgtgctcggctcgcccacggcactgaacatccttcctccgcacaaagtacccgaaaaaatgcccaaaacgcctctttt

SEQ ID NO: 28851 - DNA, 531 bp, Zea Mays
gcccaagcacgcttaacttcggagttctgatgggatccggtgctttagtgctggtatgatcgcatccgtcatatcatgcgtcctccttcctcttatgcccacatctttgtgctcggttcgcccacagcactgaacatccttcctccgcacaaagtacccaaaaaatgcccaaaaagccctttttttgaaaaacaaacaaaaaaacaaaaaaaaacgaatgcaacacgaggacttccgaggaggtcactcatcctaatactactctcgcccaagcacacttaacttcagaattttgatgtgatccggtgctttagtgctggtatgatcgcatccgtcatatcctgcgtcctcctttctcttatgcccacacctccgtgctcggctcgcccacggcactgaacatctttcctccacacaaagtacccgaaaaagcccaaaacgcccctttttttttgaaaaacaaaaaaaccaaaaaaaggaatgcaacacgaggacttcccaggaggccaaccatcctagtactactctcgc

SEQ ID NO: 28852 - DNA, 961 bp, Zea Mays
cgcccacggcactggacatccttcctccgcacaaagtacccgaaaaacgccccttaaaacaaataaaaggtaatttaacacgagaacggtcacccatttttactatggtttggtgttcgaaaaacaaacaaaaataaaaccaaaaaaaaaggaatgcaacacgaggacttcccaggaggtcacccatcctagtactactttcgcccaacctcgcttaacttcggagttctgatgggatccggtgctttagtgctgggtatgatcgcatccgtcatatcctgcgtcctccttcctcttatgcccacacctccgtgctcggctcgcccacggcactggacatccttcctccgcacaaagtacccgaaaaacgccccttaaaacaaataaaaggtaatttaacacgagaacggtcacccatttttactatggtttggtgttcgaaaaacaaacaaaaataaaaccaaaaaaaaaggaatgcaacacgaggacttcccaggaggtcacccatcctagtactactctcgcccaagcacgcttaacttcggagttctgatgggatccggtgctttagtgctggtatgatcgcatccgtcatatcctgcgtcctccttcctcttatgcccacacctccgtgctcggctcgcccacggcactggacatccttcctccgcacaaagtacccgaaaaacgccccttaaaacaaataaaaggtaatttaacacgagaacggtcacccatttttactatggtttggtgttcgaaaaacaaacaaaaataaaacaaaaaaaaggaatgcaacacgaggacttcccaggaggtcacccatcctagtactactctcgcccaagcacgcttaacttcggagttctgatgggatccgatgctttagtgctggtatgatcgcatccgtcatatcctgcgtcctccttcctcttatgcccacacctccgtgctcggctcg

SEQ ID NO: 28853 - DNA, 757 bp, Zea Mays
gttctcgtgttaaattaccttttatttgttttaaggggcgtttttcggttactttgtgcggaggaaggatgtccagtgccgtgggcgagccgagcacggaggtgtgggcataagaggaaggaggacacaggatatgacggatgcgatcataccagcactaaagcaccggatcccatcagaactccgaagttaagcgtgcttgggcggagtagtactaggatgggtgacctcctgggaagtcctcgtgttgcattccttttttttgttttatttttgtttgtttttcgaacaccaaaccatagtaaaaatgggtgaccgttctcgtgttaaattaccttttatttgttttaaggggcgtttttcgggtactttgtgcggaggaaggatgtccagtgtcgtgggcgatccgagcacggaggtgtgggcataagaggaaggaggacgcaggatatgacggatgcgatcataccagcactaaagcaccggatcccatcagaacttcgaagttaagcgtgctttggcgagagtagtactaggatgggtgatctcctgggaagtcctcgtgttgcattcctttttttttggttttatttttgtttgtttttcgaacaccaaaccatagtaaaaatgggtgaccgttctcgtgttaaattaccttttatttgttttaaggggcgtttttcgggtactttgtgcggaggaaggatgtccagtgccgtgggcgagccgagcacggaggtgtgggcataagaggaag

SEQ ID NO: 28854 - DNA, 554 bp, Zea Mays
gaggacgcaggatatgacggatgcgatcataccagcactaaagcaccggatcccatcagaactccgaagttaagcgtgcttgggcgagagtagtactaggatgggtgacctcctgggaagtcctcgtgttgcattccttttttttggttttatttttgtttgtttttcgaacaccaaaccatagtaaaaatgggtgaccgttctcgtgttaaattaccttttctttgttttaaggggcgtttttcgagtactttgtgcggaggaaggatgtccagtgccgtgggcgagccgagcacggaggtgtgggcataagaggaaggaggacgcaggatatgacggatgcgatcataccagcactaaagcaccggatcccatcagaactccgaagttaagcgtgcttgggcgagagtagtactaggatgggtgacctcctgggaagtcctcgtgttgcattcctttttttttggttttatttttgtttgtttttcgaacaccaaaccatagtaaaaatgggtgaccgttctcgtgttaaattaccttttatttgttttaag

SEQ ID NO: 28855 - DNA, 1058 bp, Zea Mays
ccgcctgctaatgccctctcctctccctactctctctcctctattctatctctctctcccttgctctctctctctcacgctcgcacctggagaccgagcccagccacgccccgcgtgatgccccagccgaacgccggcgcccaggcggccgagcgcgcgacgtgcaagcagccgagcgccgcgccctgcctccgcgcgcgcgcaggccgcgcctgctccccgcgtgcccgagcgccggggtcgagcgagcacccgagccggctgccgcgcgtcccatcgcgagcccgacgtccgttcgtttatgcgcgcggttacttcatcgtgttaatggagattgatttctacagtttcttcctcccctcattcctcctcccattacgagcaggaaacggtagcaccattgaagaccaccagtgaccctttcttctcccctcctgctctctataaaaggcagcagagcctccccattcctgcctactcgagtttgcctctctctagcactcctcgctcatagcaagtgctgttgccgttcgtcgccggagcccgtggagttcaccggagtgtgtcgttcgtcgccggagttcgccggagccacgtattcgccgtccgtagtcgagcccctgcttttcttcacccggccaaaacccgtcgatccatccccgtcacacgcacgaactcgaggttgatgatgacccaaattaattttatgtattttataaagtgctttttgattcgattcatgagttgtatattttgttggttgtattatgaacacatgtgattccgatttatgtatatgtgtgcgttatggaattttatgtgcgattgttagtacaccgtaatatttcatgttagtcgtggcgttgattttggtttagagaaatatgacgtagatttaatagtcacacgttggtgataaaaatactagataagaatttatagtcaaaatttggtcacgataaattttagaaactatttagagaattataggtgcattgtaaatggatttggaaaatggtatagatgtcatatgaacattatagaattttagattgatt

SEQ ID NO: 28856 - DNA, 781 bp, Zea Mays
aacgtccgttcgtttatgcgcgcggttacttcatcgtgttaatggagattgatttctacagtttcttcctcccctcattcctcctcccattacgagcaggaaacggtagcaccattgaagaccaccagtgaccctttcttctcccctcctgctctctataaaaggcagcagagcctccccattcctgcctactcgagtttgtctctctctagcactcctcgctcatagctagtgccgttgccgttcgttgccgttcgtcaccggagcccgtggaattcgccggagtgtgtcgttcgtcgccggagttcgtcggagccacgtattcgccgtccgtagtcgagcccctgcttttcttcacccggccgaaacccgtcgatccatccccgtcacacgcacgaacccgaggttgatgacgacccaaatttattttatgtattttataaagtgctttttgattcgattcatgagttgtatattttgttggttgtattatgaacacatgtgattccgatatatgtatatgtgtgcgttatggaattttatgtgcgattgttagtacaccgtaatatttcatgttagtcgtggcgttgattttggtttagagaaatatgacgtagatttaatagtcacacgttggtgataaaaatactagataagaatttatagtcaaaatttggtcacgataaattttagaaactatttagagaattataggtgcattgtaaatggatttagaaaatggtatagatgtcatatgaacattatagaattttagattgat

SEQ ID NO: 28857 - DNA, 174 bp, Zea Mays
gtccctagtgcatagcattgtttctctatttataggcgtaaggtacaacttcggtagaactacaaatatgtccttaagcctatacatttatactaatgagtaagctaaggataatactatctttctatccttgcccaacaagtcatgtgaccttgtcttgctccagccagcttc

SEQ ID NO: 28858 - DNA, 135 bp, Zea Mays
ctttcatccgctttaaagcttctttgacctctgattcttggatcctgcgtacaaagcatctatttaaatcatcaaaggagtcatccaattgggtgtccatagtctcattctcaccattgaaaagattgtcaaaat

SEQ ID NO: 28859 - DNA, 322 bp, Zea Mays
attgtacctaggcgtgagattttattacgggctggtgggctcgcaactgcagatcccggatccgatggctaggggggagcgcagatgagtaactagcgtaggtctaatcggggctatagagatctgatcggacggaaggggtttctccgtacccattcgcccaaacgcattttcatataagcccctagcaaataagtgaaacaaccagccgtccaacattattgttccctgagtctgagtacatttgcgtgttagcccctgaactccctggaatttcacgcctagtccaaagctcagggaaattagttaattaaatgtagaa

SEQ ID NO: 28860 - DNA, 362 bp, Zea Mays
gtgcattgcagatgttcgttcaccagcgaacctgcagctgccgaatttacagagaccagatgtgagcaacgacgtagggaaatagggctggtgggggcacgtgggtaacttggtcctggagcattggagaaggagcataccaaaaggaaaccaacactgtcagtcaaaaccaaatctagataatcatcatgctacttctatgttttatgtctgttttgtctgctatcaagtgttcatgcaaatgttatcaagtgttcatccatgccaagatggttactaagcgaacacacgtagcatgcagggatctaccttatcttaagtggtctccatctgattttgcttcagtatccttttagctttcc

SEQ ID NO: 28861 - DNA, 138 bp, Zea Mays
atattattgatttgttatccttgtatttatcttgaaactttgcatttatgcatctgcgcccgcccgctgcggcttatacatcaccgtgctagtgtcctgaagcccaacaactggaggcagcgctccgcctgcatcaag

SEQ ID NO: 28862 - DNA, 364 bp, Zea Mays
ggacagtggggatgtcgctgtcgagggtctgagattgtggcgctccttgcgagcggcgacaagcgcgcccttgagggccagttgcgacggtacagccaaggagaagcaacatagagcctgcgtacttgcagagctctgcatcggaggattgggcacaaatcaggggaggtgatggtggcggccgggggagggctgtcagccacctcctcgtcctcctatggcatcagagaggcaagaacagtgaatcaatcgacgagcatgaaccatgtgaggaactaaaaagcatgggaacatgatgagagagacgaatgcatgcacccatgggttgatgtcgaggaggtggccctggcgaccctcggtgaag

SEQ ID NO: 28863 - DNA, 275 bp, Zea Mays
cccaacccaaggtttggaaccctaatctcctaacccccctcttaatttattttctccctaaactccacccttaggtcatctcatcatgtgcatacacttgaaatgataggagcacctcacatagactatattcatcactcaagatcatttagaaaattattgattcaaaggaaaaagaaataaaaagaaacaaaaatagaaaatgaaaagaaaagaaatagaaaacagaaaaagaaaaagaaaaaaacctcccccctcggctgggccaattctgg

SEQ ID NO: 28864 - DNA, 803 bp, Zea Mays
tgttcttccactactaattattttgcaatctaataagaagatattagaccttaatccataaatgctaagaagaaacatacctaagcttggaggtacgtctacatagcatacacactaccagagtcacatgctttgccgagtgccccatgcactcggcaaagccagaaatgcacacagtaaaccttttgcagagtgtcaaactcggcaaagggtaaacggcaaaaaaaatcattggcaaaggcggttcaaccctatttagtcgttgtcacagtcgctgctgttgtttccagccgccactgttgtttccaggccgtgtccaacggttcaccccgttgtctctctttcctgtatattcggtgtatggacgtctagaatgtggtccagcgatatgtaacgacaccggaggaaatcaacagaaggcgggaaggaaccatggctactaggagggttcgatgtcaagtgaagcccaactctcgtgtccatgggccagattggacccaatgagtgtttaagcgttttctttttgttttggcatgtggtataaagaaaaggactttatgaacagcaaagggcggcttggggcataagttgaggccgactgcgttcagaaagggaggactcttcctttgtaacctgaatcctgaattccagtgataatttgatacttcgtgagaggtggagggtaccaggtgcggtgctcgcgatccaaatcatgtctttgtgttcatcggttctgttacctgttccatggttctgttacaattggtatcagattcctgattcgtgatcctggtgaaacatct

SEQ ID NO: 28865 - DNA, 547 bp, Zea Mays
caacaataagtaataatttcttaaataaaattttaatttgaatttacaccccaaagtaatattttcttaaaataactatatttgagtgtgtgaattgcatgtttaaaacatttgcctaaataggataataaataaatagcttgataaattataattgcatatcatactagaaattttctattgtgcatttaactcgagtttgaaattcaaaaccagatttaaattgaaatttgaaaaagaaaatagatagaatagaaatataaagaagaaaacaaaaaatgagaaaaaagaaagaaggaaaaaaaaaaccttactttggctagaacccacgccagtgcttctcctcgctgtaccgctaaccttctacggcccactaccgatttcccaccgtgcggccccttaccctctcccccactcagcccacttctgtccctccccttttccttttctccgggttcactaacagatggggcccgcccttaggccgtgtaccagcgctctgcacacctctgctctctcgcttcgtgtcgctgcagatgggtccctg

SEQ ID NO: 28866 - DNA, 595 bp, Zea Mays
cacagtttatactccatatatttctatatggaggccagctcctcattaagcgccgagccacgcataggcgccgctgccacactttaaccacagggcagcccattatggtaaatcaccttcttacctgagcgtaggtgcgtcgttgcgagtacattacatttctcagtagtcccatgtttgtatgcccatacacatccatggggtactgaatccccagaaaaataattactccacatcgcagccttcatatatacatatgggtaacatgtatataatcaagcgctttttatactctcccctagaccgacgtttgttcggtcatgctctcacatctcaccttacctgagcgtcgatccattcaaaactgaatggcctcaaaaataacaatacacatgtatgcaatacccccggttgtgggttagtggtttttaaataagccacctaatagaccttaatttagggcttaacagaggatgtcgttagcattatagtttttcaaaattgtttttcaaagccaaacaatgtgtttagttgaaaataggtttttcgaaaccaaaacttttgttttgaaaatacgtatgtgaccgtatatact

SEQ ID NO: 28867 - DNA, 250 bp, Zea Mays
atttccttccttggaactgtttaccattccttgattacctgttttatgaaaaggtttttatgatgcttagccttgcttaataaaaacaaaatgttttgtttttaacaaaagatgatgcttcaagtgggatggaatgattttcaaaaataaaacttgatggtggatccatcatggccatgatgggttcaacatcggaaaagatatacctctgccaggtaccaaactttgggttgaaattaataaagctgag

SEQ ID NO: 28868 - DNA, 906 bp, Zea Mays
gctaagcaccggagcttgacgatgtcgcggcgcagcaggaaataacaacgccaccatggccagggagacaagttcggtgacgacgtagacggttagcacggcaagcagggacaactggcgaactctggttcaggcgaacagaacgcgacatagggagcttgaggtgcgagttcacgcatccatagccgaacggcggagctgaggccaagcgccggctgtgaagaacgtcggctattacagggagtcgcggacgagggattaccatgtccggcgcagggaacagcggcgcagaagaacagagacgcgagcgaccgacgagctgggatccgacgcgcgcaggagcagagtagcccgagctggaacgcggcacggtggagtagcagtgctttggacgcgccacgggagaggggaatccgagttagggctggatgtcggcagagaggagagcagggatgcggcggccatggaagatggctgggcgagcagccatgggagcaggagaaaagcaccgcggtgagctcgagggagagaagcagagagtgagcgccacaaggaagaaagaagcaaggagggcgagcaggaaatagggagcaggagggcgcgacgactcgagttcaggtcggcgagcagggcacgactgggactcgtgcacgcacagcggcttcaagaggatcctagggcggtggctgaaacgaaacgatcaggaggaagagagagcggtgaggatagagatgcaggatattttttttttttcatatttatttttttcagaaatcaccgatatttttgagtcccgatttctagcgcataataaggatcgacgcgctacacgaatacacatgacatgcttcggatatagcaaaccaatttaatcgctaattacttatattcaaagattcgaatccg

SEQ ID NO: 28869 - DNA, 396 bp, Zea Mays
tctcacctcaacctcacgcacaacacaaactcaagcggtcaagcactcaagccagaagcaccagccgccgcacgcatcttcgccagaaagcagaaagctcctgtccttctcctcgtcggcatacggcgtcgagctgccgtcctgccgccccagccacctgtcgctgccgcactgccgccccagccacctgccgcactgccctgctcctcgtcggcgtacaactgccgaagtgccgaccctgctcctcgtcggcgtccgacgtcccttgctttgagcagtagcagcactgctgcacgcctgagcagccagcaagcagtagcaatattattgttgtaatgctatttttgttctttgcttgctggctgcccaacagtccaagtttgtgtaataagagac

SEQ ID NO: 28870 - DNA, 744 bp, Zea Mays
cccggcccgcagcgggcctaaacgggccgggccgtttagcacgaaaaaaaacgggccgaaaagcgggctaaacgggccggtaagcacgtttagtgtaaaaaaacgggcttaacgggcttagaggtaaacgggtcgtgccgggctagcccaccgtgcctagtttcctgtccaagcccgcccgcttattctaccgtgccgggctcgaaccgggcccaaaaagcgggcttcgtaccgggctcacgtgcctcgtgctttttggccatctatacatgggaccacttcgcgtcgggtggccatggctagcttgtagggagagaaggagcggcgggaggccgagaggaagatgacgtgcgctgcgccgtcagattttagagtaacggctcggataacccccagggataacgtttcagtggattagatcacggtcgtccgattctaatcctgcgtaggttatgctttggcgccgttttaaaatcatgaccgtccgatcgggatcggacagtccggattacataccggttcagtaaatacttcaatctatttgcagccgtccgatgatgatccaacagcccacagttgtcgataccccttcgaccagccttatttcaaaagagaccctaagaaattaaataattaacccgcagtcttctctaggtgttcactgagtctaggaaaacttgcgagatagcccctgcactttccagaaattggcgcgcagtccagagggagataaaaatagagaaa

SEQ ID NO: 28871 - DNA, 356 bp, Zea Mays
atcacatcccctgttttgcgatcctgtacaaaataagacgagtcatcaaatccaacaaaacaattgtgatcggtaatttgaccaactgatagtagatccatggataactgaggtacaaaaaatatatttgggacagtaaaagttggatcagaaagagaacctttgtgggtgacatgacataatgtaccatcagcattctgaacagaagtaccctcggtgacaggtgtagtagacgccaaccgtgactgatcagatgtcatatgaaaggaagctccagaatcaagaacccaggatgatgacaaagcaccagcagattaagtagcagcaaccgcaactgagcctctaggagatggtcc

SEQ ID NO: 28872 - DNA, 485 bp, Zea Mays
gtgggaggtggtggctaccggcggaaggctcctccaatggcagatgggtggcgttgcagtccatgtcctcggtggcggagtggacttgcgaggtacatgccaaggtggaggagcacccggcctcggatgctaggcgttgcctgtgggtgcggggttgcagcaggccttatcggcgcaacaacagtcgcagcaactaatgttgtacacggtgcacgggcgtgctactagctacgagaccaagtgggatgagctgcacccgatttcctaggctgcaccctctgcattcttgcctgatgttctacttctgcagcttgagacttgagagattggtgatagaggcgtttcattatttgtttctctttagcgaataggagacgcactgtgttgttgcaatcagaattgtgggctttcttgtggcatattttgctcttgatttcattagtacgatggtgaatggagggcacattgtgatttttagatcagaa

SEQ ID NO: 28873 - DNA, 381 bp, Zea Mays
ccttgggttgatgcgtcggagactcggattacgaggaccacgtatccaagcgaccccgcagcggcgcttgaaccacgacgagcaatcgtcactgatctgaccacccttgagcccacgggatccaacgcaaacctttcctgagaacctcccttccatccaatcttgccacgaaggttggagcgatggtgaagcgcgtgttcgacgtcggcggcactccttcacacacacggcatcgttaatggtggttcacgggcccgactcggtatggctctgtgctggtggacgaaaggcactctactgtcgaatttgatagccacaaggagagggtgggtgaggttttagtgaagaaactagatgggatttggagatcagacagtgtcg

SEQ ID NO: 28874 - DNA, 198 bp, Zea Mays
accttggattctccccctttccttcctcccttcttccctccaccgaaaacaattggagatttgcaccacgcgacgtagatccgagcggcaaggaatggcaccttgagaggaggagatggggggctagggttaggtggtgtggctgcaagggtttgagggaggaggagatgggaggggggcggcggccaaaggttaggg

SEQ ID NO: 28875 - DNA, 583 bp, Zea Mays
gagaagaaacggcgctggccgttaatggcgcttaatggaggaggcgactgttatggagaaggggaagaaacaacggctgctccactagtgggcgtcgtggggagccagagagccggtcggctgctataatcccttcggcgaaatgtttgatgtccatgcggtgtgcggctgagaagaaatattaggcgtgagggaagaaaggactgtgcgatgggccccactgtgcagagagaataggactataggagagagagcacggttcggcaagggaaaaaactgagcaagagctcggcaagggaattcatcattttttttcttttttttaaatagatgtgtgtgcgtgagtgtgtttgcgttttgttttttttttctttttcttttcgaatttatttttatggtaacaatatatatacatatatatacactgtagaaaaaaactcccaaaataatattaacacaaataaatatctgttttgtagaagaatattgttttaggaagaattctatttttaataaaagatctccaccacaagaaaataaaaatggagtttttgcaagcactatcatttgaaaagttattaac

SEQ ID NO: 28876 - DNA, 626 bp, Zea Mays
ctccactagtgggcgtcgtggggagccagagagccggtcggctgctataatcccttcggcgaaatgtttgatgtccatgcggtgtgcggctgagaagaaatattaggcgtgagggaagaaaggactgtgcgatgggccccactgtgcagagagaataggactataggagagagagcacggttcggcaagggaaaaaactgagcaagagctcggcaagggaattcatcattttttttcttttttttaaatagatgtgtgtgcgtgagtgtgtttgcgttttgtttttttttctttttcttttcgaatttatttttatggtaacaatatatatacatatatatatacactgtagaaaaaaactcccaaaataatattaacacaaataaatatctgttttgtagaagaatattgttttaggaagaattctatttttaataaaagatctccaccacaagaaaataaaaatggagtttttgcaagcactatcatttgaaaagttattaacataataaaatacatattacaatagtagtattttattattttatagaacgagatttacttcatatcaaaaattgtatttgcaaatcaattcaaccaaaatttatgctccagcatgaatgctt

SEQ ID NO: 28877 - DNA, 168 bp, Zea Mays
gggatcgataccccacatctccattaaataataattttctttttgtttgggcttcggttagctcacctgcactcgagccttctcttgatttcttgaactctgtcaaatgtagtgccttgctacgcgtttaattttaaatagctttcatatttactaaacggatcattt

SEQ ID NO: 28878 - DNA, 115 bp, Zea Mays
tggctgacttactgatgcatgttcatgtaaggaagcagaagcatcagatgagtctgaatcattgggtactgatgcatgatcatgtgaggaccaattcaaatcagcataaaaggaa

SEQ ID NO: 28879 - DNA, 1392 bp, Zea Mays
aaacaattatttattattattaggtataaacaggaatatcattgaattacaagtgtaccttcaactggaaggagatgatattacaagcgtgacgtaaaaagcgaatgccaagtcagcgtgaacagtacgggagtactgttcacctatttataggcgcgggacacaacccatacaaaattacattcatgccctttacagttgataataattctatagtaatctgtcgaggtctaaatagccttttcatctttaagtcggtttcactttctgctgtcacgccgaagcttccctgctcacaccttcggcgctgtatcaaccttcgtattattctggtctactgtggtgccgacttgagtccgaagatacctgttcacacattatactccagaaatactgttaaatcctgtttttgaggaccttcggatgccgaaggtccccaacagcattgctttgaaatatgacttcacaaacaagataatattgaagtggttgggtcttagttggtgagatccaagatccaactgatgtagcctctctcctcccttggtctataaaagaggagagcacagtaatgttcgagagatttgatttggaattccataagctttcactcataagggattttttattcttggttagagactctcgttcacaatatctaaggttaggcataaaggtgaattaggactaatatgctagaactcctatcataattgattggaaaggaggaggtaggatgtcatggcactcaattaaatcttgagctcgcaatcttctttacttttgtgttcacctatcgataagtaacaataggacataagatattatatgcacgctatggcctgaacctctttaaaattgtcagtgtgctagttccctattaggggatgacaattggtatgaaacttgtggtacacgggttagaaaccggtactcactaaacccgcactcacatctattaccccgtgacgagtacaatatatttaggcactcgcacgtcgcacccgctactctcatatacaccgagggcaaataattagacatatttgacacacacatagacaacatgtctagtgtaaaaaagattaaattgctaacatgttgacatcaaattttgtccaccagattcatcatctacagatgagtacaatttcacttgttctgacactgttttaaaccagcttgggttattcgtgctgggctgggcacgagctactactccaatgcacgcgttgtgcagctgggctatgggtgccacttgtgcacaagctgccagcggcttttcgccgcggccagcccagccttgaattcctggagagcctgcctggaggcccgtgcccggctccctcccgctcgctctccccagttgcgctccagctcagcagctcaggc

SEQ ID NO: 28880 - DNA, 507 bp, Zea Mays
aaggaccaccacacgattggtgtctcttgcttcgcttacaaggctttgagaataagaatgagagaaagaagaaagccaaccaagcaacaagagcaacaaagaaacacaagaacgatcctctcttaagtcctaaagcactagaattgaattggagactttgattggatcggtggctttgatttgtgtcttggagtgttgcactttgctcttgtattgaatgaagtgtggtgaatgcttggatggttggagtggaggtagttgatgggtatttatagccctcaaccaccaaacaaccgttggggaggggctgctgtcgatgggcgcaccggacagtccggtgcgccaccagacactgtcgggtgcgctagccacgtcacccaactaaccgttagggttcgggcgcagacgaccgttggaggctttgtcttctagtggcaccggacaggtactgttcattgtccggtgcgcctctgacggctgctctgctctgccgcgcactgtttgcgc

SEQ ID NO: 28881 - DNA, 370 bp, Zea Mays
tctttttcggtcaagatctgacgttttcagatcatgcagcaattaaggagttctgcggagaggcgagagcttactcacgaaaaatggagaaacatatcttggccttgtatttgcagtagtggtgacagtgctctggccggagcccgagctcctccacgatgtcggcgatagggagtggctgacgggatgtagatgtccgtcgacaccagcgatgccacatccggccagatcgtctggcttggcattggcatctcaagcagcagcggcggcgagacgacgacgctgaatttcacgagacggtttggtttgggcaccgtcgatcgcggtgaatttggcgcgcaaggaaagctcgctcacgcgcaaaccagag

SEQ ID NO: 28882 - DNA, 912 bp, Zea Mays
agcaaaccctagccgtcgagctcatagggagtcatggagggatgaagagcctgttcaagagtaagatctggtggccgcatcggtccaacgaccccacgttgaaagtcgcctagagggggggtgaatagggcgaaactgaaatttacaaatataaacacaactacaagccggggttagcgttagtaataaagaaacgagtccgcaagagagggcgcaaaacaaatcccaagcgaataagcaagtgagacacggagatttgttttaccgaggttcggttcttgccaacctactccccgttgaggaggccacaaaggtcgggtctctttcaacccttccctctctcaaacgatccacggatcgagtgagctttcttttctcaatcacttggaacacaaagttcccacaagtaccaccacaagattggtgtctcttgcctcaattacaagtgagtttgattgcaaagaatggatcaagaaagaagaaagcaatccaagcacaagagctcgaaagaacacaagcaaatcactctctctagtcactatggcgttgtgtggagattggagaggatttgatctctttggtgtgtctagatttgaatgctagagctcttgtagtagttgggaagtggaaaacttggatgcaatgaatggtggggtggttggggtatttatagccccaaccaccaaaagtgtccgttgggaggctgtctgctcgatggcgcaccggacagtccggtgcccctgccacgtcatcacttccgttggattctagccgttggagcttctgacttgtgggcccgcctgggtgtccggtgcacaccggacagctactgttccttgtccggtatgccagtatgggcgcgcctgacttctgcgcgcgcagaacgcgcattaaatgcgcggcagagagccg

SEQ ID NO: 28883 - DNA, 196 bp, Zea Mays
atagggtttgcgcaactagacaccaaacaacaaattctttttgacacaacaagtgcataaggagacttgggtcggtctagcggtcaagctgtgggggtctctaaactgtgcaggtgcaatttcaagtgtaaaacacacaaggctagaaacaccaaaacaagcacgtgatttgatttttttaagggctttactcggg

SEQ ID NO: 28884 - DNA, 186 bp, Zea Mays
aggaatcctacatttatgacctttttaagagataggagacctaagacaaaaattgaaactattttctctattaaaaaaatgttggttgattgttctgatgataactgcttgatttgcttctttgattgattgaaacattatagttgggcatcttagcatgtaccactataaggtaatgtattagct

SEQ ID NO: 28885 - DNA, 130 bp, Zea Mays
ctcactactactactagctactcatcgaccaatctccacgtgcatcgttccacagcttgcagcgcggcttgttgacagttgacacacacacacacacagagagagagagagagagagagagagagaaaag

SEQ ID NO: 28886 - DNA, 203 bp, Zea Mays
agaatcatcacatacataatatataccacaaatctcaccaatttttcacaaatataagtactatcacaaacataagtatcacaaagaccacaaatctcacaagttcaaaccaattttcacaaacatgagtattaccgtacccacacaaacataagtatctcaagtttgaaactacaaatgtctcacaagcacaactaagagat

SEQ ID NO: 28887 - DNA, 160 bp, Zea Mays
gaaatatgtgctgcaattttctatgtcatgtgttgtgttcaggtctttttcaattagctaaaatttagcctttgcgtttccacctcaagtttggtgctatgtaacttgagatctgtttagggttagctagtagctgttgtaacaaagatggagagagatt

SEQ ID NO: 28888 - DNA, 336 bp, Zea Mays
cagaacgtgtcctccgcactgttaacaacatcgtccgttccctactctttcaagctcaccttcctgctccttattgggttgaggctcttcacaccgccacatatcttctcaatctccaccccaccagcaccctaaattcctccactccccatcttgccctctttggtcgccccccatcttacgaccatctccgtgtctttggctgtaagtgctatcccaacatctctgccactgccgcccataaactcgctccacgctccaccatgtgtgtctttcttggttactcgtctgaacacaaaggctaccgttgtcttgatatctccaccaatcgtatca

SEQ ID NO: 28889 - DNA, 747 bp, Zea Mays
ctcacaaaattaattaattgcacacgccatagtttagtgtgacgctacaatttcccaagataaatattttggtctcaacccaaataaaatattgtatcacacactaagtgtatctataaatgataaaagatgtcgattcatggcaaaatacatttgtactaacgagcaggctaaaggtaaggcttatcttttcttccccgtatccttgctgaacaagtcatgatgacctcgtcttgatccggccagcttcttcaccttgtgcatgcttcaataatacgaaactcttagcttcatctctacaattatgatggatgtacaatgtatctggacgaaggtgtccttcgatatcagtctaactacacttaaaacatactaaaaataactggttagttaatattttgaggaccttcggctaaagagggacctcaacactatatatttgttattggaataggtagtgcataacactaccggctagtggcttaaactggtcgtgctaaccatttttggtgccggttcaagaggtttacaatcattatttgtgttggtatttctaaaaccagaagataacatattattatttcaatttaaccaatagtggtagcatattatatggtggctcacgagctaaataagccagatcgaactaggaacctatattgtctatccctgtaacacaaataacaatgagtaccttctatggtataagagtggatatacaccacatattcagttttattttatcaa

SEQ ID NO: 28890 - DNA, 249 bp, Zea Mays
ttaaatgaaaattcacataaataatataataagtattagtccaagaatttatattttatttatatataatttcggtttgattattataaattttatgattatttgaataggtatttcgaaattagaaaaaaaaaacaaaaaaaacccctaaactaaaccggcccaccagggcccatgtaaggccggccgcgccatgccccttccctaaccctaagccgccgcgcgccctgtagccagccgccgcttgct

SEQ ID NO: 28891 - DNA, 118 bp, Zea Mays
tatcgatcacgtttcctgtacagaccttcccactgttgtccgaatccttccttccatccttccttagacgagattccttgtacacggccaggaaacgtgaaaaagagagggaatagac

SEQ ID NO: 28892 - DNA, 469 bp, Zea Mays
aaaaaaatacagttagtttattaatggtaattatggtaataaatttttctttttagtgtttgttatttatttcatttggaataatttttgaatgttcatgtttgatttttggatatttaatagcatttcttcttaaataaaaattcacataaataatataataattattagtccaaaaataaatatttcatttataaataattttggtataattattatgaattttagggttatttaaaatatgtttttgaaattagaaaataaaaaagaaaaaaagaaaaaaaaggaaaacctaactaaacgctaaccttaaagcccactaggggcccatgaagagtcggctgccacctactccctcttccccctgcctcccgtgctgaccgccgccgccccctggttccttctccctccctcttctctctcagtgggccccacccggccttccctgtcccacgccgccccagccgag

SEQ ID NO: 28893 - DNA, 80 bp, Zea Mays
ttcctcgattcatacagagcacacaattaatttatttcatccagtattacatctgacaagagctgcttcgagtgagattg

SEQ ID NO: 28894 - DNA, 385 bp, Zea Mays
ctttgtatgcgcatggttgattattggatgtttaatatcaattctttttaaaagaaaattctagtgaataatataataattaaataatatagtaattattagtctaaaaacaagtattttatttataaataattttggtgaatttttatgaatttttgagctatctaaaagttatattttcggaattagaaaaaaaaacaaaaacaaaaaaatctcctaaccctaaccggcccactaggggcccatctattcctagctacgcgcgcgcgcctgctctcaccctgaagccgccgttgtcgcctgtgttcctgctctcttccctctctctctcccctatctctctcctctcatctctcctctctctgttcttctctctcgttcgcgc

SEQ ID NO: 28895 - DNA, 806 bp, Zea Mays
ccaaaatgtggtgcaagtaggtacaagacgaataaatactatcgatagaaagagtgtgttgcatctgtgtttaaagggaaaaagcgaaagaaaacccaaaagaagacccaacaaagttcaaaccccacgagcaaagaaaaagaagtagattattatgcgctcaaaaatatttctgctttggtgatgtggtacctccccgtcgttgatcgattgaggtgtttgttagctaaccctgagaatgccaaacttatgagttggcatgcttctgatgagcacaaaaatgattgaaagcttcaacatccagccttatgtggtgccacaagcaaccatccgagacatgtcctgtgtgagttctatgtgtgcgagttcatgagacaaaacggacgatacatcacaaaccctagccaggtattattagtaatagtcatgtatgtatttatgtcatttaagatgcaaatgtgttatcgattgcaaatatattatgtttataaactttctttatataattttcaacgaggaaagccggagaacatggccaaaggtgcattgtatggcataattgaggatctatacacattcatattgaaagaggtcattcccgttgaaggaaaatatcatgatgctaccagtacattagctaggtcggtgtttagagtactcacagaaattagtagactatatattagtcaagatagttattagagtttaggtgaaaattttgatgtataaaatgtgtgatggttgtaaacacaagactttgatgtatataaatgtatgatagaatttaatttaatgttgctttcaat

SEQ ID NO: 28896 - DNA, 342 bp, Zea Mays
aaaaataataatattaataaaggtgcactttatggaattgagaacaatatttaaaaaaataggggattaacattatgcaacacaaaataaatttataaataaataaatttaacacattttgaacatgttcaaattttattttgaatctgaggataaatttggcataaggtttgaaattaaatttgaatttaaagttgaaagaaagaagagagaagaaaagaaaaaaaataaaaaaagagggactcgccatgtgctacctgggccgcttcatccctcgcggcccatccccctcgattccgcacaacccacttcctttcactttgcatcatgtgctggcccatc

SEQ ID NO: 28897 - DNA, 507 bp, Zea Mays
ccaagggtcaccccggccgcagccatgcacgtacgcccctcccggcggcctcctgttctagctagagagtagagattatatgcgtgtctgtttatgtgatgttcatatatggtccagagagctcaacgtacgatcgagaggcactttatttatttatttatttatttatttacttatttatttatttgactctttattacgtacgtcgtctatagtatatattcttttgggtgctgcactgaaaccgatgtcgatttggatactggatacttccatggttctacttctaggcaaaaaaaaaaaaagaaaaaaaatcagatgcatgcgaacactctggtcccctctagacaatacctttacctacagtaacgacatagtatgcatgtattccgcctgcaaatacaacatctgtatagacgacacccagtgtaaaacacacaagcctttcatccttgtactttgtgggacacaaaaacccaataccttagactgtctccagcaacgtcc

SEQ ID NO: 28898 - DNA, 151 bp, Zea Mays
ccatgacctattttactattttaaattctgaattttaagtataagactatgttttatatatcaattcagttctaacatgtgttagtgtgtctaaattcaatatttagactgcaaattgtactatgtattgtacatacttgtctgtttttaa

SEQ ID NO: 28899 - DNA, 229 bp, Zea Mays
gtctcatatgtgcgctaaggaagaacatcacatataatgacatagtgtatagacataaatgtcataaatgtaattattacatagcggaagtcttacaaaataaatggtaataataaagcgaactaattattatttccctggcgccacaaagctgactgggagacgccacctagatcaactcgtaagcttcattgtagggtggctcctcttcaaacacctgctcttcacc

SEQ ID NO: 28900 - DNA, 155 bp, Zea Mays
tccaatgctagattagaaggagcttgatttgttgatgttttatttcaaagaatgtttacgatggatgattgtttttttcgatttgtaaggccgtatgtaagagattgcaaaaggctggaacattttgtttccataatcaaaaaaagtaatgcttg

SEQ ID NO: 28901 - DNA, 419 bp, Zea Mays
gggcacatcacttaaaccaataaatgactaacaaaggacatcactaaatcttgcatcatgctgagttttatttgatcatgcatttgtgattgataaaataaatgtgtcattaacaatatatcagtggacccatgggatttaacctctaacttgaaaacaaaccatgaaaatagaggatagaaagagatattacccgatataaaataataatataattagataacttcatcacatgatggtgtgaccaaattacttagttaacacgaattcgaatttgcactcaagttggattcagaatttaaagttcaaagggattagaaataaaagaagaagaaaatagaaagaaaaaaaaaagaaaaaaaaaaggaaaacctcacctgggccgcagaacagcatttcagcccaatacacaaactcac

SEQ ID NO: 28902 - DNA, 771 bp, Zea Mays
tgggccgctggattgggatctaatggcccgtattcaatgagcgaaggggtatgactcatttaatcgaggacgcacatcgaaaaccgacggtcgagggcgccccatccatggatctaattacaaccctcaatcccgagatggacggcgcagagggcttcttctttcaccagtcgaccactgcggcgaacgctgaacagcggcaacgccattactggcaacacccttccccgcgcttcccctggtgctcccccacccgtgcactgttctacggacagattcgagcgaggcaaacgcgacagtgtggaacgtaccggtgattggtgtcttcttcacccacgacgagcgcggactgcggcgcacccacaccatccctgcggcacgaagcctggtgatcagtggacgcggccctcacacggtgaggccaaggagtctcctcgaggcatcaagcaaagccctcgggcatggcatcgaggacgaggaggtgatggacgcaggttctgctacggcggcgagctccatcctttttgtgttagcaccctctagaagcctatagagcagggaagaggggaagcagtagagattggagacgtggggaagaagaaggtctcgtgacggcaaccagttgatattccgttcattaattattcgatgtccctttacaaaaccacggcacatgtttatatcgtcacacggtcggcccaccaggctctacggtcggcccaccaggctctaaatacacgacccaatcggcccacttgctcgccagttgct

SEQ ID NO: 28903 - DNA, 333 bp, Zea Mays
ctttgatgccctcctttgggttgatggaaacctttgcttggtagctgcaatggctggtcctcccttttcttgattttcttgctagtgtgcatgcattggagggattcctgatctctctctctctctctgtctccatgtttgatcgaagcgccatggtaaatgcaagcccagataaagagacaaatggatttgtaataatgccaccgaattgatcatcaaatcttccatcgcaagcatgtgtcgccactcaacttaattagaccataaactatatatagggatatatctcggtccatgaaggcacatgcatcatctatcatatgcccaagtgat

SEQ ID NO: 28904 - DNA, 1693 bp, Zea Mays
ctacaactaaacaggatagggactaaaatttagtccctagactaaactttagtctaatggaaccgaacggagccttagtagatcttagatatttaacgatgctatattttcagtgttagaaaatggtactaatgaaaacggtccttcgtgaccattttcatcaaaaaatagagatcgtatggagagggttttatacctgacccattaatattttcatgtcatacgtcacattttttaaatttcggtcgagaccattttttttcttgtaaaatctataggagttagttgttcatggatgttttttctgtaaaatggtggctcgtatgtcctttgataattatcgagaggcttatatatatgttttcttgtcatatattataaacttgttttttttgtggagaccatttcttcgtgaaaacattataggtgtcatcatttgttagtgttgaaaacagtcgttggtaaccatttaaaaaaatagggatatatgaccattcatcatcgacaaggtgctcttatacattactccacacatattttgttgtcatacatcacattctgagatattttgtggaggtcattttttcgtgaaaaatacataagtgttatcctttggtactaaaaacagccattcttgtccattttggtcaaaattaggttaacatgcccattatcattgacgaaagtctcaaacaccttaccacacacatgtttccttatcataaatcatatttttagatttttggtggagatgtgaaaaattcatagtggttagcctttggtattaccgaaagcgaccgtttatggacattttcattaaaaataggggtcgtcgtatggtaattgatcatcaacgataatcccaagcaccttgctctacacatgttttcttgctataaatcacattcttagatttttggtagagattatttttacatgaaaaattcatgggcgttgaccttcggtagtaacaaaaacggtcgtttatggtcattttcttttaaaataaggatcatgtgaacattgatgaccgagcaaatacttctatacattatctcacatatgtattcttgccatggatcatatttctaaatttttctagtagatatcatttgttgtttataaaattataggtgttagcctttatattactgaaaacggtcgttaatggctatattttttaaaaaaatatgggtcttcgtttatttaccattgatcagatgcttctatactctatcctacgtatgtttccttcttaaattttctggtggaaatatttctcggtggaaaattcatatgtggtctttgaaggtgtttgttaagtttgaggctatgtacggaggtttatggaggtaggtaaacgaacgagggtctggtgtaaattaaaagagagaagaagatgcagagtttccgtctcagattcccgctaccaaacactaggaaaccgggggactgaaacgggcggcagatgctccaaaatctcatcagattggaagcacgaggaaggggggtcgtgtggttgtatgtattgtgttacaatattttgtgaccaatccaaggggctcgacgaacatatccccaagggacacaccccttggggatgacccctgtgttattgtatataagtctgtcttccctgcaataaagtgaacacaactgtcatttgcactattctctcgaatctcgtttttac

SEQ ID NO: 28905 - DNA, 760 bp, Zea Mays
gattgacaaaccaaactggctttgctctttcatcatctacgtaaacctagctagtgttgttaacccaagtgccatgttggtggtgctcactgccaggggcggcgccaggggcttttgttggggtcagctgacccctataaaatttggaaaatactatacaaatatattgttatctagtgcatttcgatgatgattagtgaaactgaccccaataactttattgtctggcttcgccctgctcactgctcaccctcccccagctcagggctgctcagggacagggagtcagtcagctgggaagtgggaacggaggagaagaggcgacacgaagacgacgagatgggtgtgactgtcagtcatgggagcacacgaccaacacgcggactctgatgcaccgagccgcgtcgcagacaggtggggccggtgctcgcccggcagcgacacgacaggagactgctgcagaagcccgcgcgattcgcggggactttctcctttattactgtactacctggcgctgcccgtaggaattaaggctctgctatgctaggtagtatcactcaccagtgtcccccctttttacctttgcctcattaccctgtctcttttccctccttttttttttctccggttcatccccaaggttcctacagcatgaaagatggagtgaatataaaaacaataccaactttgataaaaatacactaatatttatagcacatatctattattagtattagtattgcatgtatggtacattaat

SEQ ID NO: 28906 - DNA, 74 bp, Zea Mays
agtagggatttcaagacctgaacatggccgatcatgagcggttttcttgagccataaccagagatacatgaatc

SEQ ID NO: 28907 - DNA, 1064 bp, Zea Mays
gagattatgttactcttttgcagttgcgactgagtcaccacatgcggtgtttgtctctcgatacgataaattcaatagaattttctcctaagctatttaaaggacaactatggctacaattcaagatataggactctctgcggctatcaacataatgggtgctgtagtgttcctagttgcatttgctttccttcgactgcagccaatcaatgatagggtttacttcccaaaatggtacctcaaaggtgcaagagagagtccaagtcatgggggtacatttgtccggaagtttgtcaatttggacatgcgttcatacttgaaatttttaagttgggtgcctgctgctctcaaaatgcctgaggatgagttgattagccatgctggtctggattcagctgtgtatctgaggatttacttggtcggacttaaaatatttgctccaatctcagttctagctttcattgttcttgtccctgttaattggaccaatgatactctgcaattctcaaagttagagcacagcaatgttgataagctttcaatatcaaacataccagttggatcaaaaaggtttatagcccacttggcaatggcgtatgttttcacattttggacctgctatgtactattacgtgagtatgaagtagttgcaaagatgagactgcgatttctttcatcagagaaacgcagaccagatcagttcacggtccttgtgcggaatataccgcctgatccagatgaatcaattagtgagcttgtggaacatttctttcttgtgaatcatcctggtcactatctgacacatcaggtggtttacaatgcaaataaacttgctaaattggtgaaagagaaagcaaagatgcataattggcttgactactatcagctgagatttgaaaggaatgcatctaaacggcctactactaagactggttttcttggttgttttggtacgaaggtggatgccattgaatactacacatcagaaattgagaggatagaaagtgaattttttagtgatataaaatgtggaggctcccacataagggaggcaggctgttttg

SEQ ID NO: 28908 - DNA, 2915 bp, Zea Mays
ccatgagtatccgggacaggtgccaatagctgaaatctctccacggatcgattctcctccctgccgcgcatgcgcgtcaatggcgccgccagtcgccggcgtcgtgcgtcttgccgcggcctcccgcgtattagttctgtccctctacctgctcgcccgcctcctcttgcgcccctacgacacctccgctactctccacccaccctgcctctcctctttctcctcttccccggatcccaacacgcccgtctccgccgctatctcgtcgctggccgtgtgggacggtgtccacttcgcccgccccgctgagtgcggctacgagtacgagcagtccttcgccttcctcccactcctccccgcctccctcgtgctcctcgcacgatcgttgttcgcgccgctagtaccgatactagggtacagggccgtgctcgtgctctccggctatgtcctcaacaacgtcgcattcgttgctgctgcggcctacttctacagattgtctgtgctgattttgaaggaccagaaagctgcttaccgagcatctgttctgttttgtttcaaccctgcttctgtgttctactcatcattgtattcagaaagtctttatgcacttttttctcttaggggcatcttctacgtgttttccggccttgctacaagcatatgatgctactgtacaaaagaaaaggcccttgttggcaattcaggcccttgtggctggagctttgcgctccattttcatatttctacctttctttgctttccaagcatatggatatttgaacatatgtgtacatgggagctcagacgaattgaggccatggtgcaaagcaaaagttcccctattgtatggcttcatccaaagccactactggggagttggtttcttgaggtacttccaagtgaagcagctgccgaactttctcttggcctcaccagtgctttctctcgcggtttattctattgtccattacgcaaaactgcttcaccggtgtttccagagaactagcgtccacaagcagattatcactgctctagagaaaaggccagttgtgtcgtatagaagatcagatgacgcgacaattttgagtgaacctcctgctggactcaccaagaaagcacaagggagctctaaggctaaacagagaaaaccagttgctaccgagatagctcctgcgacattccatgacagtaccacgccagctaaccaaaacatcgaagaggatcaggacgcgtgctccatactactactcccattcgttctgcatctgggccttcatggcattcacagccttgttcgtgatgcacgtccaggtgtccacacggttcctatccgctagccccgcggtttactgggctgccgcgcacgttctggcttctccgagccgcgccaacagacgatggggctacctgatctgtgtctatttcatcgcgtacattcttctaggtagcctgctcttctccaacttctaccctttcacgtaacgtaagaacggcggagtgggggggtgtccccggatgcgttatccagtagcgagccactcccgcagtggatggctcatctgtttatcaggtggattatctcgaccagctttgcctgaaggtttccctaggttggtaggtgcttcactggttcagtaattgagcgttggctactcgaatcgcttggaatctgcttgcattcggttatgatgtggccacgagctttttcatatgttttcttagaatcagaagttggagagcagaagacataataacatcagtcccaactcccaactcggaagatcacaaacttgttcttctcagagcaacatgtatgcaaacatcttgggggggtcgatcttctccaattattcaaatgccactatctatctccatttgacgaaataacgccgctggtttcaattggtggttggttcgttttcgtccacagactatccgaagactagtgtgtgtgtgtgtgtgggtccaggacgacgaagagtggtgcccatcgttgtccgttagctagccagcagcgtcgccatcgacttgttgatataaataatcaactgatagtgactccgatccaacaaacgctcatcaggtatatagctatagtttgtgtgcatcgacgaggacgacgaactggcctgatatttccgtgcatgccattgccaaaaaatggtcatttgaaatcgcgacgtcctgctagggaagttgcacgtactcagcctaccgctgcatgctgccaggaaccgatgtgggatgatggttagtttagttctcgttgctgctagttcttacagtacttgtgttagtggtgtgagctgcatcttttctttctttttttttgtttcttcgatgatcaagttggcgtggtggcgctcgatgaccgatcgatgcacatcagcacatgcacctaattctaattcgttatctgaccaccctagctaggcaacaagagcagtgtcggtcgttatcgagcgctctcgacaggtgcacccagatgaaacacgaaacattggaatccgatgcaggggaaatcaaaagctgcaattgtcaattgaactacaccaccacaccgatctatatagagttcctctaaacggccgggtgcatctgatgctttgtttctcgtgccaaattatttagataatgcaacgaaccttctcgtcgtaacttattgtcaaaatcgtcccctcagctcttgtccggttcgccgaagcaagcttcctaagcacatatctccgactccgattccctaaaataggcttcaagcacccgaaaacgttaacctagctaagaatcctgggccaagactcgcaccaacagaatcaaacatagaatgatatatttataaaaaaacactgataagtttatttaatatttatatttaaatggaatacaaatacacgtcgtatctatattttgaccgc

SEQ ID NO: 28909 - DNA, 3135 bp, Zea Mays
gccacccaccctaaccctagatccgctttggtctctggaatctggaagtcaccggatccacaactcgcccctctggccgcctccgtcctccgccttatcggccgccgcctcctccttcgtcagtcgcatgtctctcgaggacgagaagcctttcttcgtcgtcgctgtcgtccccaactgggtgatgctagagcgcgtcgtcttccgcagggacgacgagtccttctcggacggaagcgaggccatcgtggcgaccgaccggcatcgcgtcctgtttcgcgtcggcaccatgatgttcgcaagtctggttcaggaattcttcatctacagcacctcaggtgccgacacttcctcttcgctgactgcgctcccgccttgtgccgagcctgacatggattgtagccgccgtgagggccgcctacctcgtaaacgtgcttctcggggatgacgcctactggcggtcaggtccatgggcctcctgtgccgaggcgaagaagagttcgcggtggtagagctgtaggtttacaagcacaactgctacatggcctttgctgacatctacttgttcctgaaatcagctggcaaatgagactccatgcgtttgcccatcctctgcagcaccgaccccaatgtgatctggcaactttgcttatggcagaccgacacggttatcctggtcgaccgctggctttgctgggttgactatgagcgaggcatccttttctacgatatgtttggggagcccagccctactgttatcttcagccagttccctctggacaagttccctgacaacaacactcgcaacaaggactgctgctggttgtaccgcagcatgtcgaccacccgtgaggggggtgcgctcctgttcaccaacggctggtgctggcttcactatcaggtgccactccctcatgttatgcaacatcacggagccgaacacggttgggtgtgtatgggaagaggactacacggtcacctccgatgagctttggtctgccaaccctgagtgcctaccgcatgacattctcatgttcccccaagctgacatggacaggccacatgtagtgcactttgtcatcagcgagttcggatacgtgagaaagaatatgtagctggtcaccattgacatgagcaccaggagagtggagtcattttctcagtataccaatgggaggcagtatgccattggaaccgagggcgcttacttgaccaaaataaggtccggctgtcccatgtccttcctcccctctgagttctccaagtacctctgttaggttggtgcacaagttgtgtactcgaaatatgcaggcacagaattgaaattcaatgacgccgaccatctcattttgaaataagatgacataattggtattcttgacagtgatgatgtgaaggatatgaaaccaccgaatgatcgcattctgattaaggttgctgctggtggtttgctattgacgcaggcaactaaggagaaaccttctgttggatcagtgagtattttaggtttagtatatgctggatttgcagtaatttattcgattatctgtttattatgaaaaactcggtcggggagggaaagagaaagaccgcactcccgatattatattaagaaaaaaccgaaacatggttccggccaaaaaaaaattcctcgaacctggccgtccatcactagcaggccgtcaccgcccactctgcaacggtccagccggagggtggcgtgcaggacgtaacccgagagcagacggggcatagcgagaggattttttaatcaagccagaaattcgtccccgagggggatcgaacccgggacctgggtgctactcggaagcattgaccattacgctagaggccttaatcattatctgttgattatgattgtttatgttttcaaattatgaacacatggtcaacaactgaatcctttcaaagatttacttattttgatttgggccttttttgaatctacatgttaaatgcatcaatggtgcatttaacatgttctagacttctagtggactagtaacagctgagtatgaggtttgctcgactttttaagtttcaacagttttattatacttacaagttgcaaggattggatttgttttgaataagctgcagattttggccagtaattgatgtcctttagttgtctcgtacttgtgtggttcgcgcgctagaggtttggggatgttactatgtctatagagaaaaacacaagacagaatttagcttgcagctgttagtgcagctgcctaagagttacaatggaggttaggggatgttacaatagggtgccgccttgactggagggaggctggcggcggggggctggaagacgggacctggcaggtggcatgaaggccgacagtggaggacggctggcatggaggtgggcgatgcctgctgcggagagcagggaggtggggaagacgggactggggggcggtcacaggggaggcgccgcggaaggaggcgtagaggacaggggtgggggccagaggggccatgtgggggaaaatcatttcgcttacaatataagcgctttccaggccgcgtactagaaaatcgggatggacgttgtattttggatggtgggctaagcggcttgagaattaagcaaggtgtttgggtggacttatggcttagtttcaccaataagcgggaaataagcagatacaaacagggccttagtgaaggtaagcagtaggcccatgaacaatggattgtcaataccatggtttaaaagtcgtcgcctaggcgtcgcctaggcgacgcctaggcgtccaggcggggaaatcttctaggcgtcggcgccgcccagaggaaatcgtgtatggcgtccgccttggcgaggtaggcgtccgccttggcgtcgtaggcgtctgggcgacgccttttcctccctgggcgacgccttatctcgttttgggctttagggttttggcggctaggcgcgcgttctgttttgggcctgttccactgtgcgcgcgcggcaaaaatacattgtgcgtgcgcggcgccgcggctgctccttcgcgcgcaaatctctctgcgctctctccctgctgctcctctctccctgcgcgcggcggctgctcctctctccctgcgcgcggcggctgctctgcgcgc

SEQ ID NO: 28910 - DNA, 2968 bp, Zea Mays
ccaccctaaccctagatccgctttggtctctggaatctggaagtcaccggatccacaactcgcccctctggccgcctccgtcctccgccttatcggccgccgcctcctccttcgtcagtcgcatgtctctcgaggacgagaagcctttcttcgtcgtcgctgtcgtccccaactgggtgatgctagagcgcgtcgtcttccgcagggacgacgagtccttctcggacggaagcgaggccatcgtggcgaccgaccggcatcgcgtcctgtttcgcgtcggcaccatgatgttcgcaagtctggttcaggaattcttcatctacagcacctcaggtgccgacacttcctcttcgctgactgcgctcccgccttgtgccgagcctgacatggattgtagccgccgtgagggccgcctacctcgtaaacgtgcttctcggggatgacgcctactggcggtcaggtccatgggcctcctgtgccgaggcgaagaagagttcgcggtggtagagctgtaggtttacaagcacaactgctacatggcctttgctgacatctacttgttcctgaaatcagctggcaaatgagactccatgcgtttgcccatcctctgcagcaccgaccccaatgtgatctggcaactttgcttatggcagaccgacacggttatcctggtcgaccgctggctttgctgggttgactatgagcgaggcatccttttctacgatatgtttggggagcccagccctactgttatcttcagccagttccctctggacaagttccctgacaacaacactcgcaacaaggactgctgctggttgtaccgcagcatgtcgaccacccgtgaggggggtgcgctcctgttcaccaacggctggtgctggcttcactatcaggtgccactccctcatgttatgcaacatcacggagccgaacacggttgggtgtgtatgggaagaggactacacggtcacctccgatgagctttggtctgccaaccctgagtgcctaccgcatgacattctcatgttcccccaagctgacatggacaggccacatgtagtgcactttgtcatcagcgagttcggatacgtgagaaagaatatgtagctggtcaccattgacatgagcaccaggagagtggagtcattttctcagtataccaatgggaggcagtatgccattggaaccgagggcgcttacttgaccaaaataagtgatgatgtgaaggatatgaaaccaccgaatgatcgcattctgattaaggttgctgctggtggtttgctattgacgcaggcaactaaggagaaaccttctgttggatcagtgagtattttaggtttagtatatgctggatttgcagtaatttattcgattatctgtttattatgaaaaactcggtcggggagggaaagagaaagaccgcactcccgatattatattaagaaaaaaccgaaacatggttccggccaaaaaaaaattcctcgaacctggccgtccatcactagcaggccgtcaccgcccactctgcaacggtccagccggagggtggcgtgcaggacgtaacccgagagcagacggggcatagcgagaggattttttaatcaagccagaaattcgtccccgagggggatcgaacccgggacctgggtgctactcggaagcattgaccattacgctagaggccttaatcattatctgttgattatgattgtttatgttttcaaattatgaacacatggtcaacaactgaatcctttcaaagatttacttattttgatttgggccttttttgaatctacatgttaaatgcatcaatggtgcatttaacatgttctagacttctagtggactagtaacagctgagtatgaggtttgctcgactttttaagtttcaacagttttattatacttacaagttgcaaggattggatttgttttgaataagctgcagattttggccagtaattgatgtcctttagttgtctcgtacttgtgtggttcgcgcgctagaggtttggggatgttactatgtctatagagaaaaacacaagacagaatttagcttgcagctgttagtgcagctgcctaagagttacaatggaggttaggggatgttacaatagggtgccgccttgactggagggaggctggcggcggggggctggaagacgggacctggcaggtggcatgaaggccgacagtggaggacggctggcatggaggtgggcgatgcctgctgcggagagcagggaggtggggaagacgggactggggggcggtcacaggggaggcgccgcggaaggaggcgtagaggacaggggtgggggccagaggggccatgtgggggaaaatcatttcgcttacaatataagcgctttccaggccgcgtactagaaaatcgggatggacgttgtattttggatggtgggctaagcggcttgagaattaagcaaggtgtttgggtggacttatggcttagtttcaccaataagcgggaaataagcagatacaaacagggccttagtgaaggtaagcagtaggcccatgaacaatggattgtcaataccatggtttaaaagtcgtcgcctaggcgtcgcctaggcgacgcctaggcgtccaggcggggaaatcttctaggcgtcggcgccgcccagaggaaatcgtgtatggcgtccgccttggcgaggtaggcgtccgccttggcgtcgtaggcgtctgggcgacgccttttcctccctgggcgacgccttatctcgttttgggctttagggttttggcggctaggcgcgcgttctgttttgggcctgttccactgtgcgcgcgcggcaaaaatacattgtgcgtgcgcggcgccgcggctgctccttcgcgcgcaaatctctctgcgctctctccctgctgctcctctctccctgcgcgcggcggctgctcctctctccctgcgcgcggcggctgctctgcgcgc

SEQ ID NO: 28911 - DNA, 3075 bp, Zea Mays
ccaccctaaccctagatccgctttggtctctggaatctggaagtcaccggatccacaactcgcccctctggccgcctccgtcctccgccttatcggccgccgcctcctccttcgtcagtcgcatgtctctcgaggacgagaagcctttcttcgtcgtcgctgtcgtccccaactgggtgatgctagagcgcgtcgtcttccgcagggacgacgagtccttctcggacggaagcgaggccatcgtggcgaccgaccggcatcgcgtcctgtttcgcgtcggcaccatgatgttcgcaagtctggttcaggaattcttcatctacagcacctcaggtgccgacacttcctcttcgctgactgcgctcccgccttgtgccgagcctgacatggattgtagccgccgtgagggccgcctacctcgtaaacgtgcttctcggggatgacgcctactggcggtcaggtccatgggcctcctgtgccgaggcgaagaagagttcgcggtggtagagctgtaggtttacaagcacaactgctacatggcctttgctgacatctacttgttcctgaaatcagctggcaaatgagactccatgcgtttgcccatcctctgcagcaccgaccccaatgtgatctggcaactttgcttatggcagaccgacacggttatcctggtcgaccgctggctttgctgggttgactatgagcgaggcatccttttctacgatatgtttggggagcccagccctactgttatcttcagccagttccctctggacaagttccctgacaacaacactcgcaacaaggactgctgctggttgtaccgcagcatgtcgaccacccgtgaggggggtgcgctcctgttcaccaacggctggtgctggcttcactatcaggtgccactccctcatgttatgcaacatcacggagccgaacacggttgggtgtgtatgggaagaggactacacggtcacctccgatgagctttggtctgccaaccctgagtgcctaccgcatgacattctcatgttcccccaagctgacatggacaggccacatgtagtgcactttgtcatcagcgagttcggatacgtgagaaagaatatgtagctggtcaccattgacatgagcaccaggagagtggagtcattttctcagtataccaatgggaggcagtatgccattggaaccgagggcgcttacttgaccaaaataaggttggtgcacaagttgtgtactcgaaatatgcaggcacagaattgaaattcaatgacgccgaccatctcattttgaaataagatgacataattggtattcttgacagtgatgatgtgaaggatatgaaaccaccgaatgatcgcattctgattaaggttgctgctggtggtttgctattgacgcaggcaactaaggagaaaccttctgttggatcagtgagtattttaggtttagtatatgctggatttgcagtaatttattcgattatctgtttattatgaaaaactcggtcggggagggaaagagaaagaccgcactcccgatattatattaagaaaaaaccgaaacatggttccggccaaaaaaaaattcctcgaacctggccgtccatcactagcaggccgtcaccgcccactctgcaacggtccagccggagggtggcgtgcaggacgtaacccgagagcagacggggcatagcgagaggattttttaatcaagccagaaattcgtccccgagggggatcgaacccgggacctgggtgctactcggaagcattgaccattacgctagaggccttaatcattatctgttgattatgattgtttatgttttcaaattatgaacacatggtcaacaactgaatcctttcaaagatttacttattttgatttgggccttttttgaatctacatgttaaatgcatcaatggtgcatttaacatgttctagacttctagtggactagtaacagctgagtatgaggtttgctcgactttttaagtttcaacagttttattatacttacaagttgcaaggattggatttgttttgaataagctgcagattttggccagtaattgatgtcctttagttgtctcgtacttgtgtggttcgcgcgctagaggtttggggatgttactatgtctatagagaaaaacacaagacagaatttagcttgcagctgttagtgcagctgcctaagagttacaatggaggttaggggatgttacaatagggtgccgccttgactggagggaggctggcggcggggggctggaagacgggacctggcaggtggcatgaaggccgacagtggaggacggctggcatggaggtgggcgatgcctgctgcggagagcagggaggtggggaagacgggactggggggcggtcacaggggaggcgccgcggaaggaggcgtagaggacaggggtgggggccagaggggccatgtgggggaaaatcatttcgcttacaatataagcgctttccaggccgcgtactagaaaatcgggatggacgttgtattttggatggtgggctaagcggcttgagaattaagcaaggtgtttgggtggacttatggcttagtttcaccaataagcgggaaataagcagatacaaacagggccttagtgaaggtaagcagtaggcccatgaacaatggattgtcaataccatggtttaaaagtcgtcgcctaggcgtcgcctaggcgacgcctaggcgtccaggcggggaaatcttctaggcgtcggcgccgcccagaggaaatcgtgtatggcgtccgccttggcgaggtaggcgtccgccttggcgtcgtaggcgtctgggcgacgccttttcctccctgggcgacgccttatctcgttttgggctttagggttttggcggctaggcgcgcgttctgttttgggcctgttccactgtgcgcgcgcggcaaaaatacattgtgcgtgcgcggcgccgcggctgctccttcgcgcgcaaatctctctgcgctctctccctgctgctcctctctccctgcgcgcggcggctgctcctctctccctgcgcgcggcggctgctctgcgcgc

SEQ ID NO: 28912 - DNA, 3958 bp, Zea Mays
ccaccctaaccctagatccgctttggtctctggaatctggaagtcaccggatccacaactcgcccctctggccgcctccgtcctccgccttatcggccgccgcctcctccttcgtcagtcgcatgtctctcgaggacgagaagcctttcttcgtcgtcgctgtcgtccccaactgggtgatgctagagcgcgtcgtcttccgcagggacgacgagtccttctcggacggaagcgaggccatcgtggcgaccgaccggcatcgcgtcctgtttcgcgtcggcaccatgatgttcgcaagtctggttcaggaattcttcatctacagcacctcaggtgccgacacttcctcttcgctgactgcgctcccgccttgtgccgagcctgacatggattgtagccgccgtgagggccgcctacctcgtaaacgtgcttctcggggatgacgcctactggcggtcaggtccatgggcctcctgtgccgaggcgaagaagagttcgcggtggtagagctgtaggtttacaagcacaactgctacatggcctttgctgacatctacttgttcctgaaatcagctggcaaatgagactccatgcgtttgcccatcctctgcagcaccgaccccaatgtgatctggcaactttgcttatggcagaccgacacggttatcctggtcgaccgctggctttgctgggttgactatgagcgaggcatccttttctacgatatgtttggggagcccagccctactgttatcttcagccagttccctctggacaagttccctgacaacaacactcgcaacaaggactgctgctggttgtaccgcagcatgtcgaccacccgtgaggggggtgcgctcctgttcaccaacggctggtgctggcttcactatcaggtgccactccctcatgttatgcaacatcacggagccgaacacggttgggtgtgtatgggaagaggactacacggtcacctccgatgagctttggtctgccaaccctgagtgcctaccgcatgacattctcatgttcccccaagctgacatggacaggccacatgtagtgcactttgtcatcagcgagttcggatacgtgagaaagaatatgtagctggtcaccattgacatgagcaccaggagagtggagtcattttctcagtataccaatgggaggcagtatgccattggaaccgagggcgcttacttgaccaaaataaggtccggctgtcccatgtccttcctcccctctgagttctccaagtacctctgttaggtaatattgttgctggcttttatctatcacctaactaattttttgctggttgcacacgtattgctgtatgtatgcaagttcttcactttaatcttgttagcattagaatttcactacggggagagcagcctatttatccaaccagaacagtaatgtatcctgcaggctacttagtgaaagataagaaataggcttatgaacgatagagttaggccctgtttgtagtcgcttttcaggaactcgattctctgggtagcagcttgtttgataattttgctgtccagagaatctgctgcctcaataagctgagtttttggctatcctgattatagctgtaaaacgacctgaatgcccgagttgataatagctcatagccaataattgtaatgtcttttgagtttgttaaatagaaattgctgtacaataaagatagataggtctaaaatatggctacagtattatacaattaaatataaatctaccgtgtgtatcgatcatggacaagtgctgtcaatctatccattgcagagcagcagcaaaaacaatgaacggagagctgcattagaaatacatagatgtagggaggccggcaccttggaggagctcggtgtggcctgcgggtgaccataaataaagtagctgtatgttttgtatgctaagattttttctgtatccaatcttcttctaggtttgaacttctaattttggaagacaattttcctcatggccttgtcaccagacaccagtaacattttttttccgttgtaacacacttgtactgtcctaagccaattgagtaacttgacattgatttataatcttgtacaggttggtgcacaagttgtgtactcgaaatatgcaggcacagaattgaaattcaatgacgccgaccatctcattttgaaataagatgacataattggtattcttgacagtgatgatgtgaaggatatgaaaccaccgaatgatcgcattctgattaaggttgctgctggtggtttgctattgacgcaggcaactaaggagaaaccttctgttggatcagtgagtattttaggtttagtatatgctggatttgcagtaatttattcgattatctgtttattatgaaaaactcggtcggggagggaaagagaaagaccgcactcccgatattatattaagaaaaaaccgaaacatggttccggccaaaaaaaaattcctcgaacctggccgtccatcactagcaggccgtcaccgcccactctgcaacggtccagccggagggtggcgtgcaggacgtaacccgagagcagacggggcatagcgagaggattttttaatcaagccagaaattcgtccccgagggggatcgaacccgggacctgggtgctactcggaagcattgaccattacgctagaggccttaatcattatctgttgattatgattgtttatgttttcaaattatgaacacatggtcaacaactgaatcctttcaaagatttacttattttgatttgggccttttttgaatctacatgttaaatgcatcaatggtgcatttaacatgttctagacttctagtggactagtaacagctgagtatgaggtttgctcgactttttaagtttcaacagttttattatacttacaagttgcaaggattggatttgttttgaataagctgcagattttggccagtaattgatgtcctttagttgtctcgtacttgtgtggttcgcgcgctagaggtttggggatgttactatgtctatagagaaaaacacaagacagaatttagcttgcagctgttagtgcagctgcctaagagttacaatggaggttaggggatgttacaatagggtgccgccttgactggagggaggctggcggcggggggctggaagacgggacctggcaggtggcatgaaggccgacagtggaggacggctggcatggaggtgggcgatgcctgctgcggagagcagggaggtggggaagacgggactggggggcggtcacaggggaggcgccgcggaaggaggcgtagaggacaggggtgggggccagaggggccatgtgggggaaaatcatttcgcttacaatataagcgctttccaggccgcgtactagaaaatcgggatggacgttgtattttggatggtgggctaagcggcttgagaattaagcaaggtgtttgggtggacttatggcttagtttcaccaataagcgggaaataagcagatacaaacagggccttagtgaaggtaagcagtaggcccatgaacaatggattgtcaataccatggtttaaaagtcgtcgcctaggcgtcgcctaggcgacgcctaggcgtccaggcggggaaatcttctaggcgtcggcgccgcccagaggaaatcgtgtatggcgtccgccttggcgaggtaggcgtccgccttggcgtcgtaggcgtctgggcgacgccttttcctccctgggcgacgccttatctcgttttgggctttagggttttggcggctaggcgcgcgttctgttttgggcctgttccactgtgcgcgcgcggcaaaaatacattgtgcgtgcgcggcgccgcggctgctccttcgcgcgcaaatctctctgcgctctctccctgctgctcctctctccctgcgcgcggcggctgctcctctctccctgcgcgcggcggctgctctgcgcgc

SEQ ID NO: 28913 - DNA, 2959 bp, Zea Mays
ccaccctaaccctagatccgctttggtctctggaatctggaagtcaccggatccacaactcgcccctctggccgcctccgtcctccgccttatcggccgccgcctcctccttcgtcagtcgcatgtctctcgaggacgagaagcctttcttcgtcgtcgctgtcgtccccaactgggtgatgctagagcgcgtcgtcttccgcagggacgacgagtccttctcggacggaagcgaggccatcgtggcgaccgaccggcatcgcgtcctgtttcgcgtcggcaccatgatgttcgcaagtctggttcaggaattcttcatctacagcacctcaggtgccgacacttcctcttcgctgactgcgctcccgccttgtgccgagcctgacatggattgtagccgccgtgagggccgcctacctcgtaaacgtgcttctcggggatgacgcctactggcggtcaggtccatgggcctcctgtgccgaggcgaagaagagttcgcggtggtagagctgtaggtttacaagcacaactgctacatggcctttgctgacatctacttgttcctgaaatcagctggcaaatgagactccatgcgtttgcccatcctctgcagcaccgaccccaatgtgatctggcaactttgcttatggcagaccgacacggttatcctggtcgaccgctggctttgctgggttgactatgagcgaggcatccttttctacgatatgtttggggagcccagccctactgttatcttcagccagttccctctggacaagttccctgacaacaacactcgcaacaaggactgctgctggttgtaccgcagcatgtcgaccacccgtgaggggggtgcgctcctgttcaccaacggctggtgctggcttcactatcaggtgccactccctcatgttatgcaacatcacggagccgaacacggttgggtgtgtatgggaagaggactacacggtcacctccgatgagctttggtctgccaaccctgagtgcctaccgcatgacattctcatgttcccccaagctgacatggacaggccacatgtagtgcactttgtcatcagcgagttcggatacgtgagaaagaatatgtagctggtcaccattgacatgagcaccaggagagtggagtcattttctcagtataccaatgggaggcagtatgccattggaaccgagggcgcttacttgaccaaaataaggtccggctgtcccatgtccttcctcccctctgagttctccaagtacctctgttaggtaatattgttgctggcttttatctatcacctaactaattttttgctggttgcacacgtattgctgtatgtatgcaagttcttcactttaatcttgttagcattagaatttcactacggggagagcagcctatttatccaaccagaacagtaatgtatcctgcaggctacttagtgaaagataagaaataggcttatgaacgatagagttaggccctgtttgtagtcgcttttcaggaactcgattctctgggtagcagcttgtttgataattttgctgtccagagaatctgctgcctcaataagctgagtttttggctatcctgattatagctgtaaaacgacctgaatgcccgagttgataatagctcatagccaataattgtaatgtcttttgagtttgttaaatagaaattgctgtacaataaagatagataggtctaaaatatggctacagtattatacaattaaatataaatctaccgtgtgtatcgatcatggacaagtgctgtcaatctatccattgcagagcagcagcaaaaacaatgaacggagagctgcattagaaatacatagatgtagggaggccggcaccttggaggagctcggtgtggcctgcgggtgaccataaataaagtagctgtatgttttgtatgctaagattttttctgtatccaatcttcttctaggtttgaacttctaattttggaagacaattttcctcatggccttgtcaccagacaccagtaacattttttttccgttgtaacacacttgtactgtcctaagccaattgagtaacttgacattgatttataatcttgtacaggttggtgcacaagttgtgtactcgaaatatgcaggcacagaattgaaattcaatgacgccgaccatctcattttgaaataagatgacataattggtattcttgacagtgatgatgtgaaggatatgaaaccaccgaatgatcgcattctgattaaggttgctgctggtggtttgctattgacgcaggcaactaaggagaaaccttctgttggatcagaagacttcatcggacttgttaattatgtttatgtcttcctggccaaccattttgctttcttgtaaatatcagatggttccacaagaaaggcttttgtcgtgttggtcaggaaaattgggtgagctatttactaagttgtggcctaggaaagatcttatgttcttactaatatgatgtacgaacgctggataagttgtgtaagttggtggtgtgctcagtaggttggtagaaaaggttgtggtgtgttggacttttaagcagagtctcaaattatgttatttgagcatgtgtcacttggtccttgaacttgcctgtgatgtaccaagtttgcatgtgaaatttaatctctaaagagatgaaactgtgcactgccggatgaaaattcatctatctcctttctgctctacatagtcatcaatccattcataaccaagcaggaagccttccctgcaaaaaatattctaactgccaagtgccaatcaaggaaagacttggttatgcatactgcatggatgcaacgactgtgggcatgcagggatgggatgaaactggcggaacggcgcggtgctgtgaaactgtgcattgaatctgagctggtgcagctttgggagtccagggagacacgccggccagtcattacac

SEQ ID NO: 28914 - DNA, 2131 bp, Zea Mays
ccaccctaaccctagatccgctttggtctctggaatctggaagtcaccggatccacaactcgcccctctggccgcctccgtcctccgccttatcggccgccgcctcctccttcgtcagtcgcatgtctctcgaggacgagaagcctttcttcgtcgtcgctgtcgtccccaactgggtgatgctagagcgcgtcgtcttccgcagggacgacgagtccttctcggacggaagcgaggccatcgtggcgaccgaccggcatcgcgtcctgtttcgcgtcggcaccatgatgttcgcaagtctggttcaggaattcttcatctacagcacctcaggtgccgacacttcctcttcgctgactgcgctcccgccttgtgccgagcctgacatggattgtagccgccgtgagggccgcctacctcgtaaacgtgcttctcggggatgacgcctactggcggtcaggtccatgggcctcctgtgccgaggcgaagaagagttcgcggtggtagagctgtaggtttacaagcacaactgctacatggcctttgctgacatctacttgttcctgaaatcagctggcaaatgagactccatgcgtttgcccatcctctgcagcaccgaccccaatgtgatctggcaactttgcttatggcagaccgacacggttatcctggtcgaccgctggctttgctgggttgactatgagcgaggcatccttttctacgatatgtttggggagcccagccctactgttatcttcagccagttccctctggacaagttccctgacaacaacactcgcaacaaggactgctgctggttgtaccgcagcatgtcgaccacccgtgaggggggtgcgctcctgttcaccaacggctggtgctggcttcactatcaggtgccactccctcatgttatgcaacatcacggagccgaacacggttgggtgtgtatgggaagaggactacacggtcacctccgatgagctttggtctgccaaccctgagtgcctaccgcatgacattctcatgttcccccaagctgacatggacaggccacatgtagtgcactttgtcatcagcgagttcggatacgtgagaaagaatatgtagctggtcaccattgacatgagcaccaggagagtggagtcattttctcagtataccaatgggaggcagtatgccattggaaccgagggcgcttacttgaccaaaataaggtccggctgtcccatgtccttcctcccctctgagttctccaagtacctctgttaggttggtgcacaagttgtgtactcgaaatatgcaggcacagaattgaaattcaatgacgccgaccatctcattttgaaataagatgacataattggtattcttgacagtgatgatgtgaaggatatgaaaccaccgaatgatcgcattctgattaaggttgctgctggtggtttgctattgacgcaggcaactaaggagaaaccttctgttggatcagaagacttcatcggacttgttaattatgtttatgtcttcctggccaaccattttgctttcttgtaaatatcagatggttccacaagaaaggcttttgtcgtgttggtcaggaaaattgggtgagctatttactaagttgtggcctaggaaagatcttatgttcttactaatatgatgtacgaacgctggataagttgtgtaagttggtggtgtgctcagtaggttggtagaaaaggttgtggtgtgttggacttttaagcagagtctcaaattatgttatttgagcatgtgtcacttggtccttgaacttgcctgtgatgtaccaagtttgcatgtgaaatttaatctctaaagagatgaaactgtgcactgccggatgaaaattcatctatctcctttctgctctacatagtcatcaatccattcataaccaagcaggaagccttccctgcaaaaaatattctaactgccaagtgccaatcaaggaaagacttggttatgcatactgcatggatgcaacgactgtgggcatgcagggatgggatgaaactggcggaacggcgcggtgctgtgaaactgtgcattgaatctgagctggtgcagctttgggagtccagggagacacgccggccagtcattacac

SEQ ID NO: 28915 - DNA, 2886 bp, Zea Mays
ccaccctaaccctagatccgctttggtctctggaatctggaagtcaccggatccacaactcgcccctctggccgcctccgtcctccgccttatcggccgccgcctcctccttcgtcagtcgcatgtctctcgaggacgagaagcctttcttcgtcgtcgctgtcgtccccaactgggtgatgctagagcgcgtcgtcttccgcagggacgacgagtccttctcggacggaagcgaggccatcgtggcgaccgaccggcatcgcgtcctgtttcgcgtcggcaccatgatgttcgcaagtctggttcaggaattcttcatctacagcacctcaggtgccgacacttcctcttcgctgactgcgctcccgccttgtgccgagcctgacatggattgtagccgccgtgagggccgcctacctcgtaaacgtgcttctcggggatgacgcctactggcggtcaggtccatgggcctcctgtgccgaggcgaagaagagttcgcggtggtagagctgtaggtttacaagcacaactgctacatggcctttgctgacatctacttgttcctgaaatcagctggcaaatgagactccatgcgtttgcccatcctctgcagcaccgaccccaatgtgatctggcaactttgcttatggcagaccgacacggttatcctggtcgaccgctggctttgctgggttgactatgagcgaggcatccttttctacgatatgtttggggagcccagccctactgttatcttcagccagttccctctggacaagttccctgacaacaacactcgcaacaaggactgctgctggttgtaccgcagcatgtcgaccacccgtgaggggggtgcgctcctgttcaccaacggctggtgctggcttcactatcaggtgccactccctcatgttatgcaacatcacggagccgaacacggttgggtgtgtatgggaagaggactacacggtcacctccgatgagctttggtctgccaaccctgagtgcctaccgcatgacattctcatgttcccccaagctgacatggacaggccacatgtagtgcactttgtcatcagcgagttcggatacgtgagaaagaatatgtagctggtcaccattgacatgagcaccaggagagtggagtcattttctcagtataccaatgggaggcagtatgccattggaaccgagggcgcttacttgaccaaaataaggtccggctgtcccatgtccttcctcccctctgagttctccaagtacctctgttaggtaatattgttgctggcttttatctatcacctaactaattttttgctggttgcacacgtattgctgtatgtatgcaagttcttcactttaatcttgttagcattagaatttcactacggggagagcagcctatttatccaaccagaacagtaatgtatcctgcaggctacttagtgaaagataagaaataggcttatgaacgatagagttaggccctgtttgtagtcgcttttcaggaactcgattctctgggtagcagcttgtttgataattttgctgtccagagaatctgctgcctcaataagctgagtttttggctatcctgattatagctgtaaaacgacctgaatgcccgagttgataatagctcatagccaataattgtaatgtcttttgagtttgttaaatagaaattgctgtacaataaagatagataggtctaaaatatggctacagtattatacaattaaatataaatctaccgtgtgtatcgatcatggacaagtgctgtcaatctatccattgcagagcagcagcaaaaacaatgaacggagagctgcattagaaatacatagatgtagggaggccggcaccttggaggagctcggtgtggcctgcgggtgaccataaataaagtagctgtatgttttgtatgctaagattttttctgtatccaatcttcttctaggtttgaacttctaattttggaagacaattttcctcatggccttgtcaccagacaccagtaacattttttttccgttgtaacacacttgtactgtcctaagccaattgagtaacttgacattgatttataatcttgtacaggttggtgcacaagttgtgtactcgaaatatgcaggcacagaattgaaattcaatgacgccgaccatctcattttgaaataagatgacataattggtattcttgacagtgatgatgtgaaggatatgaaaccaccgaatgatcgcattctgattaaggttgctgctggtggtttgctattgacgcaggcaactaaggagaaaccttctgttggatcaatggttccacaagaaaggcttttgtcgtgttggtcaggaaaattgggtgagctatttactaagttgtggcctaggaaagatcttatgttcttactaatatgatgtacgaacgctggataagttgtgtaagttggtggtgtgctcagtaggttggtagaaaaggttgtggtgtgttggacttttaagcagagtctcaaattatgttatttgagcatgtgtcacttggtccttgaacttgcctgtgatgtaccaagtttgcatgtgaaatttaatctctaaagagatgaaactgtgcactgccggatgaaaattcatctatctcctttctgctctacatagtcatcaatccattcataaccaagcaggaagccttccctgcaaaaaatattctaactgccaagtgccaatcaaggaaagacttggttatgcatactgcatggatgcaacgactgtgggcatgcagggatgggatgaaactggcggaacggcgcggtgctgtgaaactgtgcattgaatctgagctggtgcagctttgggagtccagggagacacgccggccagtcattacac

SEQ ID NO: 28916 - DNA, 2003 bp, Zea Mays
ccaccctaaccctagatccgctttggtctctggaatctggaagtcaccggatccacaactcgcccctctggccgcctccgtcctccgccttatcggccgccgcctcctccttcgtcagtcgcatgtctctcgaggacgagaagcctttcttcgtcgtcgctgtcgtccccaactgggtgatgctagagcgcgtcgtcttccgcagggacgacgagtccttctcggacggaagcgaggccatcgtggcgaccgaccggcatcgcgtcctgtttcgcgtcggcaccatgatgttcgcaagtctggttcaggaattcttcatctacagcacctcaggtgccgacacttcctcttcgctgactgcgctcccgccttgtgccgagcctgacatggattgtagccgccgtgagggccgcctacctcgtaaacgtgcttctcggggatgacgcctactggcggtcaggtccatgggcctcctgtgccgaggcgaagaagagttcgcggtggtagagctgtaggtttacaagcacaactgctacatggcctttgctgacatctacttgttcctgaaatcagctggcaaatgagactccatgcgtttgcccatcctctgcagcaccgaccccaatgtgatctggcaactttgcttatggcagaccgacacggttatcctggtcgaccgctggctttgctgggttgactatgagcgaggcatccttttctacgatatgtttggggagcccagccctactgttatcttcagccagttccctctggacaagttccctgacaacaacactcgcaacaaggactgctgctggttgtaccgcagcatgtcgaccacccgtgaggggggtgcgctcctgttcaccaacggctggtgctggcttcactatcaggtgccactccctcatgttatgcaacatcacggagccgaacacggttgggtgtgtatgggaagaggactacacggtcacctccgatgagctttggtctgccaaccctgagtgcctaccgcatgacattctcatgttcccccaagctgacatggacaggccacatgtagtgcactttgtcatcagcgagttcggatacgtgagaaagaatatgtagctggtcaccattgacatgagcaccaggagagtggagtcattttctcagtataccaatgggaggcagtatgccattggaaccgagggcgcttacttgaccaaaataaggttggtgcacaagttgtgtactcgaaatatgcaggcacagaattgaaattcaatgacgccgaccatctcattttgaaataagatgacataattggtattcttgacagtgatgatgtgaaggatatgaaaccaccgaatgatcgcattctgattaaggttgctgctggtggtttgctattgacgcaggcaactaaggagaaaccttctgttggatcaatggttccacaagaaaggcttttgtcgtgttggtcaggaaaattgggtgagctatttactaagttgtggcctaggaaagatcttatgttcttactaatatgatgtacgaacgctggataagttgtgtaagttggtggtgtgctcagtaggttggtagaaaaggttgtggtgtgttggacttttaagcagagtctcaaattatgttatttgagcatgtgtcacttggtccttgaacttgcctgtgatgtaccaagtttgcatgtgaaatttaatctctaaagagatgaaactgtgcactgccggatgaaaattcatctatctcctttctgctctacatagtcatcaatccattcataaccaagcaggaagccttccctgcaaaaaatattctaactgccaagtgccaatcaaggaaagacttggttatgcatactgcatggatgcaacgactgtgggcatgcagggatgggatgaaactggcggaacggcgcggtgctgtgaaactgtgcattgaatctgagctggtgcagctttgggagtccagggagacacgccggccagtcattacac

SEQ ID NO: 28917 - DNA, 2076 bp, Zea Mays
ccaccctaaccctagatccgctttggtctctggaatctggaagtcaccggatccacaactcgcccctctggccgcctccgtcctccgccttatcggccgccgcctcctccttcgtcagtcgcatgtctctcgaggacgagaagcctttcttcgtcgtcgctgtcgtccccaactgggtgatgctagagcgcgtcgtcttccgcagggacgacgagtccttctcggacggaagcgaggccatcgtggcgaccgaccggcatcgcgtcctgtttcgcgtcggcaccatgatgttcgcaagtctggttcaggaattcttcatctacagcacctcaggtgccgacacttcctcttcgctgactgcgctcccgccttgtgccgagcctgacatggattgtagccgccgtgagggccgcctacctcgtaaacgtgcttctcggggatgacgcctactggcggtcaggtccatgggcctcctgtgccgaggcgaagaagagttcgcggtggtagagctgtaggtttacaagcacaactgctacatggcctttgctgacatctacttgttcctgaaatcagctggcaaatgagactccatgcgtttgcccatcctctgcagcaccgaccccaatgtgatctggcaactttgcttatggcagaccgacacggttatcctggtcgaccgctggctttgctgggttgactatgagcgaggcatccttttctacgatatgtttggggagcccagccctactgttatcttcagccagttccctctggacaagttccctgacaacaacactcgcaacaaggactgctgctggttgtaccgcagcatgtcgaccacccgtgaggggggtgcgctcctgttcaccaacggctggtgctggcttcactatcaggtgccactccctcatgttatgcaacatcacggagccgaacacggttgggtgtgtatgggaagaggactacacggtcacctccgatgagctttggtctgccaaccctgagtgcctaccgcatgacattctcatgttcccccaagctgacatggacaggccacatgtagtgcactttgtcatcagcgagttcggatacgtgagaaagaatatgtagctggtcaccattgacatgagcaccaggagagtggagtcattttctcagtataccaatgggaggcagtatgccattggaaccgagggcgcttacttgaccaaaataaggttggtgcacaagttgtgtactcgaaatatgcaggcacagaattgaaattcaatgacgccgaccatctcattttgaaataagatgacataattggtattcttgacagtgatgatgtgaaggatatgaaaccaccgaatgatcgcattctgattaaggttgctgctggtggtttgctattgacgcaggcaactaaggagaaaccttctgttggatcagaagacttcatcggacttgttaattatgtttatgtcttcctggccaaccattttgctttcttgtaaatatcagatggttccacaagaaaggcttttgtcgtgttggtcaggaaaattgggtgagctatttactaagttgtggcctaggaaagatcttatgttcttactaatatgatgtacgaacgctggataagttgtgtaagttggtggtgtgctcagtaggttggtagaaaaggttgtggtgtgttggacttttaagcagagtctcaaattatgttatttgagcatgtgtcacttggtccttgaacttgcctgtgatgtaccaagtttgcatgtgaaatttaatctctaaagagatgaaactgtgcactgccggatgaaaattcatctatctcctttctgctctacatagtcatcaatccattcataaccaagcaggaagccttccctgcaaaaaatattctaactgccaagtgccaatcaaggaaagacttggttatgcatactgcatggatgcaacgactgtgggcatgcagggatgggatgaaactggcggaacggcgcggtgctgtgaaactgtgcattgaatctgagctggtgcagctttgggagtccagggagacacgccggccagtcattacac

SEQ ID NO: 28918 - DNA, 236 bp, Zea Mays
tccgaggcgatggccgccgccgccgcagcggtgacggtgttcatgtgcggcggcgcgtcaggcgcgacgactctggtagtagtgccaacattgttaatattatccgatgtcgatgacgatgacatgtgcaggccggagaacttggacgaagcctggtgggtggcgctgtagagcgcggccgcctgcaggtgcggcggcggtcgcgcgggaggaggagcaccgggcgggcccgttgg

SEQ ID NO: 28919 - DNA, 2936 bp, Zea Mays
ccaaatccgacacgcacggcacgagcacgacagatcgggcgactggagtcatcgccgccgggccggtcgcggtcggatccccccgctccgcctcctctccttcgattcgttgcttcccgcttcaaatccaagccaccaccctttccttcccatggcttccgacgccccggcggagcaaccggcgacgcagcagaagcccaccagggtctcgctgtcctatgaggagatctccaagctcttctccctccccatcgctgaggcggcctccatcctcggagtctgcaccagtgtcttgaagaggatctgccgcacccacgggattgttaggtggccatatcgtaagcttgtttctgggaaagctggggatgacacaaaaggtcctgatagcgacaaagccaacgaactccttgaggtatcaaaaatcgcgaaacaaaaggctcccagtgcatcaggcccatcagtagtgtcatcaagcacttcccaaggagcggcaaagtctcaacagggcaattctaaggcaggacagttttcagtttcgccaccaacagactatgtgcctaccaaagatggaagccatgaaccccatgaatcaacaacacatgagccatcaaagggcatgactgatgatgacgagttggactggggagcagatgaagcggaagctgaagctgatggcactgttacggcagaggcatcggcacagctgtgctcgctgagaaggaaagcagtagatgacgggcgcaaactattgaatggtcacaaccgcaggggccaagaattctctaggctgaacaaaaggcagaagacagcgctagcccaggtatttggggcttcactgccagaatgttgtattactcgtgtctagtgagtgaagaacaactgtagctgtgttttccctccttctccagaccctcatgtaatctgacccgttattagcgagaagtgtgaaatcttctcactgaattgaagaatggcaggagcttgttttgtcttccttatcaacaagttgttgctgccgcttttgtctacgtattttctctcatctcccatgtgtgtacgaggagagcaccttatgttatatctgtgaatgcagatgtcctcaaaaggaatggatctagaagataggcatatcaatccattgtgtttggttgatggaggatataacattctacacacatccaagtgagtgttgctgcccataatttatctctttctgtatttttccatatgaagacccatggatgcaaatctgaaagaaatagcgttctttcttctgataacatgccccttgtcgtcaactgtaggttgcagaatgcttatgcttctaaaagttattgtagtttccaattccatgtgttttaggcatctgggtgacaattatacatgtatgtttatattttatttcactgtatctttttttatattttgtagttgtggctaattctgcatttatctcatcattgtatcgatacagaaggttgtgcataagaatcaccgattcgatatgatcatatgaaagttgaatgcatgtaggtctcaggcagacatcatgtgtagtggttgatttactgcttggggtgcttacagaagtaatacatttagatgttatgtttaactgttggtgtgatatgtattgtggaaggtgtttgtttcttccatgaacagtcacattgtagcatgaagaagatgtttatgtgtattgatgtaaacttttctatatgtctggccactctgaagctttgccatccaatgctggattacagtattgtaatatatccttgtgtaaagggatgacaagctaatctgttagctggcattcacttttgtaacgctgtctgcattacaagattaaatgaatcgaagtgtgcactgacaatttgaagtcaaagagataatgctttggtagtttagttactcatttgcctgtttgttacatgctcacatatggaagcaatactgacattagtgtggctgaagaatgtacatcacaaccaccgttgctgcctccttagggcatctccagtgtatggctatcatttctgtgagttgagctttaagctctttatgatgttctgtcggcatgcactttgtcttgtaatggcatctaaaggtgagtttgttttgtctaattttctccttgatccaggcggagatagctctgaacttaagctaccttgcgtacagcatctaacattgcttctgctgaatgtttgggattggatggcactttttgtgggcaaagagcctgagactagtatattgcctttgttaaccaaatatttctgttagaacttagaagccacctgcctaacattgcttctgctgactgtttgggattggatggcactttttgtaggcaaagaacctgagactactggtattgcctttgttaacaaaatatttctgttagaactcagaagcaacctgcgtaatccgtaagcaagtaggcaatggtaggctattggtgtttgctgtcatggtaaggcccaactgcccaaagataatgaaatatactagatggtctggcctatagatagccatcatgtgtttggtgttgcttgtggcacactggtttttttttcagttgagaagtatcgtgtgacatggatctcttttgtgtttgcctctactgatcttgattggtgttgacatctgtgttttcaagtcgtccgactaatcgcgattagtcgcgattagtcgggctagtcggttagcagagctcgattaggcagccgactcgactagagtacctggtcgccctggtcgtccgactagtcgacgattagggccgattagtcgctcgattagccggttctgggcgactaggtttaggacctagatttttttggacttgtagtattaatgtgtgttgtgtggtactggtatctgggacttgtagtattaataactagaagtgtttctctgctgttttcact

SEQ ID NO: 28920 - DNA, 1115 bp, Zea Mays
gcacgacagatcgggcgactggagtcatcgccgccgggccggtcgcggtcggatccccccgctccgcctcctctccttcgattcgttgcttcccgcttcaaatccaagccaccaccctttccttcccatggcttccgacgccccggcggagcaaccggcgacgcagcagaagcccaccagggtctcgctgtcctatgaggagatctccaagctcttctccctccccatcgctgaggcggcctccatcctcggagtctgcaccagtgtcttgaagaggatctgccgcacccacgggattgttaggtggccatatcgtaagcttgtttctgggaaagctggggatgacacaaaaggtcctgatagcgacaaagccaacgaactccttgaggtatcaaaaatcgcgaaacaaaaggctcccagtgcatcaggcccatcagtagtgtcatcaagcacttcccaaggagcggcaaagtctcaacagggcaattctaaggcaggacagttttcagtttcgccaccaacagcgacacagactatgtgcctaccaaagatggaagccatgaaccccatgaatcaacaacacatgagccatcaaagggcatgactgatgatgacgagttggactggggagcagatgaagcggaagctgaagctgatggcactgttacggcagaggcatcggcacagctgtgctcgctgagaaggaaagcagtagatgacgggcgcaaactattgaatggtcacaaccgcaggggccaagaattctctaggctgaacaaaaggcagaagacagcgctagcccaggtatttggggcttcactgccagaatgttgtattactcgtgtctagtgagtgaagaacaactgtagctgtgttttccctccttctccagaccctcatgtaatctgacccgttattagcgagaagtgtgaaatcttctcactgaattgaagaatggcaggagcttgttttgtcttccttatcaacaagttgttgctgccgcttttgtctacgtattttctctcatctcccatgtgtgtacgaggagagcaccttatgttatatctgtgaatgcagtcaaaactgttaaacacttgcacaaaaaactagcaaag

SEQ ID NO: 28921 - DNA, 847 bp, Zea Mays
ctcatctggggataactcaaggccagcccccatcttgtttctgggaaagctggggatgacacaaaaggtcctgatagcgacaaagccaacgaactccttgaggtatcaaaaatcgcgaaacaaaaggctcccagtgcatcaggcccatcagtagtgtcatcaagcacttcccaaggagcggcaaagtctcaacagggcaattctaaggcaggacagttttcagtttcgccaccaacaggtaaacataacgcatcactaagtttgacccatagccaagccaaggccatcccttgctatatggatgatttcaagtacggattcccgtcatctggcttgtcttgtgaaactatgaaatggtggggcacaagcagcgacacagactatgtgcctaccaaagatggaagccatgaaccccatgaatcaacaacacatgagccatcaaagggcatgactgatgatgacgagttggactggggagcagatgaagcggaagctgaagctgatggcactgttacggcagaggcatcggcacagctgtgctcgctgagaaggaaagcagtagatgacgggcgcaaactattgaatggtcacaaccgcaggggccaagaattctctaggctgaacaaaaggcagaagacagcgctagcccaggtatttggggcttcactgccagaatgttgtattactcgtgtctagtgagtgaagaacaactgtagctgtgttttccctccttctccagaccctcatgtaatctgacccgttattagcgagaagtgtgaaatcttctcactgaattgaagaatggcaggagcttgttttgtcttccttatcaacaagttgttgctgc

SEQ ID NO: 28922 - DNA, 1366 bp, Zea Mays
gggcagcaggtggtaggatctacctaattggtggttatggaacaccacatgggaagagtaatgtatgattcggtaatcatcatgactttttgtttggttttggtatggagcatgtagagccatgagtaaatacagaggatctcttatgggtactaaagagaacagatatggtctctgctgggcataaaaagatagggaagtaaactcacgtttggaagaatcgtgagcaggaggagaagtgtcttttatcccccattgcataacacctgttttgcccttttgactagcatacatgggaatgaggacacttaagctttgtgatgaggtgaggtgagaaatgggagttgagagacagacttgagagggagagatgcaaagagcagaacaaaatgggcagcaatattggctatggaactgaagcacgagcacatggtaggttgccttgggttgaagccagagagtctgtgtggtgcacatgagtgtggcatgaccgtccagcaagcaatgcaaagcaacgcagagtgtcacctatttaagtccagtccccacccaaggtccattccagtgagtgttgttcccttccctttataaaccagagaacctgcagtgcagtgcaggcagagtactccgtctgatctcggtgatctgtctccacgacaaggagtgcactgtcagctctagcttgctgcagaacaagggcaagatggcaagaggtggtcggctactgatcctctccctggggcttgtgctcctctacttcgtctcaggaagtgttgctgctgctgctgcacagaaaacgtggtgagctgcggcgtgatccagaagggcgggccgtgctactacccggacaacctggtgtcgcgcgccgccgtcgccatgaacctctactatgccgccaatggcaggcacccctggaactgctacttcaacaactcggcgctcgtggtgcagtccgatcccagctatggatcctgcacctactactgatgtctgtctgatgctcttttgtagcagagatcggtcgatgaaaggaaatataatccctgtgtatgctgtgctgtgttgtgtctagagatgacaatagggacctgattcccccgtggggaatttcctattgctatccctagttgcgtcctagtagaagtgtctcttgttccatccagttgatatgcatgataacatttggagatgcatgcatgtgattttgtattcgaggatatggtgtgatcgcaaatgaacaaagtgatgcaaggcagcaatcattcataaatttgtcattctcagattaatcatgagcaaataaagccgagtaagtgtctctgagtgccaagccaacaatatccacagcgatgccgcacgctgtttt

SEQ ID NO: 28923 - DNA, 1307 bp, Zea Mays
aattggtggttatggaacaccacatgggaagagtaatgtatgattcggtaatcatcatgactttttgtttggttttggtatggagcatgtagagccatgagtaaatacagaggatctcttatgggtactaaagagaacagatatggtctctgctgggcataaaaagatagggaagtaaactcacgtttggaagaatcgtgagcaggaggagaagtgtcttttatcccccattgcataacacctgttttgcccttttgactagcatacatgggaatgaggacacttaagctttgtgatgaggtgaggtgagaaatgggagttgagagacagacttgagagggagagatgcaaagagcagaacaaaatgggcagcaatattggctatggaactgaagcacgagcacatggtaggttgccttgggttgaagccagagagtctgtgtggtgcacatgagtgtggcatgaccgtccagcaagcaatgcaaagcaacgcagagtgtcacctatttaagtccagtccccacccaaggtccattccagtgagtgttgttcccttccctttataaaccagagaacctgcagtgcagtgcaggcagagtactccgtctgatctcggtgatctgtctccacgacaaggagtgcactgtcagctctagcttgctgcagaacaagggcaagatggcaagaggtggtcggctactgatcctctccctggggcttgtgctcctctacttcgtctcaggtgagctgcggcgtgatccagaagggcgggccgtgctactacccggacaacctggtgtcgcgcgccgccgtcgccatgaacctctactatgccgccaatggcaggcacccctggaactgctacttcaacaactcggcgctcgtggtgcagtccgatcccagctatggatcctgcacctactactgatgtctgtctgatgctcttttgtagcagagatcggtcgatgaaaggaaatataatccctgtgtatgctgtgctgtgttgtgtctagagatgacaatagggacctgattcccccgtggggaatttcctattgctatccctagttgcgtcctagtagaagtgtctcttgttccatccagttgatatgcatgataacatttggagatgcatgcatgtgattttgtattcgaggatatggtgtgatcgcaaatgaacaaagtgatgcaaggcagcaatcattcataaatttgtcattctcagattaatcatgagcaaataaagccgagtaagtgtctctgagtgccaagccaacaatatccacagcgatgccgcacgctgtttt

SEQ ID NO: 28924 - DNA, 948 bp, Zea Mays
cccacacgctctacgctctgctctgctcctgcgtgcgtggtctctttcctcccctcttcatccagatccggacccgaccgccgatccatccaaatcacccttccccttccccttctcttccaccaccaccaccaccaggccgccgcctcgtcgtcctcaattctcctttcgaatttagaatccccgtgctgagagttgagtgccgccttggttgctccgtactggactcgattcctcatcgcagcagaagcatcccgtcccctccgcttctccttgctctgctctgctaacaaacagacaaaaaaatagcatcatgtcggaggtgaaggactccaatgtgcctgctgcacttgatggaaatcctcaacctatggaccaaactgaagacaattctatgccctcagcacagcaacaggaagaagcaatcaagaagaagtttggaggactaatgcccaaaaagcccccactcatctcaaaggatcatgagcgggcctactttgattctgctgactgggctctagggaagcaaggtgttgccaaaccaaaaggaccgctggaggcacttaggcccaagcttcagccaacacgccaacaacagcaacaacgtgcaaggcgccctatttacacttcgtcagaaaacgaggacggagacggggctggtgctgaggatatgaacatcaattgaagtggactagtggagtggaatgcctgctcagattggttgatgagcaagtcgtcactatatgtcaagtgttgtagtttgctttgcaattattggaggaattaaatgatcgtctgctgggttcatgagtcgaacatttgatatatatggcctattatttactaatatatatttttattatctgtggataaacatttgatatgcatgaggtggccgagctgtgagtgaccgcttggtcaggttgccgtgctcagtggattttacaa

SEQ ID NO: 28925 - DNA, 1755 bp, Zea Mays
  misc_feature (1195)..(1294): n is a, c, g, or t
cacgctctacgctctgctctgctcctgcgtgcgtggtctctttcctcccctcttcatccagatccggacccgaccgccgatccatccaaatcacccttccccttccccttctcttccaccaccaccaccaccaggccgccgcctcgtcgtcctcaattctcctttcgaatttagaatccccgtgctgagagttgagtgccgccttggttgctccgtactggactcgattcctcatcgcagcagaagcatcccgtcccctccgcttctccttgctctgctctgctaacaaacagacaaaaaaatagcatcatgtcggaggtgaaggactccaatgtgcctgctgcacttgatggaaatcctcaacctatggaccaaactgaagacaattctatgccctcagcacagcaacaggaagaagcaatcaagaagaagtttggaggactaatgcccaaaaagcccccactcatctcaaaggatcatgagcgggcctactttgattctgctgactgggctctagggaagcaaggtgttgccaaaccaaaaggaccgctggaggcacttaggcccaagcttcaggtaccactctgctagttatatgtgatgtacccatggtctcttattttattttgctttctctctttctggtttattgtttcagccaacacgccaacaacagcaacaacgtgcaaggcgccctatttacacttcgtcagaaaacgagggtatgtacttttatttggctttttggttatggtccttgtgcacatgaaaagcagagctaagcttatgtaagcggtggttagttctctacttctttgtatgtatggtcctcggagtttgtttgtttgttatataaaaaataaagtcttccaatgttaaaaaataaagaaagaaagaaaggttctctgtatcctttttaacataatagtgactgcagacggagacggggctggtgctgaggatatgaacatcaattgaagtggactagtggagtggaatgcctgctcagattggttgatgagcaagtcgtcactatatgtcaagtgttgtagtttgctttgcaattattggaggaattaaatgatcgtctgctgggttcatgagtcgaacatttgatatatatggcctattatttactaatatatatttttattatctgtggataaacatttgatatgcatgaggtggccgagcnnnnnnnnnnnnnnnnnnnnnnnnnnnnnnnnnnnnnnnnnnnnnnnnnnnnnnnnnnnnnnnnnnnnnnnnnnnnnnnnnnnnnnnnnnnnnnnnnnnnaagcttatgtaagcggtggttagttctctacttctttgtatgtatggtcctcggagtttgtttgtttgttatataaaaaataaagtcttccaatgttaaaaaataaagaaagaaagaaaggttctctgtatcctttttaacataatagtgactgcagacggagacggggctggtgctgaggatatgaacatcaattgaagtggactagtggagtggaatgcctgctcagattggttgatgagcaagtcgtcactatatgtcaagtgttgtagtttgctttgcaattattggaggaattaaatgatcgtctgctgggttcatgagtcgaacatttgatatatatggcctattatttactaatatatatttttattatctgtggataaacatttgatatgcatgaggtggccgagctgtgagtgaccgcttggtcaggttgccgtgctcagtggattttacaa

SEQ ID NO: 28926 - DNA, 1662 bp, Zea Mays
  misc_feature (1102)..(1201): n is a, c, g, or t
cacgctctacgctctgctctgctcctgcgtgcgtggtctctttcctcccctcttcatccagatccggacccgaccgccgatccatccaaatcacccttccccttccccttctcttccaccaccaccaccaccaggccgccgcctcgtcgtcctcaattctcctttcgaatttagaatccccgtgctgagagttgagtgccgccttggttgctccgtactggactcgattcctcatcgcagcagaagcatcccgtcccctccgcttctccttgctctgctctgacaaaaaaatagcatcatgtcggaggtgaaggactccaatgtgcctgctgcacttgatggaaatcctcaacctatggaccaaactgaagacaattctatgccctcagcacagcaacaggaagaagcaatcaagaagaagtttggaggactaatgcccaaaaagcccccactcatctcaaaggatcatgagcgggcctactttgattctgctgactgggctctagggaagcaaggtgttgccaaaccaaaaggaccgctggaggcacttaggcccaagcttcagccaacacgccaacaacagcaacaacgtgcaaggcgccctatttacacttcgtcagaaaacgagggtatgtacttttatttggctttttggttatggtccttgtgcacatgaaaagcagagctaagcttatgtaagcggtggttagttctctacttctttgtatgtatggtcctcggagtttgtttgtttgttatataaaaaataaagtcttccaatgttaaaaaataaagaaagaaagaaaggttctctgtatcctttttaacataatagtgactgcagacggagacggggctggtgctgaggatatgaacatcaattgaagtggactagtggagtggaatgcctgctcagattggttgatgagcaagtcgtcactatatgtcaagtgttgtagtttgctttgcaattattggaggaattaaatgatcgtctgctgggttcatgagtcgaacatttgatatatatggcctattatttactaatatatatttttattatctgtggataaacatttgatatgcatgaggtggccgagcnnnnnnnnnnnnnnnnnnnnnnnnnnnnnnnnnnnnnnnnnnnnnnnnnnnnnnnnnnnnnnnnnnnnnnnnnnnnnnnnnnnnnnnnnnnnnnnnnnnnaagcttatgtaagcggtggttagttctctacttctttgtatgtatggtcctcggagtttgtttgtttgttatataaaaaataaagtcttccaatgttaaaaaataaagaaagaaagaaaggttctctgtatcctttttaacataatagtgactgcagacggagacggggctggtgctgaggatatgaacatcaattgaagtggactagtggagtggaatgcctgctcagattggttgatgagcaagtcgtcactatatgtcaagtgttgtagtttgctttgcaattattggaggaattaaatgatcgtctgctgggttcatgagtcgaacatttgatatatatggcctattatttactaatatatatttttattatctgtggataaacatttgatatgcatgaggtggccgagctgtgagtgaccgcttggtcaggttgccgtgctcagtggattttacaa

SEQ ID NO: 28927 - DNA, 2273 bp, Zea Mays
gtgtatacagcgacacgacacgagacgagagggagggtgaactgaaagagagacccggctagagctataaagcaagtgggggaagagagagagagaggagaaggagaaggagaggtttttatgtatgtgtggtggacatgcgtcctcctgtcgtctcgagagagcggaggccctaatactccaatcaccacgcaccaaactagctagctagcagtcgtcttgcattgtagctagtccattgctctcatcttctcttcttcttcccccagtcctccccccctttcccctcttcggcctctctcgctcagctcactcttcattaagcgagctcacgtcgttcctcccttcttcttcttcttatccgttgttcaattcgttcagctagccggccagagatcgagcatcatctccatcatcgattcatccatctcatctttctcttcttctattctatgtcgtccagcactgcggcggcggcggcggcttcgtcggcgaccaccatgtggtgttcccgacgtccggcgactgcttcgccatggtggacgacaacctcctggactacatcgacttcagctgcgacgtgcccttcttcgacgctgacggggacatcctccccgacctggaggtagacaccacggagctcctcgccgagttctcgtccacccctcctgcggacgacctgctggcagtggcagtattcggcgccgacgaccagccggcggcggcagtagcacaagagaagccgtcgtcgtcgttggagcaaacatgtggtgacgacaaaggtgtagcagtagccgccgccagaagaaagctgcagacgacgacgacgacgacgacgacggaggaggaggattcttctcctgccgggtccggggccaacaagtcgtcggcgtcggcagagggccacagcagcaagaagaagtcggcgggcaagaactccaacggcggcaagcgcaaggtgaaggtggactggacgccggagctgcaccggcggttcgtgcaggcggtggagcagctgggcatcgacaaggccgtgccgtccaggatcctggagatcatgggcacggactgcctcacaaggcacaacattgccagccacctccagaagtaccggtcgcacagaaagcacctgatggcgcgggaggcggaggccgccacctgggcgcagaagcgccacatgtacgcgccgccagctccaaggacgacgacgacgacggacgccgccaggccgccgtgggtggtgccgacgaccatcgggttcccgccgccgcgcttctgccgcccgctgcacgtgtggggccacccgccgccgcacgccgccgcggctgaagcagcagcggcgactcccatgctgcccgtgtggccgcgtcacctggcgccgccccggcacctggcgccgtgggcgcacccgacgccggtggacccggcgttctggcaccagcagtacagcgctgccaggaaatggggcccacaggcagccgccgtgacgcaagggacgccatgcgtgccgctgccgaggtttccggtgcctcaccccatctacagcagaccggcgatggtacctccgccgccaagcaccaccaagctagctcaactgcatctggagctccaagcgcacccgtccaaggagagcatcgacgcagccatcggagatgttttagtgaagccatggctgccgcttccactggggctcaagccgccgtcgctcgacagcgtcatgtcggagctgcacaagcaaggcgtaccaaaaatcccaccggcggctgccaccaccaccggcgccaccggatgacatactatctcgtcgacaatacatgcatgtacaatagacggatgtctagtagtatagtagattgctgctagctagctagccgctagagtgtagtagcatatgcatgccttttttttcttcttctttttttgcccttattattaagctggctaatagcgattgagatggagcttgacacagatctgctagctagctatttgagggtttctcttgtatgctacctattgctgctgcttgctgctgagacaagtaatgtacgtacgcctgtgcaaacgacacatcggattgtattgtattactagttatatgaacaacaacaataataataggcacatgcatgcctgcctagtatgtgagctgctagctagctacatgcatgttgcgcattcctttcctgtcaggatcccatatatgaatcttacagcagtgaagttcatgggctctctggggttccagcatactgaattgcaccttagcttgt

SEQ ID NO: 28928 - DNA, 946 bp, Zea Mays
aagtagaccggaaaaccccatctcccccgccgccccaccacgcacgatggccgccgtaaggtcgctgctccgctcgtcggcctcccttcttcgcgccgcccccgccctcgcgagatcctcggctaccacgcgtccgtctcttcggcgcgcattggctgctcctcctcgccttctccggtcgcccgtcgagtcgagcttctgcgtggagtcgcttctgcctctgcacaccgccaccgccggtgcacgcatgacgtccatgctcgccgctcctggccaaggcctcggctggctcacccaaggtaaaaaaaaacagttacttcgatctactacaatgacactttaaattcagactcagaggctgctctgcttttggcaagctccgcagtgtaaatgtgtaattacctggttggcatagctgatgccgcttcgtttgtgcttccatcatttcggttattgtgtgtaattccatgattgcatcgttcgccagtcctgtttctagtttgtctatttggaagagagtcatttcctatatttctttttcatttctttctgtaggatctgatgaaactagatgaagagcagccggggaaagctgaaactgacggagtataacgccccctgtgggtgctcccctttaggaaccaggacatcaattgtgcttcgagttcttctgtgcctggaggaaacaggaagagttgattggaaaaagaaaaaatgggatgtgtttttctttttgttcatgtgaactgagatacgacttaataaactagatcttcgaatgatgctctgacccccccccccccctttttttaatgttttttcattgactaaaacggttatgtaatgataactatgtgacacttgttttgtttggtgtgattcttcagcgtagcctggtgatcgagactcatgcaggcattcgcttttgatctcaatccaatttatc

SEQ ID NO: 28929 - DNA, 1389 bp, Zea Mays
aagtagaccggaaaaccccatctcccccgccgccccaccacgcacgatggccgccgtaaggtcgctgctccgctcgtcggcctcccttcttcgcgccgcccccgccctcgcgagatcctcggctaccacgcgtccgtctcttcggcgcgcattggctgctcctcctcgccttctccggtcgcccgtcgagtcgagcttctgcgtggagtcgcttctgcctctgcacaccgccaccgccggtgcacgcatgacgtccatgctcgccgctcctggccaaggcctcggctggctcacccaaggatctgatgaaactagatgaagagcagccggggaaaggtgaccactagaatacctccaacagtttcgtttaattgctatttgctatggagttgaatcttacaccacaaataaccttagatgactacgaaccctattctgacttgtgaatatgaaatagcccaaccaattaataaaattgttcaacgggatacctggttttcaaaagtaggcataggtggaggataaccgttgccccacaaacatatctaccaatgacctttcagagtgttgtgtccccaagaaaggatggtatccgtatgcattaccagaagatgtgctgttaaatacagtgtgtaagactcccagatggctaaatccattttgaagaatgcattgacatcatttataaaattgggtctagtacaaaattgaataaaatggttttatagatgttccaaattaactggtaagatgaaggaatattgatgtgagaaatactgcaaggattgaactatatgctaaagcagtcttgaagaaaaatgttttctatagatgtttttaatacttcgtagcactttcctttgatgtaagagtccttgaattgttttctatgttttatcagttattttattagaatattagtgaatagtgcagttagctttgaaaaatcgaatgtgctaaagttggtggtactgcataagttttctagaatcttagagaagctttgatgaattaatctttttttttgtactacagctgaaactgacggagtataacgccccctgtgggtgctcccctttaggaaccaggacatcaattgtgcttcgagttcttctgtgcctggaggaaacaggaagagttgattggaaaaagaaaaaatgggatgtgtttttctttttgttcatgtgaactgagatacgacttaataaactagatcttcgaatgatgctctgacccccccccccccctttttttaatgttttttcattgactaaaacggttatgtaatgataactatgtgacacttgttttgtttggtgtgattcttcagcgtagcctggtgatcgagactcatgcaggcattcgcttttgatctcaatccaatttatc

SEQ ID NO: 28930 - DNA, 653 bp, Zea Mays
aagtagaccggaaaaccccatctcccccgccgccccaccacgcacgatggccgccgtaaggtcgctgctccgctcgtcggcctcccttcttcgcgccgcccccgccctcgcgagatcctcggctaccacgcgtccgtctcttcggcgcgcattggctgctcctcctcgccttctccggtcgcccgtcgagtcgagcttctgcgtggagtcgcttctgcctctgcacaccgccaccgccggtgcacgcatgacgtccatgctcgccgctcctggccaaggcctcggctggctcacccaagctgaaactgacggagtataacgccccctgtgggtgctcccctttaggaaccaggacatcaattgtgcttcgagttcttctgtgcctggaggaaacaggaagagttgattggaaaaagaaaaaatgggatgtgtttttctttttgttcatgtgaactgagatacgacttaataaactagatcttcgaatgatgctctgacccccccccccccctttttttaatgttttttcattgactaaaacggttatgtaatgataactatgtgacacttgttttgtttggtgtgattcttcagcgtagcctggtgatcgagactcatgcaggcattcgcttttgatctcaatccaatttatc

SEQ ID NO: 28931 - DNA, 2635 bp, Zea Mays
gagaagcactggcaagggaggaggaggagggccagcagagcttcacactggaaagagggtagtgagggcagccgaaaccgaaactaactagtagtccagtccagtccagtccagtagtgacgctgatcgtgtcgagagggacaaccacacacacacactgacacaattccctctgccgcacgctccggcgggaaggcgccttctccctccctcctctactcttctgtctttctccaatggcggcgattaccgcgccgccggcccctcccccggcctccacctcatgccgcctcctccgccgccgcgcgccactcacccgcttcgccgcctcctcgtccccgtcctcccgcttccgcccgtcctcctcctccttccctgccgcagccggcagcagcagcggcggcgggggcgagatcctccacgtgtcgccgcctcccccgcccgccgcgcccccgggggttcccgtctacgtcacgctccccgccgacgccgtcgacccggggggccgcgtcgcgcgccgccgagccatgggggcctcgctcgccgccctggccgccgccggtgtcgcgggcgtcgccgtagagctctggtggggcgtcgtagagcgccgcagccccggggagtatgactgggccggctacctcgagctcgccgccatggcccgacgccacggcctccgcgtgcgcgccatcctcgccttccaccagtgcggcgccggcccgcatgacctgccctggattcctttgccgcaatgggtgcttgaggagatggataagattccggacttgtcatataccaatagataccagaagagaaacaaagaatacatatcactgggatgtgatattcttcctgttctgaaaggaagatcacctatgcaagcttactccgacttcatgagaagcttccacaatacttttgaagattaccttggggacacaataacagaagtacaagttggaatgggtccaggaggtgagcttaggtatccgtcatacccaactgagaagctaaatcagccaggcagttcatctgaacttggggaatttcaatgttatgataaggtatgacgggaaataaaattctttctctaaaattacaacaaaatggaatgactttggtagagtggtaggcatattggatgatcagtctcaacgatgtttactcatgcaatgtctatttgtaccttcgacttgtaagtagtaccagtacgggttagctccctaccatttgggcttatactaaatcttctatatgtgagtttgcatttgtagaaatgacttgtatgttctgttctactttgaggtttgagccatgcaataaaaaaggacaacatctgcatttctgaaatgattgaaacacatatctgattcatgcatctaatgctatgttaccattacaagatttaactgctgatagatgtggtctgctaacagtttatgcaagcttcgttgagtgctcgtgcacagatttttgtgttacaacagtggggcaatggcggttcaactggcacagatggttcacagcagaaccttgaagaaacgagtttttttcgcaccgatggaggctattggaatacaccttatggtcacttttttcttaagtggtattcaggaatgcttctcctccatggagagaggttatgcatgatagctgatgcaatcttctctggtactggtgtgaccatctcagggaaggttgctggaatacattggcactattatacttgttcacatccatctgaactgacatctggctactacaatactctattaagagatggctatcttcctatagctcaaatgtttgccaaatacaaagctacattgtgctgcagttgtttcgacctgagggacgcagaaagaacaaattctgagagcagtcccgaaggtactctccggcagcttgcaggtgctgctaaaatgtgcaaccttcctcttaatggtgagaattctgcgacaaggctggatgatgcatcactgaatcaagtgataagaagctcaaggctctactcaggccgtacttcaggaacatctttttcctttaactatgttaggatgaacaaaagcttgtttgagtttcacaattggaatcgatttacaaagtttgttaggcagatgtcagatgccaggacctttctagcaagactgtatgtcaggagagggcagcaatacttgtcttcaatgtcagttgtttgggtggttagtcgggcttgtgcatatacatgaaagttgtcaaaagctattgcggataatctcagccataaatggttccaccactgtggatggaaaaggtttgctcagtatatggctcatttttagttgccagaagggcaggcaggcttatatgctgaaggctgtactgatttcatgcatatgcatgtattagtttcatgcatatgtcatcgctgaacaaaagtttatagttatttgttgtaaagtggcagactggcagtgttttgctgccaacaatattgaatcgcacgagggtcctgtttagccattttagaaataattagatggagcttcatgttttcccgttacaatatgaatgctttcaaactatatctgcctatgaaaatatgtatacttcctcttgtcacaaatgtcaaatataagtccatcttagtttatcc

SEQ ID NO: 28932 - DNA, 1118 bp, Zea Mays
caatccgagatttcaacaaggaataaagcaatccaagacttcaaggttagaccttcataaatggctgatgttattggttgtagtatactcctacaagattagttgtattgctgtaacaagatatggacaggacaacacgcccgtacagtagcacagtgtgtgattgagatactagatggatggatggatagacctacaaaatctttgtgattgacatggacagccaagcgcacagggaaacccggaaatggggcattttttttttggtgtgaacaccggcaggcaggcagcaatcaaggaatgcaatccggtttcttccgcaggcgcacgagttagatccacaggaacaacaagtaggggggaaaatggagtctttcgtagatgagaagagggaggtgctagatagtagtaccttgagggtgtcggagaagaggaggccttcctgcaaggacatggcctcggtgacggaagcggcgtcgtggtcgtcgtgggtgtgggaggagacggttgacggcgacattgagaccgcctccatgcgcaaacaggacggcttccctcacctgttgccaagatagattcgtcctcccaggcccagctgttgtagcagcaagacccctcccctctccgtggctccgaccttgtgcgggaaccaaaacccccaagaaagcaggagtttttgaaggggggggaggagacgaagaagccccaatgccctgggtgggcggcggtggttcacctatgagcccatgaacatgggagggagttgaaccaccacagccctactctactctactctactctacctgtgtttgggtggagcagtggtgttgccaagatctggtttgggtcccctccctttctctgtccgtccaagagtagagcagagatttggaagcttgctggtgcgcaaggcgctagagattggtggagcaggggtgatgggccatgggagaggagggggcggatcggatgaatgcgacggacggggaagatgatggacggagtagttagagagaggctatttgtttggggaacgtatcatgtgctcatggagctcttgtgctcatatgagcactttaaatctggtgccttcatttctcatctaagtgtgaatagac
